United States Patent Application Publication US 2022/0267853 A1 - sequence listing, part 3

SEQ ID NO: 52 - DNA, 5687 bp, Homo sapiens
agaggagtcaaccctgaggaggaaaaagtagtatgatttgctggcgtcacccctctgctccgtgcgggcgcggcgaatggcaggtcccgaggtcgcagcttccactggcgcgggttgagttccctgttgcccttggtctcggggtcgctgtaggcgctgaggctgcaggtgggtttggggagcccggggggccgccgcgacgaggatcacggcgacggtggcggggagggttctaggcaagccctcggtgctgtgcatgtgtggaggggtggtctgggcttccccggggcttccgaacgaaggtgacgggaaaggaaaatggggttttcttcgggtggaggatgggatttccgggccggagcttttggaaagggttttctgaggctgtcataacaggaaaacgtccgtagagatgtgacccagtgaccgcccgctaaccggactggagagaagaccggcccggatcccacgcctggcctgaagcagggaagacgctgcctcccctccgcgagcagcttacattcgtccaagttccagccttctgtcttctcgctaacctcgctctcttccaaatcgcaaatcctcttgagccgacaccgttgcgcctaaatgatgtgcttacccttttactttgcttttttatttttgagacagagattcactcttgtcacccaggctggagtgcaatggtgcaatctcggctcactccaacctccgcctcccgggttcaagcgattctcccgtctcagcagcccaagtagctgggattacaggcgcccgccaccacacccggctaattttttgtatatttagtagagacgagggtttcactatgttggccaggctggtctcgaactcctgatctcgtgatccacccgcctcagcatcccaaagtgctgggattacaggcgtgagccactgcacctggcccaccttgccttttaaaagacaaaagtatggccaggcttagtggctcacgcctgtaatcccaacactttggaaggccgaggtggccggatcaagaggtcaggagtttgagaccagcccggccaacagtgaaaccccatctctacttaaaaatacaaaaattagccgggcgtggtggcacctgcctatagtcccagctactcggaaggctgaggcaagaaaatcacttgaacggccgggcgcggtggctcacgcctgtaatcccagcactttgggaggcctaggcgggcggaccacctgaggttgggaattcaagaccagcctgaccaacatggagaaacctcgtctctaccaaaaatacaaaattagctgggcatggtggcgcatacctgtaatcccagctacttgggaggctgaggtaggagaatcccttgaatccgagaggcagaggttgctgtgagccaagattgcgccattgcactccggcctaggcaacaagagcgaaacttcgtctcaaaataaaaaaaaaaaaaggaaagaaaaaagtatgaattgtataagcatgccagtgtaagaggagaggcagaaattcagtctacatagtcctagcacagcttagtgctaagcacttttgttggcaataatgtattgtctttctaggatgttgtcatatgtcttcttagtcattgtacatgatttattagtttagtccaaacgcacacaggtgtattttgaattcatctgtatgcacgaatttttacagaaaattggcaatccaactatgtttttattgaattgtgcaatttattttccacatgatgtctattacaggttcagtatccctgatcagaatgttggaaatccaaaatgcccccatatgtgaaacttggggccacaagtttgagaccagcctgggcaacatagcaagatcttgtctctacaaaaaaaaatgtttaaagaatttttttaaattagcacccgtagctccagcttctcagaagattgaggtgggaagatcacttgagctcaggagttcaagactgcagtggactattataactccactgcactccatcctaggtgacagagcgagactatttaaaaaaaaaaaaaagtttcatataagattaccttcaggctatgtgtataaggtatatataaaacacaaatgaattttatgttttaattcggtcctatccccaagatagctcattatgtgcatgcaaatatttcaaaatcaaaaaatcgaaaacacttcgggtcccaagcatttcggataaggaaaaacctatagttctattcctcctcatctaccttctggaaactcagcatttaaaagcttttaagtaccataaacatcaattcaggaaggggtttcttaggcatgggctataatagcagccagagctgtagagtgaagctgaatttgaactccagctctgtacttaatagctatttggattaagctgttttcttatctgtaaaatgtaaataatagttatttcacattacgtatagaaatagatgatggctctggtacctagtaacctagtagtcttttttttttttttgagacagcatcacgctctgtcgtccaggctagagtacagtggtgtgatctcaggtcattgcaacctccgtctcttgggctcaagcaatcctcccacctcagcctccgaagtagctgggactacaggcatatactaccacacccagctaattttttgattttttgtagagacagggttttgccatgttaaccaggctagtctcaagctcctaggctcaagcgatccatccgccttagtctcccaaagtgctgtggttacaggcatgagccacctagtagtcactctataaaagtaaattttcttctccctttgcctttttttttctttcttttttttctgagacagagactcgctgtatcccccaggctggagtgtagtggcgtcatctcagctcactgcaacctctgcctcccgagttcaagcaattctcctgcctcagcctcctgagtaactgggactacaggcatgtgccactacgcccacctaatttttgtatttttagtagagatggagtttcaccatgttggccaggctggtctcgaactcctgaccttgttgtcgtccacccgcctcagcctcccaaagtgctgggattacaggcgtgagccactacacccggcccctttaccttttttagagtaatttatattcatatctacagtgacattattgaatatagttttcttttttctctcatatcttttaatttcctttctaaatttagttttcagtaattacagctttacctaaagaattccatttctggcaaaattgtattaaatttgtttttgcattgtgagaggttctaaatatgttttacacaagtaaaagtcctaaatgagagccaggtgcagtggtgtatgcctgtagtcccagctacttgggaggctgaggcaggaggaatgcttgagcccgggagttgagagctgtagtgcctgtgaatagccactgccctccagcctgggcaacatagcaagaccttgtctcttttacaaaaaaaagttccaaaacaacatgaggagggtgcaaacaatcagctgttgcaggtagaatttttttacataccatctctgtttctctgctctgtatcgtatcacatcactattgaagctagtagtaaaatgtaataaatagacccagtgtggtgtaattttatattaatcattgtcccgtatgtaatcttcatcaattagattttaaagtattatactacattctgatgccaggcaaacaaagaggcgtattaggcttttaacatctattacatctatgtctatcatcttcttgtttcagatgcaatttatttattttattgagatggagtcttgctctgtcgcccaggctgaagtacagtggcacgatcttggctcactgcaacctccgcctcctgggttcaagcaattctcctgcctcagcctctccagtagctgggataacagacgcgcaccaccacacccggctaatttttgtgcttttagtagaaatggggttttgccatgttggccaggctggtctcgaactcctaatctcaagtgatctgcccacctcagcatcccaaagtgctaggattacaggcatgaaccaccgcacctggcccagatgcaatttaaaagctatttcaaaaaaaaaacaaagcagttgtatttctgataatttttttttcttttagctatcatggtgaacttacttcagattgtgcgggaccactgggttcatgttcttgtccctatgggatttgtcattggatgttatttagacagaaagagtgatgaacggctaactgccttccggaacaagagtatgttatttaaaaggttagtctgcatttttttaaaccagcaattggccaaatttggggaatattctttttgatatgtgccaaaaataaacagaaggggtaatttttcccccttgaggacttagattcaaatgatactgtttttagtcttgtttgttattgaatccttggataaaacagtatgattacctctagaatttaaagtcttcatttaatgaataggctgtttcaggtctttgaaagtatcgtctttttttaattcaaagtgcattttaatatagaaacagtttaaaagtagctggccaaaacctagcttatatacagcttccacatatattgtcatatattatcttacttaagacatgctatagctgagataaatagtaataacagcagctaggtgctgtgttcttagcagcactacctgagagctttagacctggtggtagagtgatagcaactggcagctgcctggtcccattgtgcctctagagatggctcctctggcagcagagagttccagttagcaagacaggatgcctgccagtgggcatacagctgggtaggaggaagcctgaggggcaagagaactgagcagcatccacagtgggtatggagagatggtagaagtgattcacaaatcagggatttcaagaaagaaaataagctggaaagggtttagaaaacatttcgaatgaactcactgagcagagataatagctttcatataaagataaactaagtaattacaattctttaacccagaaaaatgaagctaacaatatggtaaaagttaaaatcatgaatgaaaagaatacatatgatgaatctaatatgtaaattttttaaatggatcggtgtaatagaaaataaaatattgaccgggcgcggtggctcacacctgtaatcctagcactttgggaggccgaggcaggtggattccttgaggtcaggagttcgagaccagcctggccaacatggtgaaaccccgtctctaccaaaaatataaaaaattagctcggtgtggtggcacacagctgtaatcccagctacttgggagggtgaggcaggataatcgcttgaagccaggaggtggagtttgcagtgagccaagatcgtgccactgcactccagcctgggctacaaagccagacttcgtctcaaaaaaaaaaaaaaaaaaaagaaaatgaaatattgcaatcattcttctgacttccccttttatctcgtatcacagttttatttacagtttttccatttcttccttttttgctttccacacagggaattgcaacccagtgaagaagttacctggaagtaaagactggctagattatcgaatgttcacattttaaagttctgagagaaataaaaacatgaagaatctgaaa

SEQ ID NO: 53 - DNA, 41266 bp, Homo sapiens
tggcggcggagacggccggcgcccggcgcggagccctagcgaggcagttcagcgcggcctcgggcctggtcgagaaggatgctgtcccgacagaaaaccaaaaacgaagtgtccaagccggccgaggtgcaggggaagtacgtgaagaaggagacgtcgcctctgcttcggaatcttatgccttcattcatccagcatggtccaaaaattccaggacgaactgatatctgtcttccagattcaagccctaatgccttttcaacttctggagatggagtagtttcaagaaaccagagtttccttagaactccaattcaaagaacacctcataaaataatgagaagagaaagcaacagattatctgcaccttcttatcttgccagaagtctagcagatgtccctagagagtatggttcttctcagtcatttgtaacggaagttagttttgctgttgaaaatggagactctggttcccgatattattattcagacaattttgttgatggtcagagaaagcggccacttggagatcgtgcacatgaagactacagatattatgaatacaaccatgatctcttccaaagaatgccacagaatcaggggaggcatgcttcaggtagcttaacattataaataatatagtagtttatatttattgacatgtcaattaaaaagatgttcttttctagattttcttgggacacggacaaatactactagcgaaatatttttccactttgctcgtcctgcttaagcctgtgtgcaaatagttgttaatctacactgaatggaagagtccttgtgaccatttattttattaactcatgttatataaacttggtacttatctcaaggctgtctagtctcttaatgctgtgacccttgaaaacctagagaatttaatgtctccagttgggctgaatttaggtttaggtttggtagaataatgggaagggtaaatcttcagagacacttgactgagtcctcagagacacttgacgaacttgggaaaggaaagaagaataggaacaactgggcatggtcagtgataccctgagcaatcacattacttcgctagatcctgcactttttctctgaacaaaaagtagttcaagaattatttcctgagttgatcaaaaagacttatagtcatatggttaattatgtgttgagcatgtctttttattatttttgtaacagacaaaaaatattaccatataatttaagaaaagaaggtactttccatatctcctgagttggagatacttctgaaaggagcagaagagatgggagaaatgtacagttctactttattcctgaagtcctggttttaccagataaaattaagtgagaggaaaattaaactttcttgtccgattgtttttttctaccaagttatagactttaaattttggcaggataaaaataaaatgtgagacagatttactttttggctcacataacttcaaataagacgacttaaaaatggtttggagcattagtattttgactgtagaaaaaaattattcatttagtattaactgtttatgtgtctagcgttttccttgggtctgttggtctctgctttctggtaccttatttgtctagtatcttatttgtggaaacaaaaccaatctatacacaatagtcacagaacaattgttacactttgtgatactaactgtaagtgcaacagggaatcagaagagagatgagtataggctggaatacttaaagagatgattggaggacttggagtgggccttgagcttggcctttagattaacaggggccagaagaaggacattttacatggaaaattgggaatagcacaatgaaaacagagtaggcatggtttaaatataaggaacagtgtagttctgcctggtttgaagaaataagatgtaaggtcgagtggagatttgtggttcaacaataggcttagatttgagtcaagtggaagctcttgcacatttcagaaagacaagtgattttatgaaagcagtgtttaaagattagttttgtactagaattaagggtagattcctagagaaaagaggattgcaggtaccagtgggtaccagtggtaataggaaaaggcaaatctaggatgctttggaaggaaaaatgagaattagagtttaggagaaagcagatcactgaagttttaaaaataatgtggaatagttggtaagaacaacttattttatgaaagctgacatcggagtctcactggaacattgtagaggagaggttttctaggcatgtggaaatgcagtaagaggcatgggtaaaagcaccttttagtttttaaggaattaggttaaagaattagctgcatgcttgtgtttattttggttatttctgatatacagttctgaacctcaggagtaatttgttatctaactaaaatagtaagttttaaaaataaagctcatttatattttcttctagaataataactgcttattacgggaaatttgcaaaatgcagtaacgtaaaggcaaagtacctgtccaccagagatcctcttagtatgttattttcttcatctttttccatgccaaattctttttttacatggatgtgattatataatattttgtacagttttctgttctttttacttgaatgattttcttcatgttgtatactttttatgagtggttttaatgactgcataatcttccatttggtgcatattcagtggttaatgaggacttgacctatacttcagaaatttggaaagaggagaagtgggacatgcccaaattaatgggacttggccactaacggggtttgaaggacaaaggagagggaagagtcagataggattagcatagcacatgactgcctaagagatgctcacaaaaataaatggctgaatgagtgaatgaacccagcggttttaaatctggaggcttaagacagtttttggtagctgagggagaacagaaatagctatgtttactgttaatatagaatatgtgttattctttgcactcacctttcccacctatattgcagacgccactgatagcttgtaatacttttctacctgaggtttaagtatgtaaacatgaagaattaataacaagttaaactcttgttttgaaaatctaatttgccaaatataattgaggaaatactataagaactaaatctctactgatcctctcttaggagcaatttgacataatatttgtaagtttaaagacagactttaaaacaactttccggtcacaacttcaaaataaagtacaagttaattgcaaaaaaataaataaataaaaataaaataaaataaaataagaatgctaatatctgttctgcctctctaacagggttattttgagtgttagatttatcttacttgtagttgtttttttattttaaaaaaattttgaaatgataaactaacaaaggtcagggaaagttcttagactactctggcaaggcaggctggacaattctaaggcgatgaggtaccaaggaggctagtagtataaaccacagtgcctcaactttcctgcccctcccctgttctccactcctccatgcaaaacatgaaaagcacacttctccactggcagatcagactagcatgcaaccatcttcaggaataatctaagcctgaaatagttgagaggtaagtaattgacaaaaatgaatggttctctgtcatgaaacaagcaaggtataagtttgtgttgatcgatccaagttgcctttcctagattataacattgaacttcatccttcttaactacgtcatagaaatgactcgggcaattcaaaaaatagcttaaagacatgtagtatcaagaaaattggataagttttttatgtttgattaaatgcctcaaaagtacttgttttattttatgcaaagattcaaaattcttaaaagatgtggatttgtctaataatttgcatgatatagctcataggtagaattttatgataattatgaatgtgtacttcagtaaaaatatttctgaaaaatttaaagaagattaaggaatgcctgaaagagaaaaatgtaatctgatgtattttttttgttgttgcatttacggggctcacattttttccttccattgtgcagatacgccactagagagcactgtacggcactgcttcctcacaccctgtgtgaggtgctgaatctgacctctgatttcctcattgagaaccctccaggttttgacttactttaatagggccaggtactctatagggcattgtgccagatgctggaaacagaacaacagagacaggacccacaaatacaaaggaacagattgttcacaacaacctgagacaggtgttaataaacaggcctgtgtcagcactacaggagtttagagaattgctaacgatgtgattctgcaggaaaggaaagtgggaggtcatggaaaagaaagcactctcagactctgaccagtccaggctgaagaaggtatgaaagctgaattttaggctgagtttccttttcattttccccttcctgccttagcaatggacctccatactggagggaacctgaagctaggatatgacataggttacccgcaggatatataaaaaatgatcagcctatacacccaggactgcccgtgagaagttgctttcctctgcactgcaatattcatttgtcatttattgatttgagaaatatttattgtcaagtgtgccccaagcactcattggtaaataagatagccatagtcagggtgtgtccacttaaaaactgtagtccagtggagacacaatgattgcaacgtagtgtaataagtcctgtgataagggaagaagatggaaccacacaagtatagagcaggggcacctgacaaagacaggaagtcagggaaggcttcgtggaggaagtactattcaatgaagaccctaagcagaattggaggccacctaaaaaggagtaggtgtattccaggtgaagatagcacaacccaggaaaaaaagaatccaataggattttatttgtgtatatacaattttcagatcttgctgttttccacttatccattttatcctgagtctccatatctttatttttgaaaacatgattttaatagttgctctaatagtccatcgtaagaatagtgacatttatttacccattttcagaaatagcatttttaagactcatgctaatcgctctccctttgtcaatataaaatcatgtgaattaattcttactgcttatatgaatatcaacaacatttcctttacttggttgactcttgagcacaattcctgcaacccaaactgatatccagccataacaaacactgaatttatggaaggtattaaattattatgtattgtttaattttaagtttttaataaaatttgctgcagttgttttacatgaattggcagggccttaagaggcactctggattcttttcctgctgctcagattaccccgtctgtgtcattcattcttccgtctctcccaagtctgcatctccactccctccatccattagtccctcaatctcaggctcctccctctctgggatgctctgctgatacttatctccatcttttatccagtaaatacttttttttctctgtggtccagtttcctgaatctgcaaacattagcttcataaatgatttttttaaaccacactttgggtaaatatgtaagtatgatatatgtggcaaattgcttacatagcaaattgattttctgggtcaggcaggaaagactttcacaaaaatcttacaggaagtaagatgatttagatggagtatccagtcaccttctgttgaaccatttcagacctaatttatattttttgttctgtctccctttaaaattgagcttcctcacatttccatacctttcattttaacctactttaatgataaggtttttggtttgttgggttttgtttctgactgttttcatttattgtcttggtattcatttatgcttacttagcaaggtatatttcagacagaaacagctcactggtttcatagctgcacagcactagctcttcagttcaaactctattttcactgaaagatttgttgcatctcatgtctcttacattgctgtgtgactcaccatgagtttgggagtctttcagaacctcagaacactcaaatgatttaaatttctcaaatatgttcatttcacatataggaagtcactttcatctggaccaccgggtcttgacattagaaatgagaaggtctatggctccacaacagctacctcagcctggcacgtgccctggcctcagagattcacagtccagttctttgtccagttgggtggctcctgtctaccaccttaccatgcccacttaactgatgcaaagttaatatcacaagtagccacctgttccttgcagtgaaaattgtacttaccactttcatagccccaagatatccatgtatctttattaacaggcgcttaacaacttgcatcatttaaaatgcctcccctgcctatcagctgatgatggccacaggaaggtgggcctggaagataacagctagcaggctaaggccagacactgacacttgcagttgtctttggtagtttttttgcactaacttcaggagccagctcgtgatctcaggatgtatggaaaaataatctttgtattactattgtcaggtaagtgattttatttcatcttggttctgttatattgggtatgagatcatagaataaaatgtaaactaccctattttagttctatcttatttaaatgcataaatgagtagtatttcctcttccagtctggtggatggattttactggaactcagctaccaatgtgggggaaatggcacaagggagcccagtatttatggccgaatccagttttctagtatgagaagcttacttcaattctaagtctagctagaattaaactaattttatcaaatgctatgagaaatagctctctgtgaataaatgtattgctttgtttgagttataaggagattcatttccaaactaaagagttattaacaaaggtgttatatggcttttagttttaaaaaggtataatttcctatttctgccaaatggtgagaagccaaaagcatgaacactgaaaccgtggggagttgttcgcttctctgtgggtccattactaaagtgtcacataggaagaaacaaaaacaaaaacaactcttactggcttagatgtcatgtgaattttaggagaaatttaaatccattaaaataaatatcatagggtcattattaaattgtattcaataatttgaatttaacttagtttaaatttaattattaatttagtgtattaaataaacatgattttggcctctttctgagaatattatagttaaacatcctctcaagtgcagtgcttatgtgttagcaatactagtgcccagcacacagggggcaggcagttgcttgaaacattctgagtctattagacattgctgtaatccaagtgagagcaagtatcaaggatctactgagcatacagtagcatacagggaagagaggatctactgagcatactctgtagcatacagggaagagagatcagcattttctaagataccctaggggaggataaaatagtgcaatagttaagagcacaggcatgaggaacacacagaactgggttcaaatctagttttacttctcaaggctggggaacattaaggcaaattatgtgcccacatttttatgtgtccttgtctttaaaatgcaggcaatgttggcacttgccttataataattgcgtaaagattaaacaaaatgtttaatggaatacacttactgatgcctgaaacaaagtaaaatgttaagcttactatgcattttctatgattagaattaactatcatgattaataagtattaataatatattattaaaataagcagtagctatcagtagttacagactagggaacaaacctacgtatgtgattggtgatttctgaaaagtcagagagaaaagaaaattacagaaagaaaacagaaaacaaacatagctactctaattttttaagcagaaaagtatgaaaacatttagtttgaagaaaaaacaaatgaaagggatgtagtgtaatatttgtatatgtattcatatatttgaagtgctattacacagaaaaaaaagatgtattctttgtgttgctccatggggcaaaccaaactggatgtaactcaaacaaaattagacactgcatactctactggggggtgtgcccagcatttgggaaaactctgtgtgacttacaagtgccccaaatttggaaagggttcctggcaaagaaatgatttttttttttaatttctacaactacacaagcagatagtgaattaaagccttaaatggcacttaataaagaggtcactggggcaagatgaccctgaaagctacaatggtctccagtacccaagctgttatcatcttcgtagcttcagaaaccctccaaggaaactctcttgatgtggctacttaatagtataacagaaaggtgtaagatcaagtttttcccccatactgattagctgaagactaaacatggtgaagtctttttctttttttttcttttttttttttttttttgctatgaaaaaaagacgattgccttgctttctccaggaatcttaagaataaagccaatatttctaattctaaacttaccagagatcttcttccaaatggagaaccattttttctaatatgacttgattcgcagtccctgaattcctgcactcatttgatgattcagtcattacatgtcagattgtgaaccagacactgagcccagggcaggaagaaaaatgggctcccatggaggatacacggaggttgggcacagtggatggtgggagggaacgcagataataaatggaacaacaactatcttattaaaataagataaaaacagtcaaaaataatacaaagcatataaaaccaggtaagatgataaacatgaatgccgaaaactgcttaagaaaagggtagcagggagttattttctgagtagatgacatttatgctaaacgtggaacaaggagaatggagccaaccctgaaaattctgggaaaagaggacagaaggcagagggaagagcaagagcaaaaattctgaaacaggaggtaagttagtgttttcaaggaaaagctggagcttttatctgaaaatcagattctgaagctaagaaccaatttgaaaatacagtactatatcacttcaactaggaaattatggcataaaccaggagtctccaaaagcttttttgtgtttacttaaaaattcatacaaaatttgcattctaggtcataatatactaatttaattggaggaaacaaagggactggtgtgatatcatcatgcctactttattcagccgtgtatccccagaatctagcacagttcccgattggtatttatagtagcatattggttgaataagcaaggaaggaggtgaagggagggagaaggagagataagcagagagggagagaaaggaagaaggaaaaggaaaaaggaaggaaagaagagaggatggagagagagagggaggcaagaagggagaagagagaagggaaaggaagagacaggaggaaggggaggaggaaaggaaagaggaaatatttgttttcatctggttagacacagtgagtgctccgcatagacagatcattattgccctgtgcatctgactcataccacagcaggtacatcagtctgaaaagcacatgttaagtgaagaaacaaggcatctcttttttttttttttttttcagggatccaagaagagagccttgctagctgtctatttaattggcacaggaaagagttacaggaactgtatgccagggaatacatgactataaattctttaaaagccaaacctgtgtctttgcttatgtgtcccacacattgtcagccacatagtaggcagtcagtatcaactactcaaaatgacaaatgacaaatgaccagaattttgtggcagactagtttagccatgaaaaatcatttaacacccgtgggcctcagttttcttgtgccttttcaataaagcgccgagtagatggtatctacaatcatttttcatctgtaaaccccaatgaatccccaaaattcagcctgagatgagctggactagttgccaaatctatagatatctttagcttggtgtgaaatagggtttttagagagaaacagacacccactgtgaactcctttgcagaaaaggtctgaatagaggggaaagtagggatggtatctcaaacttacttcgtagtgattttaaattaggaaatttagcttcacattcttgtgataaatttcttttcaccttggtttctagaagattattcaaaacatctatgagactatttgagaagtatacttttgaggaatttcccccaagttatctttacagattatattttgacaccaactgcaaatgtaatatcttttgctcaaaaaaaaaacccaatccttcttatatggtgctgacaaaatcaggctggacctacatttttacatcatagatttccagccattattatcatatccacatctttagtaagtacctatctgtgtagttttctgtgataaatgaactaaactaaaactaaagcaaaaatgttgaaaaaaaaattccgggtgtatctctgagtgttgggattgtaagattttattttttttttctcattttaaatactttctaaattttctgcaaagagaaccatataatataatcaggacaagttttaatatattttaaaaagtaaatcgaacaaacacaatctctgctttctaagaagtctttcatttttgtacgttggtcatagactatgactatacaatttatttgtgatatttattaagaatttctgtctaacccaaattattatatgtaagctctggaaaaatgatgtcatctttgtttgtagtgtacaaagttctataaacagttatttgatcaactttggtatttccatccctagatttatatacagcaggttaggttccgtacataggcaggttctgaataataaaaaccaacagtgatatagcactcactttgtgccatgcactgttctaagcgatttacatacacttaatttttaaaattgtagtaaaatacacataagtttaccatttgaaccattttaaagtgtacaatcggtagcatttaatgcattcaaaatgatgcacacccatcaccattatgtagctccagaacattttcatcactccaaaaggaaacctcttacccattagcagccacttccaattcctccagcccctggaaaccactaatttgttttctacctctacagatttacccattttagatatttcatataaatggaatcatataataggtagccttttgtgtatggcttctttcacttaaaataatgtgtttaaagttcatccatattgtagcgtgtatcagtatttcattccttttataataaatgttattccattgtgttggtatatcacattttgtttatccatccatcatttgatgaaaatttgggttgatatatcacattttgcttatcgatccatcatttgattaaaatttgtgttgtttccaccttttggctattgtgaatagtgctgctataaatattcctgtactagttttgtttgaacccacttttaatactcaaagatgtataggggtagaatttctgggtcatagtaattttatgtttaacttactaaggaactgctcaactcttttccacaggagctgcaccttttgaccttttcaccagagtgtatgaggtgccaatttctccacaatcttgccagaaattgtactttttcatttttttaattatagccatttcagagggtatgaaatggtttttcactgtggtttcttgcattttcctgataactcatgatgctgagaatcttctcatgtagttgttggtaactgcattttgcatatctttggagaaatgttggttctagtccttcacccatttttaaatctatttttgtctttctgttgctaagttgtaagagttctttctatgttctggataaagagtcttatccgatatactatttgcaaatcttttccttcattctgtagatttttgtttttacttttgatagtgtcctttgatgcacaaatgtttttcattttcaagtccaatttttttttcttttgttgcttacgcttttgatatcatatctgaaaatgattgccaaatttaaagtcataaaaatttctccctatgatttcttctaagagttttgtagttcttctcttatatttagatctttggtttattatcagttaatttttctgtatgatgtatgataagagtccacctttattattttgcagctgtcccagcaccatttgttgaagagactatcctttgcccattgaatggtcttgacacccttcttgaaagttaattggccatggatatatgagtttatttctggagtctcaattctatccgaagaatatgtctgttcttggggcaaaatcacacagattttattgctgttacttggttagaagttttgaattcatgaagtgtgattcactgaactttgttcttcttccagattgttttagctatttagatccctaacaatttcatagaaattttaggattaggttttccattcttgcaaaaaaaaattatgtgcattttaacttaatctgttcaataattctataaggtagagactaatccatgtataatgatggaacaaaaatatagagatcaagttaattttgcaaggtctcaggtagttgctagaggaatcagtttgagcctaggcagttccactgcagaatctgtgcacttggagaatatgttatgttgcctgtaccatacctagtgatgttccaggattggctccgttactcttacaacattgtcactcagtgttctgcttgtgctttcaccaagctgaagactttaatgaaggttgacggtctgtcttcctcacgtggtgcagctaaggaactctaactgtgtggctgttatgttagccttttgctcctttttatatgggctatagaaaatgtttttaaattctggaggcctccttttgatgttatcacttatttcccagtcatcattatattttttaaaaccaaaatagaaggaaataaatacaaaacataaaacatgaatagtacagctatttgaggcaactgagaatagagatcatggcactgaaattgcattttgctaggaaaaagaccacaaaagttctccccttgctacctttcctgaactattctgctagattcagacctcagaaacattgtatcaggaaatacagaaatgttctttcaaaatgagtgtatgggaatatgggaatgcctaataaaatctgtcttcattgattcgttagcaaaaaatcatataaatccatagcttgtgattgcaagcagatatatttcagatcctttctgtgtttgttttttgctttcttgatctatcacaattggagaaaacttaaaatttctcaatggtattgtatttttgccaatttcttattctgctttatgtttctcgttgctatattattgggctaaaatggtccataattacttaagaatcattgtgaaatatattgcttaatgacacaagtaaatctttttcactgtttgtaatgtctttgctcttaattctactttgcctaagattaatatggttattcctgtttggttttatatgtatttattgatttattttgaagatggagtctcgttctgtcgcccaggctggagtgcagtggcacgatctcagctcactgcaacctctgcctcccaggttcaagcaattctcctgcctcagcctcccaagtagctgagaatacaggcgcacaccaccacgcccagttaattttttgtattttagtagagacggggtttcacagtgttgcccaggctggtctccaactcctgagctcaggcaatccacctgcctcggcctcccaaagtgttgggattacaggcatgagccattgcaccagttgtaacctatctcttttgactcaatctaaaagtttctgtcttttaatacaaaaccataatccatatgaattcattaattcacaactgacatttagcatcttatttctgttatcctatttcatattttatgattccttgtttctgctcttttgatatatatactatgttttatttgcacttatcctttcatgtgtttctaaagtatatagcctacttgaaattgtcccattagctaactttatgtttttgaaagcattctctctcagaattcccattttagtggttcagcacacatataaagtcttagactttctggagctagataagctggataaaggtgtgcatgagccactggtcaatggcttgtgcaggccgtgagtgcatttcaggtatttcatatgctattgatctggcagccaggtattcacatagggtataaccaggttcatcaggctcaaaacataatcaagtattattgagacactgttaatgtgcactacaactcacagcacacagactcacacacacacttgtctgaaataaaattccacaaaataataccttcccttattctgtgtgatgtactttgatatattctctcctattttatacaacttaattttttttagagacaagattttgctctgtggcctaagctggactgcaacggcacagtcataacttacttcagtcttgaactgctggattcaagtgattctccagcttctgcctctcaagtagctgagacttcaggtgtgctcaaccacacctgactaatttttttgttatttaatttgtaaatacggggtcttcttatgttgcccagggtggtctcgagctcctggcctcaagcaatcctcctgccttggcctcccaaagcactggggttacaggcacgacccaccacacctagaatacaacttaattttttttattattattatactgtaagctttagggtacatgtgcacaatgtgccggttagttacatatgtatacatgtgccatgctggtgtgctgcacccattaactcgtcatttagcattaggtatatctcttaatgctatccctcccccctgcccccaccccacaacagtccccagagtgtgatgttccccttcctgtgtccatgtgttctcattgttcagttcccatctatgagtgagaacatgcggtgtttggttttttgtccttgcgatagtttgctgagaatgatgatttccagtttcatccatgtccctacaaaggacatgaactcatccttttttatggccgcatattattccatggtgtatatgtgccacattttcttaatccagtctatcattgttggacatttgggttggttccaagtctctgctattgtgaatagtgccgcaataaacatacatgtgcatgtgtctttatagcagcatgatttatagtcctttgggtatatacccagtaatgggatggctgggtcaaatggtatttctagttgtagatccctgaggaatcgccacactgacttccacaatggttgaactagtttacagtcccaccaacaatgtaaaagtgttcctatttctccacatcctctccagcacctgttgtttcctgacttttaatgattgccattctaactggtgtgagatggtatctcattgtggttttgatttgcatttctctgatggccagtgatgatgagcattttttcatgtgtcttttggctgcataaatgtcttcttttgagaagtatctgttcatatcctttgcccactttttgatggggttgtttgtttttttcttgtaaatttgtttgagttcattgtagattctggatattagccctttgtcagatgagtaggttgcaaaaatgttctcccattctgtaggttgcctgttcactctgatggtagtttcttttgctgtgcagaagctctttagtttaattagatcccatttgtcaattttggcttctgttgccattgcttttggtgttttagacatgaagtccttgcccattcctatgtcctgaatggtaatgcctaggttttcttctagggtttttatggttttaggtctaacgtttaagtctttaatccatcttgaattaatttttgtataaagtgtaaggaagggatccagtttcagctttctacatatggctagccagttttcccagcaccatttattaaatagggaatcctttccccattgcttgtttttctcaggtttgtcaaagatcagagagttgtagatgtgcggcgttatttctgagggctctgttctgttccattgatctatatctctgttttggtaccagtaccatgctgttttggttactgtagccttgtagtatagtttgaagccaggtagcgtgatgcctccagctttgttcttttggcttaggattgacttggcaatgcgggctcttttttggttccatatgaactttaaagtagttttttcaaattctgtgaagaaagtcattggtagcttgatggggatggcattgaatctataaatttccttgggcagtatggccattttcacgatattgattcttcctacccatgagcatggaatgttcttccatttgtttgtatcctcttttatttcattgagcagtggtttgtagttctccttgaagaggtccttaacatcccttgtaagttggattcctaggtatttgattctctttgaagcaattgtgaatgggatttcactcatgatttggctctctgtttgtctgttattgttgtataagaatgcttgtgatttttgtaccttgattttctatcctgagactttgctgaagttgcttatcagcttaaggagattttgggccaagacaatggggttttctagatatacaatcatgtcgtctgtgaacagggacaatttgacttcctcttttcctaattgaataccctttatttcgttctcctgcctaattgccctggccagaacttccaatactatgttgaataggagtggtgagagagggcatccctgtcttgtgccagttttcaaagggaatgcttccagtttttgcccattcagtatgatattggctgtgggtttgtcatagattgctgttattattttgagatacatcccatcaatacctaatttatggagagtttttagcatgaaagagttgttgaattttgtcaaaggccttttctgcatctattgagataatcatgtggtttttgtctttggttctgtttatatgctggattacatttattgatttgcgtatattgaaccagccttgcatcccagggatgaagcccacttgatcatggtggataagctttttgatgtgctgctggattcggtttgccaggattttattgaggatttttgcatcaatgttcatcaaggatattggtctaaaattctcttttttggttgtgtctctgcccggctctggtaccaggatgatgctggcctcataaaatgagttagggaggattccctctttttctattgattggaatagtttcagaaggaatggtaccagttcctctggagtggacctctagcaaactccgacagacctgcagctgagggtcctatgtgttagaaggaaaactaacaaatagaaaggacatccacaccaaaaacccatctgtacatcaccatcatcaaagaccaaaagtagataaaaccacaaagatggggaaaaaacagagcagaaaaactggaaactctaaaaagcagagcacctctcctcctccaaaggaacacagttcctctcgagcaacggaacaaagctggacggataatgactttgacgaattgagagaagaaggcttcagacgatcaaactactccaagctacaggaggaaattcaaaccaaaggcacagaagttgaaaactttgaaaaaagtttagacgaatgtataactagaataaccaatacagagaagtgcttaaaggagctgatggagttgaaagccaagcctcgagaactacgtgaataatgcagaagcctcaggagccaatgtgatcaactggaagaaagggtatcagtgatggaagatgaaatgaatgaaatgaagcgagaagggaagtttagagaaaaaagaataaaaagaaatgaacaaagcctccaagaaatatgggatatgtgaaaagaccaaatctgcatcttattggtgtacctgaaagtgatggggagaatggaaacaagttggaaaacactctgcaggatattatccaggagaacttccccagtctagcaaggcaggccaacattcagattcaggaaatacagagaacgccacaaagatactcctcgagaaaagcaactccaagacacgtaattgtcagattcaccaaagttgaaatgaaggaaaaaatgctaagggcagccagagagacaggtcgggttacccacaaagggaagcccatgagactaagagcagatctctcggcagaaactctacaagccagaagagagcgggggccaatattcaacattcttaaagaaaagaattttcaatccagaatttcatatacagccaaactaagcttcataagtgaaggagatataaaatactttacagacaagcaaatgctgagagattttgtcaccaccaggcctgccctaaaagagctcctgaaggaagcactaaacatggaaaggcacatccggtaacagccgctgcaaaatcatgccaaaatgtaaggaccatcgagattaggaagaaactgcatcaactaatgagcaaaatcaccagctaacatcataatgacaggatcaaattcacacataacaatattaactttaaatgtaaatggactaaatgctccaattaaaagacacagactggcaaattggataaagagtcaagacccaccagtgtgctgtattcaggaaacccatctcatgtgcagagacacacataggctcaaaataaaaggatggaggaagatctaccaagcaaatggaaaacaaaaaaaggcaggggttgaaatcctagtctctgataaaacagactttaaaccaacaaagatcaaaagagacaaagaaggccattacataatggtaaagggatcaattcaacaagaagagctaactatcctaaatatatatgcacccaatacaggagcacccagattcataaagcaagtcctgagtgacctacaaagagacttagactcccacacaataatagtgggagactttaacaccccactgtcaacattagacagatcaatgagacagaaagttaacaaggatacccaggaattgaactcagctctgcaccaagtggacctaatagacatctacagaactctccaccccaaatcaacagaatatacacttttttcagcaccacaccacacctattccaaaactgaccacatagttggaagtaaagctctcctcagcaaatgtaaaagaacagaaattataacaaactgtctctcagaccacagtgcaatcaaactagaactcaggattaagagactcactcaaaaccgctcaactacatggaaactgaacaacctgctcctgaatgactactgggtacataacgaaatgaaggcagaaataaagatgttctttgaaaccaatgagaacaaagacacaacataccagaatctctgggacacattcaaagctgtgtgtagagggaaatttatagcactaaatgcccacaagagaaagcaggaaagatccaaaattgacaccctaacatcacaattaaaagaactagaaaagcaagagcaaacacattcaaaagctagcagaaggcaagaaataactaaaatcagagcagaactgaaggaaatagagacacaaaaaacccttcaaaaaattaatgaacccaggagctggttttttgaaaagatcaacaaaattgatagaccgctagcaagactaataaagaaaaaaagagagaagaatcaaatagatgcaataaaaatgataaaggggatatcaccaccgatcccacagaaatacaaactaccatcagacaatactacaaacacctctacgcaaataaactagaaaatctagaagaaatggatagattccttgacacatacactctcccaagactaaaccaggaagaagttgaatctctgaatggaccaataacaggctctgaaattgtggcaataatcaatagcttaccaaccaaaaagagtccaggaccagatggattcacagccgaattctaccagaggtacaaggaggaacttaaatttttagtgccagtgacaacccactggactgatttcatagcccattactagaggaatgcaccatcttgactgcaggtttgaattttctcagagaatctctgtagcactgttgattgggtttcacatccaaagattctagttatgctaatacaggggccaagcaaactatagcctgtgaacggccggcaccctagttttgtataccttacaagttacaaatgatttttacttttttaagtacttaaaaaaatcaaaataggccaggtgcagtggttcaagcttgtaatcccctcactttgggaagctgaggcgggtggatcatgaggtcaggagatcaagatcgtcctggctaacacagtgaaaccccatctctactaaaaatacaaaaaattagtcaggcttggtggcgggcacctgtagtcccagctacttgggaggctgaggcaggagaatggagtgaacccgggaggcggagcttgcagtcagccgagatcaggccactgcactccagcttgggcgacagagcaagcctctgtctcaaaaaaaaaaaaaaaaagaaacaaaaaaaatcaaaataataataataacatgtggatattatacgaaattcaaattctactgcccacaaatcattactggaacatagtcatactcgtttatttatgctttggtttacatattgtctgtagctgcttttgcacagtgacagagttgaatatttgtagtagatggtccacaaagcctaaagtagttatggcccacaaatcctaaagtagttactccctctccctttacataagaagtttactaatacttgtactaagggctctcaacagacaatttgaaaaacttaagttttagactaaagatttccaatctaaattcctgtggagctttctgaagctgccaggtagagatgggaacaggttgtgaggctgcaggccaaacactcaggccaacttccaccaagcagttcaactctgtctgtttcacacactgatgagcttatccttggaaagtgattaaagtaaaattaaatgcgaattgagggaggaagtgagggagactgtggctctaaaacaaaaccctaagaaacaccaacatttaagatggcaaatgatgttatttctaaagtcgttcaggctaatatcccatactgtagctgttcactttatagataaaggtgacactagaaccatagacaatgtaagaatggaccttgaaactcaggaagatgaagtttacatatattaatctatattaccaactggagcagttgttttcgccgctggccgcacatcagaatccaatgcctggatatcacagatgattctaccatgcagtcaaggatgagaacaaactagtttcatttctgcaattttgtattgttcaaccagagaaaggaagtaccagtggtgtgagaactttgggataaagtttttgttttcaattgaaattattttcattcagcccaacttccttaagcccaaatttaatgtgtgtgaagttcagctacagaaataccaaaccttagactaaagcggacacaggtaaaatatgtgaaatcctcttttgttctgaggattctttagtaggcaggagtgaccagattggaatatgcttggctggaaaaattaagattcaagttaacaaactgttaataaccagaaccatctgttcttccgtaatgtggatttgccactgcaggtcaccctacaatgctatgttagaggtacaacactcctaccctcaggctataaacaaggtgaattatcatctttatatctcttcatttagccctgatttgctgaagtgaaggcttgcttgagaattggttgcattataatttggtgagaatttaatctctcaatgacaacttacttgattctctcattctctttctgctacatagatcacagtagaccttggcagacagttctgtagttacacaggtctgaattcaaaatccagctctgccacttggctgctgtgtgaacttaagcaagtcgggcaatgtttctgatgtttttttttcctcctccacaaagaataattaatatataacaatagggtctcagctagttgttttaaaaatggttagagagatgtgtggaatgaagtaagtgtgcagtaagtgttaactacaaatattattatcttagacatacagatttccatgattcatgaatggtgaagcatcttagaagacatccattccaggccaggcatggcggtgcgcacctatagtcccagttgctcagtagaatgaggcaggagaattgcttgagcctaggagtttgaggctagtatgggcaatatggtgagaccctatctcaagaaaaaagcaaaactttttttaaagtttaaaaagagagacatctgttccactactctcatcttagaggccagaaaactgaggctcagataatttcagagactttcacagatcccccaaccatttggtggcaaagccaggaatagaactctgctctcctttcccactgggacagtggacagaaattcatcttgatttccatctgtccaggctgaagaatgtgcactggctggaatgacagagtgaccaatttttttctccacctctgctgtctcagcaatggtttgggacagtgtggatgaccagaagctggatagtacagagcgaggctaaaaagttcaggcttcctgaagggaagctgcagtcctcctaggccacaacaccttcgagatagaataaatacagcacccttctctaccaagttaggaaaggaagaagtgttaccaattagttgtatggggactgccaaagcacgccattctgaagatgagcagaaactggctcattccatttggcacctagcacactaactgcaccagttaataggccacgcttttctccagagccattggctgaagagttcaaataaaaagtattgagaataggctatccaaaacagtaggctcagatgctatcacacaaagcactttatccttaagttcaatttttctaaattgtagttggctgctttggcttaataaaaaccttccaaaaaagaaaaatgaatggccacagacagtatgggtatctaactatattatcacaacttgaccaagattgaacgtgccaatcctttggttcaagagccaaacaaaatcgttcccttaaaatattgcttcatgggaacagtcttcttcaaacatcttttagcacaggcaagattcccatttatacgttaattctgtccaagacaatgagattgggcagaaaaggcattgagttggaagtcaatggatatgagtttttgtcccagttttaccacaaattagctgagcataacttccacagatgcatttatcaagtagttttcatggtcattgcaatgccaaaaaactgtagcatttagaaaatttagttttcagacttggaaactatttaaggcatttcatatgaagggtgtgtccttgtaagagtttgcttatgcaagataaggcttctttcagctgcaagtcaggagcgaaccaaaactcaaagcagcagctgcatgagctgactttatcacatcttgacaagagctcagccactggaagttttggcatacagcgaaactgaagcgtacttatacaatatcacactttatttttattgtttctaatagcattccaggttagaaatgtcaattatttgggaaagctgagtggtctggtagataaagcatgcagcagagagctaggaggctggctatttccagtcgttatcctaacatgtcttgggcccccaagtcaccccacctccatggtacaatgggaactgtggcagaagtccacgctctctcccccaacacatggggataagagacaagagaggtgaaatgttctggaacatatccgatgttatacaagtataagctgtgagatgatccaaacgcaaatattgaatatttcattttctagaaagtataccaattcattccacccttctcaaacctaaattacagaattcaattcaggtcacacagatttactttgtactaagtaccatagcaaatgccatttcagtgcctgaaaactgaaaaacataaatttaaagtaggagtttgaggcctcactaatatgacaaaacatacctttatattttattttgcactaatttgccacttaatcattaaactcttatcaatctgagagatttgccaacacttgcctgctaggtgccctaagcctccacatcaatgcatgttatactcccctttctccatatgttaggcccatgctatttctttatccctcctcctctgcatcttcacctaaaactctgcccatccttcagggttcatccagtgattcatttgcaagtaggcatggggtaaggtcttcagagtatgtttctcagaggcccatgcagctaagaaaatgtgcagtgttggcacaaggtctgtctattcctgggtagccagatgctggacacatctttcataacaccacaaggtaaatatacttcacttgtagagagaggtgaaattttgcaggtatagactggatgtgttcctgccagaagatgtgaagggattaagaaactgactctcatctccgtattgctagagcaaaacataatttctcatagtggctatagtataaggacactgaggggtaagagatataatctaagtaatacaataaattagtgtggaaaaatcatcaaaatgaagactacatggtttttactaaaattctagcttttaggatgtccagggagctcaggaatttagctgtccttttttgtatgtacaatatgccccaatgcttgctgactaatgtactaaaacattagagaaatcttgctgacaagatctcaaccagtcagcgagatccggaaggtgagactaatattgagggccagcagaattaagtctcagttctgctgcttaccagatatgctgatctgagctagtcatttaatttttatgagaccaaatgtctatctgtaaagtcggcaatttggattagatgtgctgcaagtggttttctagcttaaatgtaccttctgaattcaacaggacaatacttaaactgacctttaatctaggaatgacacaagtagatttttgaaagctactttagctacagaaagctgagagcaccaaaggcaaagagataaaaataacaggagagccttcccttaatccagtccctaagcagttttggcaaactaaagtttgttgttcaatggttacgagtttgcttcaatgctttctacccagtttactgaactaaatagtatatagctatagtaaaaagtcctattcaaaaaccatcttctcacagatattttgcagctttgcagaattgaatatgtccacagacgtctattagctggttagggtcttaggaatctaggagagccaagtagttgtgtgagctgttgttatcaaatgtagttttgaacattcttggtgattttaagggatcatattgtggaaatttggtttccttaccttgaattttgaatgaagctttagaatttgaggatgtttctttggtttctccttccaggtaagtgatttttttttttcaaccagatgctggtttatttaatttgaaggtattgatgaaattctttaaattgcccccatgtgattctactctggaataactacgaaattatttaaaagttaattaatacaagaaaatatgaaaactcatttttatgggagctattgttccttcaagatgacactgttttgtaaactatagacttccagtaacaagcctctgtgccttcttcttaccactaagcatgcatgggtattaattcctactgaaagacttatgctatcttttttccagaaatggaagaaaaatgaactatgaaaaaggtcattttataggtcagctaccattatgagattgttgaggaaatgatataaaaaacaatttttatcaaattatctttagggaatttatatgtttattttcttactatgttgacttaggtgactataagaagttgtatcagagcaactgattctggtgaattaaagcaagtatttctaagaacataagtggcaactttcagtctcaaatcaatttggccaccaatcagtttttgtaagggtacaaataggacataacatgctcagatgggacttggataaagtgtatacaattttacatcgaggaaattgtgtcaatgtgttaccttcaatgttagaaattcccaagttctgacaatagttcagagccttgttaaaagccagagtggaggcatgtagatccagctggaaagagaggcattatggtctaagttaggacaaattttaaagccagtgttagggtctgagtccagctttgtatacttgagtacagtgtttgatctctggggtttcagccttcacttcagaacaaaatttccaccaagtgctcttttactgtgagcagtagctgttgaagaagaaagaaactgttgaagaagaaagaagtctacctatttgctagagtgttaaaattgttttgataaagctcaaaacttatctaaataagctctctctccctaagcatgttttcatttttataaaacagttacatatactttgcttaaaaatttaaaatacttttcacctcctctgacttcatttaaaattaaaataattaaagtgccaattttaagagatgttagctcccattattggttctttgccatattcttttgacaatctgctgtaattttctgccccctttaaagcctcaggctatagggcttctccaccaaaggaatgttaagaagtgataaggaccttctgtgagcagaagtggcttgtttgcaaagggactgcttatcttggccactcttgaacacaagatgggaccctctactgcaaagctctggcatgtttttttttcccctaagttatcctccatactactgacagtgattttccctaaataaaaaactgcttcaaaccattcattctctttccactgccttaaagataaagtccaaattctagaacatggcccacagcatttggtgcctcaccacctcttcaacctctcatttgctgttcacccatttctgtattcctctccttctcacaccttgtgctgcagccacatagataacttgcagtttttgtaacgtgcaatgatgtctcaaattccaaggcattgctggtaccacacagcctgcctggtaaaatcctagacttctttcaagataaattcaaagacacctccatgaggtctttctacctctccaagtagagttgaccgctgtctcctttgtgtccccacttccaccaccatcctaaaatacttattatacttagattaataattgtcgctcttactgcactggaattaccctgaaaggaaaggccatgtattatttatcattgtcttcctagtacatagcccacagcctatacctcccaccccaaaaaaaaccttttgtaaataattgaacaaattaagaaacacccaaggcccccagtaaacatcaaggcctaaggaatgcatatctggattctaaataatcataaggttttacaacaccatgttaagcaccagggacttcagagagcttttagtctaaatcttattagagaggccagcaaagacctccaaaggaagtggcattgaactgagacttgaaaagccagtagttaggcaaagatagggagggaaatatttcagacaaagggaggagatggcacaagatttaggacacggaaaagggtatggtgcagtcatagagaaaacagatgtgcagaatggctggagccccaagagggaagggaagggcgaagcaatgaagatgtgaggcaagcaggactggaccatgcagagtcttgcaggtgttcacaaagaaaattgcagcaccctcccatagactgaaaacacctctctacctgaacccctggaattctgactcaggtagtccctaacatcctgctgaacagttaggaaacttggaggaatatgtatatttgtactcagtcaaaactactagatggcatttacagactatgttttgtgtatttttattttttactttttgtttttttttcttatgttagcaaaagtatgcttgctattgaaatgttgaaaatatttcattggtcttaaaatgatgcttatttttccagatgcttgcattcattctgcatgtgctattttgtcatttggtttaatttattaaacaattttattaattaaatttattaattataaattaatttataattaattacatgttattattaattataaatttataattaattacatgttattattaattattaattcataattaattacatgttattaataattataaattaatttataattaattacatgttattattaattataaattaatttataattaattacatgttattattaattataaattaaatttattatttaaattattatgttcccattcagatgcaatctgaaaacccatttcttctcacactgctatatagaaataactgagactgggtaatttataaagaaaagaggtttaattgcctcatggttctgcaggctatacaagaagcatagtgcttctgcttctggggaggcctcaggaaacaatcatggcaaaagacgaagggaaagtaggcacgtcttacatgcctggaacaagagcaagagagagagtcgggagagagagccttggagcaggagcaagagagagtggggaggtgccacacacttttaaacaaccagatcttatgagaaattactatgtccacgacagcatcaagggggatgatgttaagccatgagaaaccagccccatgattcaattacctcccaccaggctccacctccaacattggggattacatttccacatgagatttggatgatgacacagatccaaaccataccactcacctaattctttctccataagaatttgtccaagcatttataacaattaacatttcatttaacatcttttatgaataaagcactattctcatgctgagaaaattcaaaataatgggatatggaagtcttaggaacaagttttatgtttcagaagagcccattttgtatccacagggataagaaatgtgcaccctaaatgtaagtggattacactgaactgaaaggtgtaaagaaggagtggaggattaaaaggagaagcatggagaggatgaaagttagaaatggaagtgacaagcacacctgagtgaaggatgagagctccagctgccttttccagttgtattcccatgtagctgagccaaaggctgatctcaagtttattgttacatgcccatttaaggcttctggccattaacacttttgattttttttggcttgttattttattagctattttcataacactttcatagctaaacctattttactcaggttgtatgccttttcaaaaatacaatagatggtccatattccattatctacaaataagccgaagctcatatctaacatttattaagagagatggattatttttgttcattagttatctttgtaaataatttttacatactttaattgactcataaagatgtttctttctgtaattttaatatttgttgaacttcaaaatccctatcacaaggttattgtttaaaagcattggtttttatattatcttaaaagccattatacctgaatgctgaacaacttagaaacattcagtaattgttttgcatgctatttagtgaattcatatggcaatcgtttatacacacatgatggaatcaggtggcaggccaagttaaagagcaaggccagaaaagaacttaaaagagaagagaaaacatagacagtttaggaacaatagatcatgtcttctccatgatttggaggtaaactgattacctatcagctgataaatagagaaaggttttagaactctttccttgagtagactaatgagaggtgtcagagaagatgttttctgttgtttgtgtgctctccaggaaactttgagcattcagctgaggggccaagttggctgcctctgaggagaagcccttccacctccactccattgcacttgggtgccattcccctcatttgaatatctcaaagagatgagcaaaggtacatctacagagttcagggtactgacgtttatcataatgatttataactctcagaagagtgaaaaacacatgaatgcacagaatagaagattgaaaaataaaccacagaacattcatataatggaatactttgcagtcataaaaatcttctcatagaagaatatttgacagcatagggatatctgtggcatattaagtagaaagtcagacttgtaaacattatatacatattcatatatatttaaacaccatgatcccatatttagatataacaactaaaagttcagatggctatatatcaaaatgtgtcaaatgttcaaccttgcataggctgactgtagatgaattttatattattctttgtgctttcttgtagttcccaaattttctttattgaatctatattacttttgcaatttaaagaatttaatttataaaattttataaaataacttataaatttgaaatgtattgcatttaagaataaaaagtgtttaattacagaaataattcacaatttatttaatgagattttaaaaggatatatatgagtctacattctgatttcatgtttgcgtgcgtggttttttttttttttgagacggagtctcgttctgtcacccaggctggagtgtgcagtggtgtgatctcagctcactgcaagctctgcctcctgggttcatgcaatgtaatagtgttttattattgtttccatttttattgaagaagtaagattgtccctagcagatggagacactgagatatgggacagaagttttgttctatataattattatgcgcttccacctttcttagcatagacagtttccaaaatgcaacttcaagttacccctttataagcataataacaataatacccaacatacatgtaatgctctttatgtgccaagtactatactaacacatgcacatcacatacacacacaccacatacacatatttaaactaatttcattctcacaatgacattttgaggcaagtattattattgtacagatgagaaaaccaaggcacactttatctgtaaacctctgccatgcagaaattctggaggggcttctggccccttaattttaaaataaggccaataatacaatacttaccacacagcaattctctaaagattatgtaagatatataccaaagcgcttagctcagggactggagggatgtgagggaatttgtcttttgtgatatgctttatggtccgctcagtcacctcgttcttaatccctttctcaacttctattttatacaggaattgtgagcatatcagcatcaagtaccactggtgtggcaatgcacacttcaacctcttcttcagtcacaaagagttacatctcatcacagacaaatggtttgttttcatttttatttttaaattgtggctccgaaatcgtttttgtgatgcaaccctattttaggggacctgtcactgcagagaaactgacaaacactgagaaatgcgagctaagtagacacagcctactaagtagacacaattcctactacagaggaattcttgcctctgaaatatctcacagaaataatactgtgagttaaagaaattaaaacaatgtggcaaagcacagaaatgatgcacgtgaccatgaaatagtgggccagataaaggggacctaatagtgcggtggtgcggagggtctgtgggcaaaatgagttcagctcagacccgggctcagctctatgccagctgctgacccagggtgagttgccctgcagggtttctatcccattaattttaaaatggggccaataacacagtacttatctcacagcatttctctaaaggctaaataagaagaagtgtctaaaagttattagctcagagcctcacacattctcagtgactgataaacaataagcaaagctgggtgctgagataagagtaatctggtggcagtctctcttgttagttttcaggggagaagaagaaattctggagctgctgctgggagggatgtgggagatttgtctttcatgatacactttatgtccacgcagtcacctcattcttgttccctttctcaacttctcttatatgcagataagcacaaacgggacacatatccagctcatagtgttaatgaagtttcagaaaattctgttacaactgtttaccctccagaagaggaaaatgatatgttcttagttttaaatagttgctctggagtcattgttgtgattgaactctgtttacacgagctgtaactcatgacagttctcaagcttttgtgacagaaaacccatctgttttactccaaagcccatataccacccacaaccattaactgtaaccaagaaagagaaggaaagccccaattaacctttgtacgtaaagcctaaagaatgaaaaaatatacctgaatcctcaatcatcaaacaacgtagtatatactaagtaatttgtaataattaaactctagaaaattgtgtggctttggtagtaagagagcttcatgatgtaaaatggcaagtggagacagagacataagtaagatgtggactgagagggaaggttagcacaggtggaacagtaaggcaaccatactatcaattgctgctgacatagaatccagagagactattggcaaaagctcaaatgagacacagtaacagtttagattcagacagtggctgtggcatacatctggaaaattgatggccgcatgatccctctttgcatgggactggcatctgtgtggagtaatggctccatatgcctcctttcttctcattatttttatattttttaaaaatgcattgcttcttgtggaagtcaataagtgattcttccaatactttctcattcctttcccctcagttataagacaatttgcttatttgtcatccatgaatacttgttgggtcattaaaagtagatactgaaattactaatggtaggactgacacattccctcataaattttactagctagatgttgaaagttgaccaacaactctcaaaatatgattaagaaaaggaaacccacagaacagttcgattccaaaatgatttttttctttgcacgtcttacttatttggacttacattgaaatttcgctttataggagaaaggggacaacttgtccatcgtttccctgaagcagatatgttaatatttgacaaagaatcaaaatcattccattttaaactatcccattgcttgtttcaaatgcctaagaaaatgtgtcaatcttaaaacagaagagcatatgttgttaactttattcacacaaaattgtaaaggcaaagaaaatattctctttttaaaattaaaataggcatttcttatttttaaaaacattttgggggccaggggcagtggctcatgcctataatcccagaattttcagaggccaagcctggctaatcgcttgagcccaggaatatgagaacagcctgggcaatatggcaaaatctatctctacaaaaaatacaaaaattaactgggatggggcatgcacctatagtctcagctacttgggaggctggctgaggtgggaggatcggatcgattgcctgagcctgggagtttgaggctgcagtgagctatgactgtgccactgtactctagccttggtaagaccatgtctcaaaaacaaatacataagtaaataaaaataaataaaaacattttggaaatagaaatacataatttggtaatagtttttctcttaagttagatgttttacctttctaaccaaccctgagtacttgaaagaagcctcataagagcttataaaacaagtgaagttccctctgccctcatgtaaaaagcaaggcatttaaaatcatctaattaactggtactgtatttcaagggtaaatctcagccttgattcatttttggcccaatgcaaccacttagggaccatcttgacaacctctgctgaagggacatcccttcccctcacttgagtatcactgtgtgtgctcatttgctattctgcattctaaccctcccttcacacttggccgtgtccatggctcacagggtaaaaagcacatcatagaacttcatcactatcgcatacattcaagctaagtggtcaagaaggctgggcaacaccagcaagaggaaatgctactttcactttttatcaataataggacttttaaatattaattaggcaaataaatgagccattttacctttatgtctagccttccattctatttacttcaactggaagcactacaaatatgctataaatatggaaatatctcttacttgatttaagttgtttcattcccaacatacaaatgacttaacaagcatttttattgactatattggagactatgcataagaatactgtggaaggaataaagcttagaatatagatgacctgcattatagttataattctacttttaactagttgtctgaccaaggctaagttaaccttattcagcttcttttcttcatttgtaaactgtttataccagtttctttccaaaattatgattctatgatctgttcaatgctcttttatatgttaagacattgttttctctcataatttccaaactatgggagaatttgtggttttttccccatatctgaggagaacgtccactgagttcttatctacagttacactagtgaagaacgctgggtctggaatcagaagcctcaggtcttagttctgtcatcaactatttgtgcgaccttggacaaaagacttgatcacccacagtcccagtttcccacaaggttactgtaaagcacacagttttaaaaaagacaaaatacacatgatagtatattaattgtactttctattaaaaggcaaggtgatgttatgctgatgttatcttatttttcaattggatgtggtcatttatttcagactttcataattttgccgctctctttatctcctgtagggataacactcattaattggtgggcgatggctcgtgttatttttgaggtgatgcttgttgttgttggaatgatcatcttaatttcttactgtattcgatgactgataaaggtgagaattcagtttttaattttgctctaaataccagtgtgaacagctctcggagggtttattcctctgagttcagttaaactcaaaagagaaacagaactgcataaaattccatctttttcaactggacacatagaagtcactgtgtttctctagcataatttattttttgcatttgcccaattaaagggagcctctaaatataaatctgtcccccattttcccaatgaaagctctccctaagttttgtctaacttgctttcacatattttgatggatattgaggaaatattaagatgctacttatagtatttaccctattagtgaataaaatgtttaaaataatatatttacatatgtttaaaactttgggggaggccaaggcaggaggattgtttgagctcaggagtttgagaccagcctgagcaaaaaggtgaaacctagtctatacaaaaaatatgaaaattagaaaggcgtggtggtgcacacgtgtagtatcagccactcagggggctgaagtgggaggattgcttcagcctgggaaataaaggctgcagtgaactgtgatcatgctactgcactccagcttgggcaacagagaccctgtctcaataaatatataaataaataaataaaaataaacaaaataaaccttttgcctttcttaattctcacatattttgcaacagatttttcaaatttccacccatgaattcttaacatcagtgattttttttgaatcattaatgctttttttatttttttttttttagacagagtttccctctgtcacccaggcttgagtgcaaagtggcgcaatctctgctcactgcagcctctgcctccctggttcaagtgattctcgtgcttcagcctccacagtagttgggactacaggtgcgggccaccattcctgactaatttttgtatttttttaatagcagagatggggtttcgctgtgttggccaggctggtttcaaactcctgacctcaagtgatccacctgccttggcctccaaagtgctgggattacagatgtgagccactgcgcctggccccaattagggtttttataaagccaaaagaacttggcaacacccctaggtaccctttagaagcctccaattggctacaccctatgaaggattggcctgtgaccaatcagaggctgaagtggaggcgtagctcatggtcaagcagaggctgaagtggaaacttctgtctttttatcacaggcatgaggatgtggcctgcatgctgcctgatcttgcctagaaccagctgcacctgctgttctcttgcttatgcaaactggctgcacctgctattcctttgcttatgccccaacccttggctatcctaactccctgttctcctgcctattactgtattctctacttctaaataaaaataaaacaaaatacaaattatttgcatgtagtatagtcatgatttgttatttcaagctatgtttaaaatgtaaagcccattacagtaggatagatgagaagaaagaagggtctgaacaaagccaacagcagagaacatgcagaaggggaatgaagacttcagcctggactctcattaggtggctgtccaggataacatgaagtctcatgtgaaatatgttggaaaagaacaagattcagtcaagtacccaaggtgcctgactgctgaaatggcactgtaatttaaaaagcaaagacaagtttatcatactgtgagatccttgagggcaaggaccaagttctattcaaatctttgtcaaaaaccagattcttgataggcttactttagcatccattgatcttaattatagttcacctgccaggagttaaggtccctcctcaacagtaaagagaatgacaggcacaggggtaggagcacatagagaagggcctgactttcaaatgaactctggagagcactcatcacctccaggacacagcagatcttactgagatggctgggtcagaaatctctgagggactccaggatgcccacacctcagaaaggacaggttgaactaaaggacctggggtcccaatgtgcagcacgtttcctcttcgagtacacaccagatacattctgactgccttatccttggagtcagaaggaggagtgtctgaggtctcttttctcccatcctaaaaacaggacgtagagcaggccttggccatatgctgtatgcctcccctaagtgagcagtaagagattgtcacaaatctgctatgttcagcatctgcatttgaataaatgaatgttattacctctcaaggtgactgctttgaatgtataaattctaaactatttcagaaacctcagacattacagtcacaccatgataaaatctggtaggtctgatgacaaggaatggtgtttgttgcatgtttaaaagattgcagacagttctacattaaaagttctttctgtgggtgagggggctgtgggatgggggagatgccaggatatgtatagagcttaatttcacttggtgggattatagctaatttttgtctttttctttacactttttttctagcttcttaattttctgtaacaaaactatattacatttttaaagagacaataacaaaagccattaactttttcaaaactaaatacatatatacatatatatacatatatacatatagcaacaagacagttgctagtacacatctccctaacagagttacattagtctacatggggttttacttataattgacatagttaccctaatctatgcattctttgactatgttgcatgtctaacatgttccagtgaccattcaattgtggattacagagaactgtcattgtccaaattagaggcaggaatttcagtcctgtgggaagcatccaaaaagttcttcagcacagataggtttaggaataaaactggagatcttttgagtggttctcatttttataagcttggtcatgaacttatctgccccttagttatttttagaattgatttcatgctcaggtcaatcatttcacagtgaagaatataccatttctcaaactgccttctttccaaattttatgactagagttcagcctgagttcacataatcagctgatgaacatcactcaatggagcatattaactagaattgttgtctctatctgggtctcttccagatggtcttgtcaaatgctatcagagcatcatatattagagaatatgttatatcagcctccacttaagttactcatagattgttcttgacccttctcatggctcttctctcttgtaggttgtgttattggtaacataatttgctctgacaaaagcaaataaaggaaattttagacctttattattcaactggataaaactgaaggttcagaagtgattgcaaatattgccaaccaggtgaaaattatttccattctcagctgaacgctattacctttaaatcaaaagtaatcagtttaatgtaagtcttacctaagtctattaaactttttctaggcctagcaaagcataaaaatgctgtatattttaatgtcctcagattaaagtatccccatctctgaatattttgaaattttaaaaagaaatcactaaaaggtgaccagcagaatttattcttactaaaaagaatggatgagatggcatggaatatagtaacagccccacagcttgtctccctgtctctactcttgttttttatattccctccttcacagagcaattttttcaaactatcaattagatcatgtatttctcctacttaaaatctccagtaggtttttcactgcaccagaataaaatcaccacttgttagcatgctctctgaagttctgacctgtccacatgctcagctcacctggcctgcccccttcaaccctctcccactctctcctgtcatttggttgcaaccactgaacttttccccaaaactccaacttactaagcttgctctttcttaggaactttgttctaattttttctcctttttttgcttcatatctttgcttgactgcctccatattattcctgtctcacaccttcaaggaaaattctgatgactgtattttttatctgctttgtttacgatgtatcctcagagcgcagaataatggctagaacacaggaaaactcagtaaaatttcattgaatgaaataggtcttccctgcctacccaacgcaaagcagcttgtagtcttcttccctccttcccattaatttctctttcattttctacctgtatttttttcatagcactcagctcccaggactagcctctttatttgtataactggttattggcaagtctcaattcagtagggtaaaaaaaattaattttttaaatttgcttatactgcatggaatatacttttcctatttcttattcctattccctagaaacatcttggggagataggcaactttctggttgtttttgttattaaaatttcaaaacatcaatcttatatgtaaatgaaagctatacagctactttcttttttctaggttttcatgcctctgggattgagattagaggaagaaagcaaagaaaggacatttttttacttcactgttcatggtgtaattgtgtgcctgacggctgtagctactaacttggcttacgttgactggctactaagggactctaggagtcagaaactaaatgctgagtctctcaaaggcgtagagagaatttcagagggccttaccatgacatgaggattaaactccagttctgcccgattctcatcacgaaatccttatcccatgcctcattgtgtttggtgtccccttgcctaggggacagtcctcctgggtaagatcagcaagataactcttcagtcacattccatttgatactttgaatactctgaggtccttacccaccaaatggatggaattcagctgctcaatcactgcctttctcagaactcggttgtccaaccacaattccctttcccttaggatagggctatattggcaaaatgccgcccgaacagactgctgacagtaaaccaaatattagtttctctcaccttcttgaaggcatttacagtctttgtaagcttttctcctagattttccctttcctgttcctgcttagattctaagaatgaagtgcatccttctccttttcttcattaggtgaagtgggatttacccattaccatatattcaccaccaggtcactgacgagagactccagtgaatcgctttccctctgcattcctctccttgtacagactagagggtcacattgtgtaaagcctaacatagccctgcaaagagatctggccccagcagtgaacacaaactcagtaattctctttagagtgaggtggtaatcagtgcctcttggtttcagccgtggtcctagtggctacttatggaagaataggaatagttccacaacatcctgtaacattggcttacctgtatattatatgccacccgtaaccataaaaacaccaggatttaggttccttgaaggtaatgactatgggtccctctctgtggaagaatactgaatagaagagagaaatcactcaatatgtggaatgactgatatggtttggctgtgttcccactcaaatctcatcttgaattgtagttccaataatccccacatgtcatgggaggaacccagtgggaggtacttgaatcattgcggtggtttcccctgtgctattctcatgatagtgagtaaattctcacataatctgatagttttataaaggagcttcccccttcactcagctctcattcttctccttcctgccactatgtaagaaagatgtgtttgtttcccctttggtcatgattgtaagtatcctgagaccttcccagccatgcaaaactgtagatcaataaaacctctttcctttataaatta

SEQ ID NO: 54 - DNA, 130130 bp, Homo sapiens
agccacgtggcggcggggcggggaccgggcgggccgggcgctgggagctggctgtcccaggagcaggtgagggcggaagggctgtggggggtggagagggtggtctcgggacagttcctctccccggcccgcagttaggagccaggcctggggtcacctttgcccccacctccccgcccaggtggatcctctcctaccgccggtcacccgcgcgccggcacacgggcctggccccagtacttggggtgcgggtccgcgtctgcgtggggtgccaaggggcccgggtcccagcgtggcccaaacgtgagggtaggggctccgcggaggagccaggtgaatgtgggcggaggcctgcggggcggcctgcggaggccgcggggcggcgggaagggcgagcggaggcctggggtcccttgctctgtgcggcgcgggcagccggggacacccgggtgctctggctccctacctgtcacccggcttttggcaggactgcagcccaccaagtcccccagccttcccagcttcccactgggctaaccctcctctcccaaccccccactcagtgctccgggcgccttccctcctcgccagcgctggctgctgtccttagtcgccttcttcccaggaagatcagctctaaccctccccctcgctctcttcctcccccttcctccttctaccaaagggtcctgagccccgtctaccttgcagcactgtgctggggagaggcgccacacagatcaaggggacaaactccctcctcccctcaaggaaagccaggtccagcgcgaaggggagggtgcctgggggtgggttgaggagctgccctagtcctgtccagccttttctcactcaccctcttcaatctcctacccttctccggccctgctccagaagggccccaaaacagcctcctcatggcccctctcccctctgctcagggcgcagctacattcactcaccacctgcagccaggtctagtgcgtcatgatgccctcctcctggagagaggggttcacgaggcacttgagggtgggagaggagtgtgactctgtgtcctcaagggctgggcagcagggcagctggctctgaccctcacgtatttaaggagctcagggaaggagagagctgggagtgcctgaggttctagggcagcaaggtttgagcacaggtgggcactgaaggaccagcgggatctacctgggtaccaaaaaggtaacccggccaagtttccagatgaggtagacaaggtttcttcctcagccagggcctcgcctggtagtttgaacaattctagtagagagaaaggatggacaacaaggggagaggagaggagaagccagcctgaccaaggatgctgttaccttccagagcagtctccctgtccagatcaccaggatccctgcttgctggagaatgacccagatgtcccaggtgcaggagctcttccatgaggcagcccagcaggtaggctcaggatgtgccagggtctgtgatggaggcctgtgagcacggggatccccagacagtgggctggatgcaaacattacagcgcaccctttagatgtaattaactccaaagtctattttggtcatccagttcaatgagaaaatattatagccaaaatattatagccattattaactgttcatatacagaaaacctttggcattatttgtggtggattttgaatcctgggatcccccacaactccaaactccatcctgagaggtcttccacagacagtcacagtgaggactcagataatatgaactcattttaattctgaatcaaaccaatgtaagaaggtaaatttatttctgaaaaaactcttatgttctgaagccaaaaggatttctgaatgccctggtgtttgctatttttttttcttcttttttctttatcttctccctgctgatcattagttacatgcattctgtagatatggaattgaagtggctctacccagaaatggagagctgatcccttaagaaataataataataataaaccatactaaagtgtttatccagaaactatgtgcacccagggtctttgccatccatgatcactcaacatgaagttttcaccatcccttgggtttctttcctgcttctagagagtggcaggagggtttcccagccttgtaacagggggacaagccccatcagaggggagagaatcaacaatgaacaagaaacccagacagaaaatgtgaggcccaggaattcccaaaggagagacaaataagacattctgagatctcccctgtgatggcatctgttcctctctcccctgtttaaaaccttcagtgtctcctcatgtgcaccactcagggctcaaactcttcagcctcagccctatacagtctgaccccacctgagtctcaagtcgagttccccacatcttcttcttcctgccacaccttccagctgaaccacaccattccccagagcttatatctttcccttgatctttgctgatgcttcttatcaacaatttgtcactgaaaccttcacccaagtatttaagtggtatttaagtatttaaattggtatttaagtggacagtaaattttagttgattgatcacatgaacaaacaacagaaaaccacaatgcaagttaaattgtcataagtgccctaagagagagttgatttctaaaatgtgatggatacaatgacctctgtgttgcctccttctcccttaatagctaaacatcgaaggattggacatggcccaatgcccaattttaaggcctttggtgttcatgatttagaaatccatcctttctttctctctccctcccctgcactgtcttgttaaggtaccatttcttgattggatgattcatactctcctaagttctttttccacattgctactaaagtgatgcttttatgaagcatagatctgtgcatttgacccctctgcttaaattccttcaatagcttctcactgccttcagaattcagctcagactcctcatcttggccgccagggccctccgtgatggttaactcaccccttctgttccacagcatcctgtgtcactgcacttaccatgtagcattgaaatgagctgcttcttttctgtctcccttaaagctgtgaacttaaattcaggggcatgtcttatttatttttgtatccccaatacctggcatggtgtgttgtgtatagaagttgccccatcagtgttggttctactgaactgaacttacctggctaggaattgggtgagttgccatttgcattaagtcttaaagtaatggtggaagtggaacatatggtggacttgggaagcatattccaggtgggagggtgagaaaatgataatagctaccaattagtgggcacttactgtatactgagcacttaatatgcattacctcatttatctccactacaacattctgaagttgatatgattattttggtttgacacaagaataactgtagcactgtaaagccaggcatgtttgatgccaagtcccaagctttcatcctttttgctatgtgcctcctgctccaaatggtataagcaaagccacccagatggcaaattaaggacctctgcgtgggaacagagagtaagttaggtggctaaaatgctggaagctgaactctaggagtggctagccctcaagaaatttcctgggaacctttgaacaattttattccagtcttggggatcagaaattctgctaggagctttggggcctgcagaacacaagattaggaggcagtgcccagtgggaagacaggctagtgggtgtcatgccaccttcagtcttgacctgctcttctcttggtcacggtgattagaaagtggctcacaggaagtttggcaagggtggggacacttggaagttaggtggagggtgaatgaatggactcttggtttggctttaatcattttaggaccagatagggtagctctctctctctctctctctctctctctctctctgtgtgtgtgtgtgtgtgtgtgtgtgtgtgtgtgtgtgtgtgtgtagattggtcagtaataagtgaaccagctgggaaggagctgtagatctgagtgttaatggtgtggtggtcgagggtgcatgtgctgcctgggtcaagtcctggctctaatactttgtgaccttgaacaagtttcgtaacctcactaagcctccgtttcctcacctacaaaatgactgcccagtgattgaaactaccatagagaatgaagacaattaaaagagataatttgtgtaaatatttggtatagtgcttggttcctggtcagcattcagcttatattatataaatggctaataattaaactaaggggagtatgtatttaatccagggggtagtggtataaatgagcagaaggatccattggcaaatcaatgcatgactcagcacagctgagtcaggcagaagacataaggcaggagtctcaaacccaaaatcataccttgggccaacaccagaatgtgggacattgttccagacaacctgctgggtgggcagtctattgaggatgatgtgtgctttctaggcctgggtgagtctggagtggtttgggaatgtgagtgtgtgtttggagacccaccgaacttctggcaggccaagccttgttccaggggcctctgtctggaggcactttgtgtgctctggtggtagactcaaacctgggttctgggtttcccattctgactgtgctgctggataggctgggcccttgggcaagttacccacaggctcccagtctatttccacaactatgtgatggggtgagtggacctgattctcagggtttttatgagattaaaggagatgccatatgtggaagggtctgggccagtgcctctctcatgacaagcactaagtaaaatgctcatttgatgattggatgaagccgatcgcacacagaagcccagcggagtaggctgtgaaacttggggcttgaaaactaagaaagaaacagccagtgcagagggaggtgaacagaaggctaatgagccatgattgggtgcttgtctgtgccaggtactggacagacaggactgtgacgatctgggtgtttcaggaagactgcgttggcaggagaaagcaggtagcctgagacaaaaacagatggcaagctgacaagctgtgtggaggtctgaagtcctgcagaatctcatgctcttagcgttgggaatagggagaaaactcggtttcatttaccaggtgtttattgaatgacagttcttgccaggatccccagttcctgctggatatactaaaacaagtacaaaaccaacagcaatctcctagttcttatggaataagaagtgcctccagctagcctgaggcttttgtctttcttctctcagggttggagggtctcaacaggaacttaaaagggaagctggcctgagaataagtcaccaaaaaccaatataactagtacactggattcatgcttttctgcattctgctctaccacagagacttgaagtgtagcactagtgggtccatgtggacccttttctaggaggtctgcaggccaaagtctggctaattattctagaaaaaacccgctgcaggccgtgggagcaggctccccgtcagaaccattgtgactggcccaagcacaggaggaggagtttccaggtcgctgagacctgcctgggttctgactctgctccgtcttcttgtacagcgtcccagctctttcccttctgtgtcctctcctctcttgctctctcatggtttgtatctgtgtccccaccaaatcttatgtttaattgtaattcccagtgttggaggtagggcctggtgggagatgattccatcctgggggtggtttctcaccaatggtttagcaccattccctcgatgctgttctgatagtgagtgagtgagttctcatgaaatctggttgtttaaaagtgtgcagcacctcccaggacctcttgctcctgctctggtgacataagatgcctgcctcgcctttgccttccaccatgattgaaagtttcctgaggcctccctggaagcagaagctgctatgcttcccgtacagcctgtggaaccataagccaattaaacctcttttctttataaattacccagtctcaagtatttctttatagcaatgcacgtacggactaatacacactttttctctgtcttttcctcttcaattagatggcttacctgagttagcttggtgtggtaagatagagcctggtcaagttttggggcaatggtgaatagagaagtggcactggcaagagaggtagatagaaatagaaccaaacaatcaagacatggaggagtcctcagagatcttctggcctagtccatttgcttgtcgtgtcaagaagcaagcccagagacttgagttccagcaatagtgggtccaggaggacgtaaatattgagtgacttgcccagagcaaggttagaaggcagaaccaggttagaagcaaggctactggccccagaacacagccctgagttgaccctgacatatccaattttgagtatgggtgtcaggcttcattgcaaaagcttggctcatattttctgagtgctcattagccagtgtatggttaagaactgacttttatttttactatgcatttttcagggctgttttagcatctttaaaaagctatgtgagcctcagcagccatgtgccaggcaatagcatattgctttattagtagatgtagaaaaatgaatgcagctgaggaggaaggaaaagggaacttcagacaagacagtcttgttagcccctcttttttttctttaagcatatttatatctcttgaagcccctctttttaagatgaggacactggggcccaaatggttgggtggaagagcagggctcaattctgggattcctagagccatgaccccctcactatcccaggtcttgtagggcatgaagcttataccatttttatggactctctagtaaaaaggatacaaattgcaaatagaaaatttggcataatctttggaagggaccaaatgccaaatgatgcgtcctaaggcttaagctgttagcttcaccataaaaccacctctggtcaatggacggaagcaactttaaaggcagcagaagacaagaggcttatgctcctggagctggagagaagtaacagcagatcctgttctcaggattgagatgcggcggaagcatttcatatgcacactgacatcctttcctctttctcctctgtctttccccctttccactttaaagacctgttggttactttgcctgaaaatgacaactgggccccaaatgctgcatatttgtaaaaaatagagtggggacattttctggataaaagtgtcccacctagaaactggagtgaaagtgttcttcactgaaatgagttaggcagggttctgtgactcatttgtacccgccgtattttaacttacagaggtgagaacatgcagaggtcgatgccactgaaagatttctgttacttaccttgcttgagaagagagaatacactatgccacgcagggtcacagggaagcaccagggatgctcagggggctgaagacaggagtgagggtttattggggtttctgcaggagaggaaaggcagggcacggtggacagcttaggactggcagtttgaacaattctagtgggctctgggttataggggtggcctctggttgccgggtgtctggctctgggatgattggggtcaggagaaatcttggcttggtgtgtgagttagatgaggaggtggtctttggtggtatagactcagcattggttgttttgcttaagaaagctgtgttcatggctaagccttttgctctctctgagaattgactaggtctgagagggtcagtctttcctaggccagcaagattttaaaacatttttaagttgatatataataattatacgtatttatgggggtacatatgatattttggtacatatatacaatgtgtaatgatcaaatcagggtaattggggtatccatcacctcaaatatttatcatttctttgtcttaggagcatttcaaatcttctcctctagctattttgaaatatacaataagttattgttgactatagttacccttctttgctatagaacactagaacttactctttttatctaactatgcagttatacccattaaccaacctctcttcatccccccaatccccttcccaccctctgataaccatcattctactatttagctcaatgaagtcaactgttttagctcccacatatggataagaacatgtgatatctgtctttctgttcctggttaatttcacttaacctaatgacctccagttccatccacgttgctgcacatgacaggatttcattcatttttatggctaaatagttttccattgtatacatttaccacattttctttattcattcatctgttgatggacacttaggttgactccttttgctattgcgaatagggctgcaataaacatgggtgtgcaggcatccctttgatatactcatttcctttcctttggataagtacccacagtgggattgctggatcatatggtagttctatttttaatttttaatgagcttccatattgttttctataatgcctgtaataattcacattttcaccaacagtgcacaagggttcccttttctccaaagccccacaaacacttgttattttacattttttggataatagtcattctaacaggtgtgaggtggtatctcattgtggttttgatttgcatttccctgataattagtgctgttgagcattttttcatgtgcctgttggccatctgtgtgtcttcttttgaggaatgtctatttagatgttttgcccactttttaatgggattagtcattttatgctgttgagttgtttgagttccttgtatgttctggatattagtcccttgttgcatgaatatcttgcaaatattttatcccattctacaggttgtcttttcactctactgtttcctttgcagtgcagaaactttttagatcaatatgaccccatttgtctatttttgtttctgttgcctgtgcttttgaaatcttagccataaaaccttttcccaaaccaatgtcccaaagcatgccccctatgttttcttctagcaggtttatagtttgggtgttacatttatgtctttaatccattttgtgttgctttttgtataggttgagagatgggggtctagtttcattcttctgcatgtggatatacagttttcctagtaccatttattgaagagggtgtcctttccccaatatatgtccttggcacctttgttgaaaatcagttggctgtaaatatgtggatttatttccagattctctattctgttcctttggtttatgtgtctgtttctataccaatatcatgctgttttggctaccatggctttgtagtatattttgaagttgggtagtgtgatgctttcagctttgttctttttgctcaggattgctttggctattctggcttattttttgttgttgtttcatacaaattttagggttttttttttctatttatgtgaacaatgtcattggtatttcaatagggattgtattgactctgtagattgctttgcatagtatggccattttaacaatagtaattcttctcactaataattctttttttttttttttttttttgagatgaagtctcgctcttgtcccccaggctagagtgcaatgatgcgatctcagctcactgcaaccttcacctcctgggttcaagcgattctcctgcctcagcctcccaagtagctgggattataggtgcctgccaccacgcttggctaatttttgtgtttttagtagagacggggtttcaccatgttgggcaggctggtctcaaactcctgacctcaggtgatccgcccgccttggcctcccaaagtactgggattacaggcctgagccaccgtgcccggcttctcattaataattctaagcatgggatgtctttccatttgtttgtgtcctctttaatttatttcatcagtgtttcgtagttctcattgtagaggtttttcatgtccttggtcagcaagatttttaagttgtcataacatcattagatacagatttaaaaaaaaaaaaaaaaaaaacatggttaatacattccgcctagctatgaatagagggactaggtaacttcaaaccttcttactgccttaaggtaaatttcatccatggtcagatatagacaaaatactgcatttgccatcatttaatcgtctggggtttgcaaggaaagcctagatgctatggtaatgcctctgaagtactattcttgtaatttgaataaggtgccattaggtggtgcttttactctggccgcctggcctgattgaacaccctggcttcctgtaggggagagtaactgagttttagcttaccttttcattcattttatactttctctggccaaaacacatctcttcagaataacagttaaaacattagatagttctatattcctagaacattatcaattaattgtagtaggattaagagaaatacacatacggctgggcgaggtggctcatgccagtaatcccagcactttgggaggccgaggtgagcagatcacctcaagtcaggagttcgagactagcctggccaccatggtgaaacaccgtctctacaaaaatacaaaaaagtttagctgggtgtggaggcaggtgcctgtaatcccagctactcaggaggctgaggtgggagaatcacttgaacccaggaggcggaggttgcagtgagctgagatcaaacccctgcactccagcctgggtgacagagtgagactccatctcaaaaaaaattaaattaaaaagaaatacacatacttcagtataattcaattcagtatctctttttgctcttcaataattatcaagtataatttaatctaattcctaaattttttctttctgaattttaacaccttaatcaaagggtgggtgcgcttgacgtgaaaagtctttagaggtagtacctatttaagctttgatgcttcttttttttttttttttttttcaatcatggcttactgcagcctcaacctcctgggcctgagtagctgggaccacaggtgcatgccaccatgcctggttattttaaaaatattttgtagaggcagggttttgccattttgcccaggctggtcttgaactcttgggctcaagcaatcctcccatgggcctcccaaagtactgggattacaggtatcagccacctcacccggctttgatgcatttctaatacaataatgctttaacatttaccactgcttgggagaaaggtcctatttacattccttttgttttttgtttttagagacagggtctcactctgttgcccaggttggagtgcagtgatgtgatcatagctcactgcagccttaaactcctgggactcaagggatcctcccacctcagcctcccaagtagctaggaccacagcacatgccaccatgtctggcaaatttttaaattttttgtagagatggggtctcactatgtttcccaggctggtgatgaactccttgcctggcctcaagtgatcttcccgcctcagcctctgaaagcactgggattacaaatgtgagccaccgtgtccagcctgtttgtttttgatttgttgtgtgaatgtcttcttccccacacgaacagtcagaaagaaagaaaaaagggtagtgtggtaaaaaccactcacctgtgtaaaaattctagcatgttcttttcccagtttgcagatatccggtaaatcacatccatggtcactgtccctggttacaggctttaggagcttactgattaacttgaggcaatggtggctgagcaaccctcactaagccaaaaatagttgcgttcctgctctaccatgagtctccgtgttcatagaattcaacttaaaaccgaaagccatgactccttttgagtcactttcctttttaattttaggtagttattagtaaagaataacacaaagcaaaaacaaatttaaaaacttagagatacacaaagaattttgaggtagacattgattttacaaaaggattcaccatctttaagtattccatgtattcaatacattttaaaatgtgattgaaatcacaggaatcttttggtgaattcatccactgaataaaatgacatatagccataaatggtatccctaatgccaggtcagccaaaaaacccattctgtttttaaaatatttctaataatgtggtaattttttctttaaacataaaataagttagttcttgttgttgttgttgtttttctttgagacagagtctcgctctgttcccagctggagtacagtggcacgatcatggctcactggagccttaacctcccaggctcagatgatcctccctcctcagcctcctaaatagctaggaccacaagggcacaccaccatgcccagcttattttttgtatttttagtagagacggggtttcgccatgttcccaggctggtctcaaactcctggactcaagcgatccgcctgcctgggcctcccaaagtgctgggattactggtgtgagccactgtggctggtctagggtttttatcatagaagtactacatgcatgaagtgagaaggattcacacaatacagcatgacatgaaatgaaaagccttccttccctcttccttcacttctattccccagtggcagtcattgctaatggcttctggttttcatgtcttctaattgttctcactgtaactttaaataatattcttatacctcagtttcttaggttaccaatttgttatcattttacttcctgtttcccatatgaaaaataggacgttggcacacatacacttccttccatttctctcatttcatttccattttttaatagttgctttattatttttacattgtcaaggtttataccatttttttctggaactgtattttcatgtttattatagttggttataaaaatgtattttattttatttttttttgagaccaggtcttgctctgtcacccaggctggagtgcagtggcgtgagcatagttcattgtagcctcgaactcctgggctcaagcgatcctcccacctcagccttccaagtagctgggactacaggcatgtgccaccacacctggcctttttttttttttccttcttctagagaaggggtttgattatgttgcccaggctggtctcaaactcctggcttcaagtggccctcctgccttggcttcctaaagtgttggaattacaggcataagccactgccccaggcctaccatcttaactatttttatgtgtacagttcaatggtattaaatacattcataatgttttgcaacctatttatttatttgacaaaattttacacttacagaaaagttgtaataatacaataaaaaaccccacatactcttgactcagtcgattcagattgaccacttgttaacactttgcctttttgctttatcattagaccattttctctatatatatgtatatattttctctaaaccatataaaaacaatttgcagacatcatgtccttttatccataaatatttcagtgtctatttcctaagaacaagaatgtttttttacctaaccacagtatctttttcaggatcaggacatttaacatagaaaaatcctattgtcagccgggcatggtggctcacgcctataatcccagcactttgggaggccaaggagggtggatcacgaggtcaggagatcgagaccatcctggctaacacggtgaaaccccatctctactaaaaattcaaaaaaattagccgggcgtggtggcgggtgcctgtagtctcagctactggggaggctgaggcaggggaatggcatgaactcgagaggtggagcttgcagtgagccgagatcacgccactgcactccagcctgggtgatagagcgagactccatctcaaaaaaaaaaaaaaatcctattgtctaatctgtagctctacattaaaattttaccagttatcccactaacatcccccagcttctccccaagacctccttccaggatccaatccaggatcatacatgacccttagttgtgatttctctcgttttattttatttgagacagagtttcactattctcccccaggctggagttcagtggtgagatctcggctcactgcaccctctgcctcccaggttcaagcgatgcttctgcctcagcctcccgagtagctgggattacaggcatccgccaccacacccagctaatttttgtatttttagtagaggtggggtttcaccatattggccaggctggtttcgaactcctgacctcaggtgatcacccacctcagcctcccaaagtgctgggattataggcctgagccactgcacctggccagttgtgacaatctctttagtctcttttaatctggaatagtcccttggcctttctttgtcttttatgaccttgactgttttgtttttttttttttaaagaacacatgttggttattttgtagaatgtcctcaggttttcttatttttgtttttttgtattttataggcagaattggggatgatgtccctcagtttggggcatgacctgtcacaggtagatttaggttttctatttttggcaggaacaccatagcagtgatgcagtacttttcccaggacatcatagtaggagctacataatttccatttgtcccattattggtgatgttaactttggctatttatttaaggtggtgtccactaggttaatcccctctaaagttactaatttctcttttttgttaataagtaatttgtagatgctttgagactatagaaataccctcttcctcattaatccctcactcactagcattagcatccattgatgattcttggcagagctggctattgctgtgatggctgcaaaatggtgattttctaaccccataattccttccacatggatcatttggttttccactgtaaggaagggctttctcttcttgctcccacacaggagtgatacccttgacagagccacatcagtataaaaggggatatatttggcactacagcaattccagttgctcttccagccctcagcctccaggtccactcagtgacaatgagcagaaatagatatattatgattagtcatggccaggtggggtggctcacacctgtaatcccagcactctgcagggctgagacaggaggatcacttgagcccaggagtttgagaccagcctgggcaacagcgcaaaactctgtctctacaaaacatacaaaaattagctgggcatggtgatgcatacctgtaatcccagatactcaggaagcttaggcaggaggattgcttcagcctggaaagttgaggctgcagtgagccgtgatcatgccactgtactccagcctgggtgacagagcaagaccctgtctcaaagaaaaaaatcggttaattaatttatttatgtctgtatggactcagattcttattctattccttgaatattctattgctattatttactttcagggccaaattgtgccagatttggctagtgggagccccttcaagtggctcttgtgtccttttgacacatccttgtcatttttttctttttagcacttccctactttctggtacaagatattccagactcattttgtacgttctctgccctagccttgaattagcaacttctgcaaggagccctggttccttaaagtgaagaatgatatttagaaatcaagatctgggtgctaggtatgttcattgccactgggatgtcttggcttatagtcactttttttgtttgtttgagacaaggtctcctttgtagcccaggctggaatgcagcagcatgatcgtagctcactgtgaccttgaattcctaggctcaagcaatcctcttgcctcagcctcctatgtagctaggactacaggcatgcaccaccacacctggctactttttctattttttgtagaggtgtggtctcattatgttgctcaggctggtcttaaacacctggcctcaagcaattatccagcttctgtctcccaaagtgctgggattacaggtgtgagccactgtgcctggccttatagacactttaagtgggcagagggaaagaatgtaaatataaatatgtacagtgatctatctaggtctctatatattaaaaaccataaattcatactaatacgtctaactccaattcctcagtatgggggttattcttctcttatttccttagttggaattccttctccaactgtgagaaacttgactcttattcaatatattttgttatttgcttataattcacagaaagcagatttagaattggtaattcatactcctacaaatacccaaattttctatctggcatttaatattaattgcagttatttttgttttcgaatgtgatacatagtcaaagtactgtgttcataagttactctggttagttctttttccgctttaagtatggttacgtcattcatttgaaatacagctaggataatttgtttctctttgcattctatttagatttttaactttcatctttgttgatttaattgtatttgattttgagtatatgtaaaatattaacatgattccaaaaattttaactatatgaatgggtctactcactacataagaattcttaaatggatagaatagtggctgatccactgaagcacctggaatgataacctttttgcagctgatgtttcactggttcgcctgttattagggggagggcattagggtctattttgctcctccttgtgttaaatccaggtagacttcctagcggcagcctgtgtccagcaggaaaagctctgcccttttgctaaggaggttgggaagggcagaggaagcccttgtttaggtggccttgacatggctgctgtggggttttgtcatttgccagacgacatcagatttccagagctcatctctgggctctgagttttgaggctgctgtgtggtcctgggaggcagaacttcggcatcaaagttttcacagcctctgatggtcttgccactctgcgggctgagccatgtgtgaccaggtcatgcccttgtgagaatcccagccttgaacaagtgtgaagatgcacagatatggagaaaaaaaaaaaacaacagattgagtctgtgggaatgactagatttcaaccccagctttcataccagctctgtggtagaagagactgacacagccacgaagacctcacatttctaggaatgactaaatctatacagaccaagggtgctgcccagatcctaacccagggaaatcagactttgacggctccaattggatccttgcttccttggctacagagccatttccatttccagcatcagtcacatggggcagcactcaatggaggtccattctggaactcccactacaaaacagaagggatgggctctctcttactcagaatgcctgggctgggcaggggttagagatgcagctttcagggctgagctgtagagcaaggattccactttaaacatgaagacaagttagctggggaaagcagcaaatgcagtcaaaagacttctttgtcttccttccaacttccctgaagaaatcctcatgtatatttaaaatcctctgttgtgttttgtgtttacacaaactttcacaactatcatctcatctaaactttacaaaacccccctgaggcaggcatgtagctgcacatgtggactgtggcccatggaacccacagccatgctggcgcccggcccagctctcaacccctgtggtccagcacatggggccggttcagaggcaggggaaaggaatgaggctcctcagtctgcccattggactgcagttcagcagcagcttgggtatattctctgatgtttaattaataatccaatattaactttcagaaagccatctgctggttcgcatgtgtatgtaatccaggtggaaccagtctctgcaggtgcactttgggagaaaggggcaggctgggtcttgcttccacctacacccctgacctgaatggacagaagcagaatttctcacctgattgcttttcctccagctcccagaaaggagaaaaggtgtcatctgacattgcagatgcattcatgaagacttagctggtgactgtttgaggcaaaaggcttctggggctgagctcatgtcattgcctctggcagaactttccagcctcttactcagctctgcttgctggatgcaggattgagagtatttcctactcaggtgcaacttccccacctttctagacaaccccctacccccaccaatctgccccccacctcgctcaagtatggagattattcacaggagaacgacttccccttctgaactaaaaacacccaccaggcagtcatggtttttccagcatggggcgcaggcccctgggctcagagggacaggagtctggcttcttgtcctgggggcttgggaaggaagaccctagcaatgaggagcatggcagagggatcatcctgggccaggcgccaagtcgccgcacccctggaacctgtcaagctggcccctgccaggctgagggtcttcagggaggagaggactcttgccctcaggcatgttttatgctgccctttctgagggattgatttgccccttgcttttcttatccccctcatcctctatctctactttgctgtagactcaatcctgggtgtagggtacattccttttccccagcccattatgtctatgtaataggatgttgaatgggattcatgttatgctggaattgaggactggggcccaaatctgggacactaggtcctaaagagagctacccatggttgggaccagacctctctcctggtgtttaacaagagagcctggaactggcctaagcttcagcaaccatcaccccagcgcttccaccccctcctcccctgggcaacagaaatgactgggtggtggcactcagagaatcttagcgtggactttgtgggagggcctatttgggttgaggggttccttccttctgcctcaggggaaggaattggggatgcagactcaggagaatccagtactttgtgtgtatgtggacgggagctgacattctgtcctcatgttacatgtctgcccgtactgcagaccgtggtcctgcccctcagcctgtcagagcaggagctgaagagaacgggagagcacgcaggacagagcaagagctctcacgacgcaagggagctgctttgagttctccagccagtcctctcccaagaggcgagctctgggcactagctaaagtctgaatggcatcacaaatgtggcgagcctggacaagggatctgtgagaagagcggggacacacaagctgctacttctttttttttgagacagggtctcactctatcacccagcctggagtgcagtggtgcaatctcggctcactgcaacctcagcctcccaggttcaagtgattctcatgcctcagcctcccgagtagctgggactacaggcacacacaaccacacccggctaatttttgtattttttagcagagacagggtttcgccatgttaacgaggctggtctcaaacccctgacctcaagtgatccacccacctcagcctccaaaagtgctgggattacaggcatgagccactgcgcccagccccaagctgctatttctacatggatgcctgggaggcagcgtggcatctgggaaatatccctcgggggctttatttggcattttattctggggctttccatctcatcctcttcccctttctctctgttttggtttcgtccttttccttctttctctgtctcttgctgggcttatgtagtgtctctctctttctccaagaacatcagggttactcccttggagtcaaacctacgctcttcccacccagtctccgatgagcagactgtgggaagactgagttatagttttttgtcatgtggtgagaaaaggtaggtacacacccctcaatatcctgaaacaagctgccagggctcagtcaccaaacccattttaaaccagttatattttcattctcagggtaaagggtttcctgaagtttctacctgctctaagtttctacccttgaggctgattgactagtccagtgagatcaaggaaatgaaaggcatttcacacaccagcaggtaaacaaacgcatatgcaaaccagccttcagaatgggaaaatgaaggcacgcgtgaaagaggaataaggtttctgtcatcacaaaggcattcatgggtaaggcagatgtattcgcagttatgcaaagtccagagtgttagaatttgaaacctgaaagacttaaatttaggggcaaaaagggcaagtaatgtttaggtgagtgtggggcagggaaaagcacagatcttacaagtgctgggggaagccctggctgtgagactgggccgtcaggtttcttctctcagcctccatctcctcagccctcagtggggccccctcccggcctgcctcacggggctgccgtgaggagcagagcagagagctcctgtggaagctgatggcactctctacagtattagtctttttgttgctgagagtcactgttattactgaggaacagtcggcctgtagcaagccacgataggaagtggaacacaagcagagacaggaagttgggacccatcctgaatttcgagatgaggatcctgggaaacactcctgcattccccagacaggtcctttggtaccatttgctcaaggacaagcctagattggcagagtctttgttccgaaccacgaggactgttctgacaattattgactttcaggagattgctcatttgtggtttgtgaaggacaggcaagcagtcatgtacatgcataaatgaagcttacggagttggagactgacggagacacaaggggtcccctggcccatcagtcccatgtggctgaattgagatccctgagtatttctcgaggccccttcttgatctgtggatgtctgatacaggaggtggaagaggagctgggatcctcccttttggttttgagcacatgccgttggccttagcctttggttctagatcctgggcgcacccattgttctcagccattcaggagccatgccccgtggactctggatcttggatttttccctaaactcttgatttttctgcctttttattgtgtttatggataacatttgctcaccaggtccagattcattgcacacagtgactcctagctttggatgcctctctctccccacccaccccacccagctgagaaccgtaatcactgctgtagtcgtttgtggtcactggaagactctgttcatgcctgagtttagattaattgccaaacctacataagagcattcacagtgtgagttactactggttttgtttaagatcattttagtatatccacgaagttatggtttttttagtaaagggtttccatttgagtgtttataagtgcctttgttatttgtgaattggaaaaatgagcaaggaatctgttttttcattattcgcctctgattccaaacaattgtccagtaatgctgaagaatcctggggtatcagcagagatcactgtattagtgctcagtaaggaaaacagaaataacttcagtcattttaaacagggaatctcatccacagggctgattgcagaggtgttagaagggctgaaggagcaaagagcgcttcagtaaggttggccaaatgtcaactgccggaagctgctgtccctgctaggactggaggatgaagagggctcatgaccatgagccccaggaggtgaaacccagaatctcacactcacttagaagtgtcatctattgcttctgcctgcattccatgggctagaactcagtcacacagccacttctagctgcaaagaggctgggagtctacctgactccctgactacttgagtgatgaccagaggaaaaggactacgtttgtgaataatgagtctctgctacatatggatacggaatcactgttgttacaagagaacagtgatccttttgtagaggtatgcttcaagatgtgtgtgtgcgcatgtgtgtgtatgtgcatgcatgtgtgtatacacacacacttgccctggcacaataagacaggactgtttttaagctgagttctcctacctccctcctcctgttccactctcatgccatccctggccctcccaatggcccctcagctgatttctgtgtgttctgtttgcaggatgccctggcccagccccagccctggtggaagacccagctgttcatgtgggagcctgtgctgtttgggacctgggatggtgtgttcacatcctgcatgatcaacatctttggggttgtgctcttcctgaggactggctggctggtggtgagtgctgagttggtggcctggagcctctcacgggcccaagacaggaaagctctgccactcttgcattctacagtgcaggccacagattcctgaagcacagatgctcctgaaacacgaaacagaagcaagcacgatgaatagctagcattgcttgttaaatgagcatcctgtgaagataggcttccgaatttctaatggaaacctcacaccatagatttaactgcagaataggagcacagaagtcagggctcatcatgagccggacttgagatgggtcagagagatcagattgatggcaattttgcctccagcttgtggccctctgtagttttcccggtattcttcacttcatcttgggcccgcccacatggttgccttcccccaccacactgcaaccctgtaggtaagactgtgcatggggatgcttggtcagaggtgtgggccgcctacctctagggatggattgcctaggatggactctgctgtgtgagatcctgggggtcagttcatctccccctgtagaaggaacaaaaggcctcttctttaattcttatgcaaagcatcctaggaccttccaagcagatgtgtgcctggggcaggggttctcagtcccacacacagtgccatctcatgcagtgggacttcagtagaccacacaggtgcgcagaacaaaaggcaagccagtcaccatctaaacatggatgagcacctgctgtgggccaagcactacttagtgccagtgggatcacaaaagacaagacatggcctgggccctcatcccctcctctcttccccgccccgccctatgagctaacagctgtggtgggtagatattgcattaggagagttctgaaaacagcattaagtcccttggggtggaacaggctatgagtgctgcagtcactgaggtgtcaggaagccttcctggaggagatgcagttgagccaggctttgaagggtgagctggactagatgggtgaaagagaggaggccattcaaggtgtagaatctactagtcaggattctccagagaaacaggccaatgccaacaggagatgtaagtatgtcatgtatatattagcaggtaaggattgatgctgcagtcttgagtctgaaggctggaaatgcaggaagaatttctgtattgcagcctggaggcagaattccttcctctttgggaaaccagcctttgcttgtaaggccttcaactgattagacgaggcccacccatactatggagggtaatctcctttacttaaggtcaactgatagtaaatattaatcacatctgaaaatcacctttacagcaacatttagactagtgtttgactaaacaattagttgccgtagtctagccaagttgacatataaaattaaccattacataggcaaatttggggagatttaagctcctttatagtgggatgtacaggattcttagcccccataagaagtctgggcaagaccagaccttcctaagctctcattctacaccacactcagatcctcagctcaggtttcggccttagccacagccagggtgggtctcagaccagcagtggagcccttgagcattatattataaacactggaacagagtacaactgacttccaggacaattttccagctcatgttaggccactcagctcttgaactggctctgcccactcctaggaccctctccagcactcacaacacatgaagtcttgactatcaggagtcttccttgctttctattgcaaaacatgtgacattacatctccttcttagaagtgctgtgtccactgcctctctgcgactcttgcttttcacactgaaatgtgtctgtctacatgtgttcatctccagccatgcatggtttgtttattcgctcaacaagcatttaatgaacacctattttgtggaggttatgctaagcactgagaatatgaaggggaagaaaacatgatcctgctccgtattagtccatgttacattgctataaaggaatacctgaggctaatttatgaagaaaagaggtttatttagctcacagttctgcaggctgtacaagaagcatggcaccagcatctgcacttggtgaggcctcagcaagctttcactcatgggggaaggtgaagagggagcagcgtgccacgtagccggagagaaggcaagagagatgccaggctcttttaaacaaccagctctcctgtgaacgaacagagtgagaactcacccattactgtgggaggacaccaagccattcacgaggggtccacccccatgacccaaacacctcccaccaggccccacctccaacattggggatcacatttcgacatgagatttggaagggatccaaatccaaacatctaaaccatatcatcctcccctggagctcacagcctagaggtcaaaactggcttggaaacagactcaatatgacaagtcctgtgaaaagtactaagccctggcactggaggagcccagagaaagggttacagggccagcttcctggtgagaaatcctaaacgttgaggcctaaaggatatgctggagttaacctgacaaaggtacagaatgagcaggagaggccttccaggcaggggaatcagcatgaggaggggtgggggtggggagagaacttgtcgctgcacgtcaggcacaaagtgagattaggaggcacctcgtgagggcatcagcagctctgactgtaccctataggtgggagagtcattgaagaatttgcagccaggacgcttcctttcacttagaacttcttcctggccttggctgttgtggtgcttgctttgtcctttttagttgtcctgactctgtgcccccacccctggcccctattccagtgctgtgggaggaggggaggtggtcaatgcccccagcagggagctggcggggcctcctcacctaatccaaccttgctccttgctattctgctgcagggaaacacaggagtgctcctgggcatgttcctggtgtccttcgtcatcctggtggccctcgtcacggtgctgtctggcattggcgtcggggagcgcagcagcatcggcagcggtggcgtctactccatgatctcctcggtcctgggtgggcagacgggaggcaccatcgggctgctctatgtgtttggacaggtgaggcctgcgcccgggatgcttcccctgcctggccctctgccactttcttcttgtccatttcctcacttgacctggggagaagcgagggtggggacaattgccgcatgtgacagacgagcaggttggggctctgaagggaattcagcagagagtcaagtcactatccagggcctgacctcttagtccagcactcctttccctctgccactcccgcctcctggatgcctgatgtgaccagcagggcagggcctggccagcacattcttgctgttcaatctggggaccagattgcatgacagtggctgaagcccaggtggcagccaggtggcagccaggtggcctgggccctgggacgcttttttactgaagatgggtattttgcctgtgccaaagggctttcctagaagcaggcacttctcaaatgagcaggagctcccgggagcatttgatagctcgggtggccttcacagggaggctgacagcctcttgtgtggacgccctgtctgagagggagaatgttaatgaggagtgtgcttcatcagaatggacggaggcactccgaaaacgagcgagtagggggaaatcctaaggcttttttagctaaaacacaggcatggtgacttaatgctgagggaacaaagtacagacattaagaagcagttctttgtcagcatttcttggattgaaaaaggcttttatgagagtgcaaatggtggtgggtggttgaaaaaacagtttaaagagaagaatttgtctaagttagagtgtgcaagaatctccccagagaaagcatcggttttgtttcttttatttttaggcagcaggagcagggtgtttcagcataaatatatctgattctcgaacagcacagagctgcgtgtgtgcatgtgtgggcggtgggggtgcctgtgtgtgtctaagacagtgcaggaaaggcaaacagatggcctctgcactcttaaaaagcacttgccttgactgcagaaagttatttaagtatagtagttggagaggggagtaataaatggtcagtttactttattaccctggggacttggtatataaattttttttttttttttacttctctgctattttatagccaaccaggctgcaaggtaggcaaaatcctgctttccccctctcggtacagacaccaagtgagcctctagaggcagatgccatggatgggcactggtgtgaacacccctggacaaagacaggcatctgtgctgctgagagtcccacttacatgggctgatttggaaaaaagatgttcacagataagatgttttctaagtgctggcagccacggcctgagacgccactgcaccagcatcccagctattttcctgcctttccacttgggccctggtcccaaacattagagtccccctggtcactgtctctggagtgcctgtgctttgtttgtcgctggcgcgggccaggagtccctgatcagggtgtggttagtgtgtaatcctttttataaattgctgaatttggtttgttaacattttgtggaggatttttgtgtatatattcatgagggatattggtctgtagtttccttgtgattctttgtctggttttggtgtcaggctaattctggcctcgtagactgagttggaaggtgttccctccttctctattttttggaggagtttgtgaagggttggtgttaattctttaaacatatggtagaattttgccatgaagccatctggtcctgggttttttttgatagaaagttttttggttactaatggaatctctttacttatataggcatattctgattttctacttcttcttgatttagttttgatagtttatatcttcctaggaatttgtccatttctttttttttttttaatctgggaattttgttttgttttttgttttttgtttttgagacgccgttttgctcttgtttcccaggctggtgtgcaatggcgtgatctcggctcaccacaatctccacctcctgggttcaagcaattctcctgcctcagcctcccgagtagctggggttacaggcatgcgccaccacacccggctaactttgtatttttagtagagatggggtttctccatgttggtcaggctagttttgaactcccgacctgaggtgatccgcccgcctcggcctcccaaagtgctgggattacaggcgtaagccactgtgctcggccatgaatttgtccacttcacgtaggttatctaatgcatcggcatattaattgtctatagattttcttatagtcctttttatttgtgtaagtttggtggtaatgtctcccctttcattcctaatttaaataatgtcttctctttcttttttcttgatcagcttagataaaggtgtgtttacaaagaactaattattggttttggtgattttctctattgtttttctgatccctaattcatttctgctctgacctttattgattccttcttctgcttgcttgggttcactttgctcatctttccctagtttcttaaggtgacaggttgggttattgatttgagctcctccttcctctagggtgcggttggggttttgaggctccctattccttgttcttattaactccctcagccctcattccagggcatgtgtgcattcatttatttctaatgattgtcaaaacagattccctgattttacccccaagcaggggtcagcaaacttctataaagggccagatcataaatattttgggttttgagggtcatatggctctgtcacaactactcaaccctgccactgtagtgtgaatgcagccacagataaatggcttacaaaaaacgggtatagttgtgtcccaataaaactttatttaccaaaataatcagcaaaaaggatttggccagtgagccagtttgtcaatcccttccctagagcatcaaaactgaggagatattaacacttaaagtaatgattttaaaagcttgcaggtcgggcgtggttgctcacgcctgtaatcccagcactttgggaggtcaaggcaggtggatcacctgaggtcaggagttcgagaccagcttgaccaacatagtgaaaccctgtctctactaaatacaaaaattagccaggcgtggtggcgcacgtctgtaatcccagctgcttgggaggctgaggcaggagaattgcttgaacctgggaggcagaggttgcagttagctgagaatgcgccactgcactccagcctgggtgacagagcgatactccatttcaaaataataataataataataataaaaagtaaaacaaaagcttgcaaaggctcgtcattgccctgcatcctacaaaacccttcccccttcatccctctcaggccttggtggcagggcctgctctgtgggaccaaactctttgtcaggggaggagacgatggactacagactcccctcactccctgctccacttacctgtgtgggcctgagggttcttggtgactgtttaccctgaacaccaaaatgtctagcttcagcctgtgctgacacgtggaagaacgttcattagtggctcacatgctttgtgctggactctgtataaaaacaatgaatgactggaaagtttttatggacctgatataggcctggagtttttgttatgggtgttaacgcatattcaggacatatgtgttaatccaccaactctttaaccttaaacctggaagtttgtgtcagaaggggaggggtgttgaggggcagcgctggtcctccaggtaaggtggaaggaaaatgcctgtgattgtcaaggtgcaattttgctaaaagaattaccttggaatggaagcattacaccctgaaaataggccaccttctctctttaaaatggtgagcaacacccactgtgtcttgtgagaaggaattaggcttttctctgtggagaatgaaaaagaaaaggaatgcctggtctaagatttaggaggaaatagaatacgtttaacgtataacaaacccttaagacatttacacattaaacaaaccaccaggaatgttttccaaggaaaagcagcattcaggttggaaggggtaccgcctctggggtggctggattgctctagggaaggctgggcagttgctgagtgtgtggacgaaggccttgagtcctgggctgcttccctaaacctgggcagacagggtgatgatataccctgatttagtttttgcgtaaacataagggtacttttaatatgtttgcttgtattttttaataaaattctttgacagttacataatgatattcattgtagtcagttaacacattggagacaatgaaaataaagagctttcccccacacccttgaggtgatcccagtgttctcttttggaacatttccctcggcttatacacatgtatttatggatttttgaagtgcttgcttgtttttacaaaaatggggacaaggccaaggccaggcgcggtggctcacgcctgtaatcccagaactttgggaggccaaggcgggtggatcatgaggtcaggagttcgagaccagcctgaccgatatggtgaaaccctgtccctactaaaaatacaaaaaattaaccaggcgtggtgatgcacacctgtagtcccggctactcgggagtctgaggcaggagaatcacttgaacccaggaggcagaggttgcagtgaactgagatcacgccgctgcactatagcctaggcgacagagcaagactctgtctcaaaaaaaaaaaaaaaatggggacaaatttcatacattattccatggcttgtagttctcactttaagtaatagatatatctcttggtcaatgttttaaaccaatgctttttaaatggttacttaatatcgtatagtataaatataccataatttatggctcatttctattctccattcattctttttttaattttttttgagacagggtctcagtctgttgcctagggtggagtgcagtgacgccatcacagctcactgcagcctggcactcctgggctccagtgatcctcccacctcagcctcccaagtaggtgagactacaggcgtgcaccactatgctcagctaatttttaaattatttttgtagagacaaagttttgacatgttacccaggctggtcttgaacttctgggcttaagcaatcctcccactttggtgtcccaaagtgctgggattataggcgtaaaccactgcacccggcacccagccttgtatttttttgtagagacaaggttttgccatgttgcccaggctggtcttgaactcctggactcaagtgatcctctcaccttggtctcccaaagtgcagagattacaggcatgagccactgggcctggccctctattcattctttactctcctctgtatatgtagtttttttcctaatagtctatatttttgcattttctcttttctttgtaatcaggctaccagaggcttatctatttaatttttttttaaaagatcagcttttgtttcttgtatttttcttttgttattttttcttctatttcattaatttcatatttctttatataaaatacttctctctattatctttttatttatgttgatatttttgtgactgaagttaattcttcgttcctttatttttcttttttttttttttttttttgagacggagtctcgctctgtcgcccaggccggactgcggactgcagtggcgcaatctcggctcactgcaagctccgcttcccgggttcacgccattctcctgcctcagcctcccgagtagctgggactacaggcgcccgccaccgcgcccggctaattttttgtatttttagtagagacggggtttcaccttgttagccaggatggtctcgatctcctgacctcatgatccacccgcctcggcctcccaaagtgctgggattacaggcgtgagccaccgcgcctggcctatttttctttttaactaataaaatcatttaagactatacatttttctcttctgaacccaagtttagttatgcctcttgagtttttgaataaaacattctcgttttcattactttgtaaaaaatataaaattttatttttcatttcttttgactttggcaacatgtgtcagttatttttctattgcattttggttgatttggaagttctactatgcttttagttcttctagtagtgacagtctaccctcagaagtcataattaaacttatccttttctatcataattttctacacttctcaaccaagacacattatttactagctcctctaccaacaaaatattaaacttctatgatacatttactttcctactctccataaacacccccacttctacccccagactcattgtgagaagacggtttaattttggactgttaattgctttccttaaagtaagtctctttggtttcaagcatccttatttacaacttatattgcaaatttccagtgatggtaccatcatctatttagcatcaacaaagtatcttatgatattcatagctagctactgtttcctcttcttcagcagcgaataataacaaagtcataataatgacggtagctattattattattattattttctgcccaggctggagtgcggtggcgtgatctcagctcactgcaacctctgtctcccgggttcaagggattttcctgcctcagcctctcaagcagctgggactacaggtgcacaccaccgtgcctggcttatttttatttttagtagagatggagtttcaccatgttgcccaggctagtctcagacttctggccttaagtgatctgctctccttggcctcccaaagtgctgggattacaggtggtagctattgtttctacaactctatgagccagatattgttctaggtctttacataaatcatctcatttagttctcacagtaaccttttgaaggttactatcattatctgtatttcacggaggggttaaaacactttcccaagtcagccaggatttggccttagatattttggcttcgcaattcatgctcctaaccaccatgcccttacaagcctcctgaggagcttcccccaccccctaccctgccccatcccctgttgctggcatctttgggctaaaaagcaattttagatacaaaccagaaggatgagatccactggagttactgggaacaaaaggcagcatttacagcttggctcacattgcgtgagcaaattgttctactgctaggaaaaaaaaaacagtttggaagctttggatgcagatggtcccatggcatcatcctctgcatgtcagagacatcaggtacctgggaaagtggtgcccatataaatggtatccattgctacatttttgtcatttattttatttacttttattttgctcagataattttgaccatgaagagtcctgttgacctggccaaatactgatgaaataacgtcactatcacacatcacactcttggtgtttagtaaagaggaagtttgagttctgagatgaatgcaggaaaacattagtctctctgtctttctctttctctctctctctctctctctctctctcagaaatgattgtatttccctcacatttcttgggctttccacctcatcctaatatggacagaaatgtttaccactatgggatgctggaataactgttaagctaagtgtaaatttgggggatgctgacaaacatgatatgtgcctagttgcaaagtgagctgatctcattgaagaatggggccttgttcacaagctcctttcaaatccagaagttgtattacccttttgcctttacacaaaatggctggaactcatggagcctgcttcccagagcaccttttatatgatcagcatatcacaaagtatttattgaatgcttgcaacatacttagcaaatgcaagtatttgaagaggtacaatcagcataaacaattttttaagatatttgcattcttggtggtggggtggggagacaaacttacgttcatgacatgataatagaatatggaaccagataattaattgtatggccttagcagttagcttactatttattcagaaaaagaggttgaggagaggcctcatggaaaaggagggacttgaacgaatgaggccctaatagaatttgttcccagagaatggcaagggcagggctacagtgattagagtgaccagctggccctgggggcagtgaaggacaaacctgaggagagaagaaggctgaggctgaggaattaggaaaagtgagactgatgttattttcaacaatttaatttgaaatgatctttcaaatatttcccaaaagataaaatcatgattctcaggcaaatataagaaaaacatgtgccaaggatttcatttcatttttttaaaaaaagattatataacaaatactcataggaagcctaacctggagcagggattttatttaatttatgaattaatggaggagccagtaagatgttaaagagcatctgcaaaggatgctgggtggacagaggtcagattagtaaattcataactaggcagttgaataaataaatgttaggataagattgctgggttagatagaaaatcagttaatgtcttacaggacaacaaatcctaatcttttgggttatatgttccactggacagaagttatttgcatctgtactggaaaaaaatccataaggtaacatgtaactttattaaatctggggcatataatgcatttaatcaacagcaaatagtgagtaaaatgaagtacattcacctagatagtccttgggtagcctttgccacatatgacgttgaaaaagacgtgccactcacttttttttttgctaagttttagataattttaaaaataatactgacctatagagaaatgaagaaaaatctggtttactgcagtgtccttttaaggctctgtagatgggaccccctgtgtgttcttgttctatatttagttcttgaataactcggactgagaaatccggaggcctctttagcccagtgtcccatcttcttcctcccatagtcttttcatctttgttatcactgacagccagctctcagcttgggttcctccttcattctttagttgagatgtagacaagtagaaatggggcctgaggcaggttcacgggtgggaagggctggtttaaccctgcactggtcccaggcactgtgccttggtgccagtgagtgtgtccgatgggggtgcagggttctcagcgctgggcggttctgcccatgggcccatggctttctgtcctgctgactcttctacctggaatcgcatgtcagtgtgttgcaggtgccatgtatatcaccggctttgctgaatccatctcggatttgctgggcctcgggaatatctgggctgtgcgaggaatttcagttgcggtgcttctggccttgctgggcattaacctcgcaggtgtcaaatggataatccgcctccagctgctgttgctgttcctgctggccgtgtccacactggactttgtggtgggttctttcacccacctggacccaggtaagcctttcagagtccagtatgtggccttatggatcttcactgctttagagatgtttgtaggtgtgagtttgcccaccccatctccccctaacccccataggctttacctacaattggtgtgagctgttcctggatcaggtgagcaggtgtgtcttggagcagcttcatgaggctagaagctcctcttcacacagacatcgcctagcacattttctatgtgtccttttattttctttttttaatgtatatttatttatttattattattatactttaagttttaggataacatgtgcacaacatgcaggtttgttacatatgtgtacatgtgccatgttggtgtgctgctcccattaactcgtcatttacattaggtatatctcctaatgcaatcctcccccctccccccaccccacaacagtccctggtgtgtgatgttccccttcctgtgtccatttgttctcattgttcaattcccacctatgagtgagaacatgcggtgtttggttttttgtccttgcgatagtttgctgagaatgatggtttccagcttcatccatgtccctacaaaggacatgaactcatccttttttatggctgcatagtatttcatggtgtatatgtgccacattttcttaatccagtctatcattgttggacatttgggttggttccaagtctttgctattgtgaacagtgccgcaataaacatacgtgtgcatgtgtctttatagcagcatgatttataatcctttgggtatatacccagtaatgggatggctgggtcaaatggtatttctagttctagatccgtgaggaatcgccacaccgacttccacaatggttgaactagtttacagtcccaccaacagtgtaaaagtgttcctatttctgcacatcctctctagcacctgttgtttcctgactttttaatgattgccattctaactggtgtgagatggtatctcattgtggttttgatttgcatttctctgatggccagtgatgatgagcattttttcatgtgtcttttggctgcataaatgtcttcttttgagaagtgtctgttcatatcctttgccccctttttgatagggttgtttgtttttttcttgtacatttgtttgagttcattgtagattctggatattagccctttgtcagatgagtaggttgcaaaaattttctcccattgtgtaggttgcctgttcactctgatggtggtttcttttgctgtgcagaagcctttagtttaattgtatcccatttgtcaattttggcttttgttgccattgcttttggtgttttagacatgaagtccttgcccatgcctatgtgtccttttattttcttgctattaaaaaaaccaggccaggcacagtggctcatgcctgtattcccagccctttgggaggccgagacaggtggatcacctgaagtcaggagtttgagaccagcctgaccaacatggtgaaaccctgtctctactaaatacaaaaaaaattatttagcgagatctgtttgatgctaaagctgttgcctgaggtgagaagtggggcctgtttttgcacgatgatatgctgtctttttgtgacagcaactctgcttttccccttggaggccagcccggatgtgcacctacacagtcctgccttttagaaaaatgttggttgtgggaaggtcagcattcggttggcatccactgatctggccttactacttctgagcatgttaaaatcttctgttggaaaactgtcactcccctgaactccctgagtatcccctaccctctggcatcctagtccctctccaggaaccttcagatgccccaacgatccggcacctaaagggttaaccccagggcccactctaatgctcagggccaatgtgatgtccatactgatcacctggagcccaggctttgcagcttgctaaatatttgacgcatctccaggaaggaaacagtgatttttttttttttttcctggccatgtaccaccctgcagagatggcccgcatatggagggagacttgctggcctttggctcatcaaactgtcagtgaaggaaagacagagtccactcaggtccctgattccttgtacttccccctccagtgacacggttgctggaagagctcaattagtgaaattgcaaggccgtgctactggcttctttgaaacctcacactagcctgatgtattttccttcttcttgattagaagttcttggctgctcttctaagttactccaaatatttttccttccttctggtcaatacattagtagagtgtagtgtgagatgaaatttattttcaatcattcccatagcaactggctcctcaagaatctgtttttggtatcactgatgtttcatatgggatattttctttgtggttaaaaatccaaactgaaaccaaactataaaccttcaaaatgaatttaacagagtgatttcaactcttaaaaaatgaggacatatacatagacatttgaaaaaaagactggaaggaactatgcataatagcaactatctttctgttgagattatatgtggctaaattatcttatttctacttttccttcaaatgaccagtgttacttttttaaaaaaaattaattcacttttagagcagttttaggtttatggaaaattaagcagatagtacaaaagttcccacataccccttttctctctcccccaccacagtttcccctattattaatatcctgtgttaatgtggtacatttactggaagtgatgaaccaatattgatatgttattgctaatagtttagggttcactcagtattatacattctatggattttgacaatgtacaatgttacgtatgcagcattacagcatcatacagatgagtttcactgccctaaaaattccctgtgctttgccttttaatgctccccaactcctggcaaccactgatctttttactgtttccatagttttgccttttccagaatgctgtatagttggaaccatacagtatgtagcattttcagcttggcttctttcactagtaatatgcacttaagattcctccatgtctttttctggcttgataactcatttctttttatcactgaataaaaagaaactggatgtagcactgtttgtccattcacctactgaaggacatcttggttgcctccagtttttggcaattattaataaaactgatataaacatccatgttcaggtttttgtgaggatacatttttcattcatttggataaatacctagatgcatcattgttggagcatgtggtaagactatgtttgtaagaaactgccaaactgtcttctaaagtggctgtaccattttgcattcccaccaacaatgaatgagagttcctgttgctccacatcctcatcagcatttggtattgtcagtttttttgtttttgttttttagtaattctagtagatgcatagtaatatctcatcattgttttaatttgcgattctctaatgacgtatgatattgaacgtgtttttgtatgcttatttgccatctgtatatcacctttggtgaagtgtttgtcaagatcttttgcccttttaaaaaacttgtgtttttttgtttgtttgtttgttttcctatcattgagttgttttgttctgttttgagacagggtcttgttctgtcacccaggctggagtgcagtggcacgatcttggctcactgcaacctctgcctcccgggtttaagcaattcttatgcctcagcctcccaagttgctgggattacaggcatgcaccaccacgcccgactaattttttgtatttttatcagagatggggtttcaccatgttggccaggctgttcttgaactcctggcctcaagagatccacccgcctcagcctcccaaagtgctgggattataggcgtgagccactgcgcccggccactgttgagttttaagagtgctttgtatattttggattcaaaccctttatcagatgtgtgttttgcaaattttttctccccagtctgtggttggttctttcattcttttaacagtgtcttttgcagagcagaagttttaaactgtaatggagtctatcttatcagtgtttttccgtggatcatgccttgggtccttgggtgctgtacctaaaatctctttgccaaactcctagattttctcattctagaagttttgtttgacatttaggtctatgatccagattgagttaatattttgtgaagggtgtaagatgagtgtccaggttattttggtttttttttttttttttttttttggctcatgaatatcaagttgttccagcaccagttgttgaaaagactctcctgtctccattgagttgcttttgtgcctttgtcaaatatcagttgactgtatttgtgtgtttctgggttctcttttctgttccattgctctgtttgtctattctgtctccaataccataccgtcttgattactacagctttatagtaagtcttaaagttggttagcatctatcctccaactttgtcccttttcaccagtggtttctttgtttgtttgtttttttgagatggagtttcacccttgttgcccaggctggagtacagtggtgcaatcttggctcactacaacctccatctcttgggttcaagcaattctcctgcctcagcctcccgagtagctgggattacaggcatgcaccaccacacctggctaatttttgtatttttggtagagacagtgtttcactatgttggcaaggctggtctcgaactcctgacttcaggtgatccatctgccttggcctcccaaagtgctgtgattacaggtgtgagccactgcgcctgaccagtgttactcttaaaatcagaaaaaaagtttttttaaagtacacttaagcctaactttatttcttcccatttctttaaatataaacaacgaaacaattccaaacaatcctgaaatgtataatgtaaaaatgtaaaaagtaaagtaaagaatgaaagtctcctccttcactcagtttctccacttctttccagagggagattggtccacgtattagttatctattattgtcaaacaaattaccccaacatttagtggcataagataacaataaacatttgttatctctggccttttctgtaagccagtaatttgggtgtgacttggctggcggccctggatcagagtctctggtgaggttcagtcagatgtcctcagggtctgtggtcatctgaaggcttaattggggctggaggatctcactggcaagttggtatttcttcttgttaggaggcctcagtggtccatgtggttctttcctgagagctgttttagtatccttaagacaaggggtaactgacttctcccagagcaaacaatcagagagagacagacagggagagagagagaaagagggagagggagagagagagagaacagagaagatgaattttttttttttttaagaaggagttttgtgcttgtcacccaggccggagtgcagtggcgggatctcagctcactgcaactgccacctcccgggttcaagtgattctcctgcctcagcctcctgagtagctgagattacaggcacttgccatcatgtctggctaatttttatatttttagtagagacagggtatcaccatgttggccaggctggacttgaactcctgaactcaggtgatccgcctgcctctgtctcccaaagtgctgggattacaggcttgagccaccatgcccggcctaattttcaccttttcttttctttttttttttttttttactttttaattttctttttttttttttaatttttttttttttattatactctaagttttagggtacatgtgcacattgtgcaggttagttacatatgtatacatgtgccatgttggtgcgctgcacccactaacgtgtcatctagcattaggtatatctcccaatgctatccctcccccctcccccgaccccaccacagtccccagagtgtgatattccccttcctgtgtccatgtgatctcattgttcaattcccacctatgagtgagaatatgcggtgtttggttttttgttcttgcgatagtttactgagaatgatggtttccaatttcatccatgtccctacaaaggacatgaactcatcattttttatggctgcatagtattccatggcgtatatgtgccacattttcttaatccagtctatcattgttggacatttgggttggttccaagtctttgctattgtgaatagtgccgcaataaacatatgtgtgcatgtgtctttatagcagcatgatttatagtcctttgggtatatacccagtaatgggatggctgggtcaaatggtatttctagttctagatccctgaggaatcgccacactgacttccacaatggttgaactagtttacagtcccaccaacagtgtaaaagtgttcctatttctccacatcctctccagcacctgttgttgcctgactttttaatgattgccattctaactggtgtgagatgatatctttcaatggagaagtgtcaaagaatttgaagtcacatttaaaaaccacaatagttaattttaaaatcagaaaacagttataaatacacttaagtcaaactatatttttctctttatttttattttaaagacaaaatcaatgtctttgtttcataaaaatataaaatatcctgaaatttatcaagtgacaagtgaaagtttcttcccttcactccattttcccactcctactccccagagggagatcggcacatagcttctcagtctattttctttctttctttctttttttgtttgagacggagtctcgctctgtcacccaggctggagtgcagtggcgtgatctcggctcactgcaagctctgcctcccaggttcacgccattctcctgcctcagcctcctgagtagctgggactacaggcgcccgccaccatgctcggctaatttttttgtatttttagtagagacgggatttcaccgtgttagccaggatggtctccatctcctgacctcgtgatctgcccgcctcagcctcccaaagtgctgggattacaggcgtgagccaccacgcccggcccccagtctattttgtatacatgcacaagctcacatgcacatgtgcatgtacataaacacacacagcacagctctttgtaaaagtgtaattaaattccacattgttttgctactccccactctttaacatatcatggatatccttcaatgtcagtacatttaggatgtcctcattcttttaaaacacccacatagcattccatattagagatttaaaatactttatatttaaagattagcttactgatgagtatttagatttttccagtttgttgctatcataaatattgctgatgtgtacatcctgcacaaaagtttgagctaatttctgcaggatcattgcttataaatagaattcacaggacaaaggtcaaacactttaaaaattttgttaggttctaccagattgccttccaataaagttgttgcattctgaacgatcactaacagtagctaagagttactgattccccataccttggaaaatattgaagaggctcaatttttcaagtttctgtcatgtgatgggcaaaaaaatgtaatctttttcttttaatttgcttttcttgaatcattaatgaggatttttttttgtattttattcccacttgtatttttttctttgaattgtctataatctttccctgtttttgctttctattttccctattttcttttccagatttctttttctacaatcttgttctgctctccctgtcagatgctgccagctttctccaaatgtctggtagtcgctgtccatccattgttggtaatgaggcaccacagagctgatcgggagttccatccacaacccaagtgggtggcagttgtgacaggtgggcatcacagtagggtgattggtggcaaactgcgttgtttcattggaagtcccccaaatgttcgtttctgcaggtctttctctggtatagttcgtattctccagagaagaattctctcatctcctgccagggacatgcccggctgcatcagttcggggagcagagtggaggtgggcaaaggggctggcagcctcatactcaggtgcagagtgtcattcgtcagatgctttcccctggcacacccctccctccactgtgtccttccgtctcaagttgtcttcccctgtcaccctcactctatgtcttgtctctcatttcatctccaaacttccaataacagtgggtccttctcatcgtcctcatttcctcacctcctgacttcttgatctgcagcctggcagcctgggcccctcttcctttcttcacctcctgtcccatccttccaaaaacaagcatcactgcacaaggctctctgaagacacagagcttcttcactgtaaaaagctaaatagcacgataacttaatttaaacaagaccctctcaggaatttgtttggcttaaagctactaaaatgccattctgttggctcatattttcatttatgtaagatgagtgtcatgccaaaatgattttattgccatagaagtcaggcaaatatagagaaaatacattttagaaaataaagtgacatgtggcacatttgaatcctatgttctgcatttagaaatgaactcatgcctctccaagctgaagctttttggttatctaggaagacggtagcctggtctctacagggttccactccagagcctgcactgcacactctctgtcctgccatggccctctgccatctgtgggaggtggatcagttgggccaggccaggcacaggtccatctcacgctgaatgtagcagacgggagctgcttctgctgggtgagggagggggcttgtgcttggctgtgaggacaaggtcactcctttggagctgtagaagggatggggcaagcatgcctgcctctgctgtctgctgagattcctttatctcaggctcccataatctcctgatcttcaaccccaggaccttgactcatttcttattcttgaaactttttgcactgttgaccacctatgctaatttgaaatggtctcttcctacttcttccacaatacaacactggcttagctctcttcttggttttcctgttccctgatgtgggcagggaggccacggggctcagtcctctgctatcacgtcactgtttttgtgcctttttcctcagaaataaacttccaccatcgctgcaccagtggctctcccctgcttctccagctttcttcaatatagctctcatatcgccagctcctgtcggatctctacctggctgtctgggcaccatcttgaattaaaggcagacaaagcgaaagccctcaatttctcactcctctctttagttagccttttcttcccccactgccctttccaccaattaatcaacaagccaataatcagcttatcatctgaatgcctatcaccatttccccaagcctggaaaacttggaaaagaacttttatttctctgtctagcttaagctcttttatcctttacaaccccacagttctcaccttagattagcacatgtcatttcctctgtgggccatttagataatgtccaaatcagaatttatcccttgaggatcttccctttggttgtccccagccatttcctaagggcgactgacacctcctatgcactgaagccagatcacttttcgtaaaacagtgctttgcctcggtcactctccagcttaagcagcatcagttgctttctattgctattggacaaaacccaaacccattctgtttgcattcaaagagccacatgggctatccctaaatttcccatttggttgtatctccaattctgcccctttctgaacaattctccgcaaaacgtgtttattcactgatttatgaagcatatgaatacagctctccttctaattctggaattctcttcaccatgccgtattagacctaagttcttgctcttggatgaagtagttcaggaaattgtacatgaagaaggcatggtctgaaatccaggatcccctgtgtggtcttgagccatgttagatgttctcagctttggttttctcattggttaaaaacaaggatgaaaatcatatttacatctccaggctgccttcctgcctgtcttagcatggctgccaggcccaaggcccgtggagatcctttgggtgaggggctataacagtctgctcaggaccccagggactttaatgagggcatttgggactctggttccttgttaaaatttttaaggctgggtgctgtgtctaatgtctataatcccagcactttgggaggctgaaatgggtggatgacctgaggtcaggagtttgagaccagcctggccaacatggtgaaaccccatctctacgaaaaatacaaaattagccaggtgcggtgcatgcctgtagtcccagctactggggaggctgaggcaggagaatctcttgaacccgggaggcagaggttgcagtgagccaagattgtgccattgcactgcagcctgggtgacagagggagactctgtctccaaaaaaaaaaaaaagttttaaaaatgtactgatgaatgctttcaagtatacaggaaagagtataacagatattcatttatccaccacccgaatttaatggatattattttgccagttttgcttcagagctctatttaacataaaaataaataaagcattacagatgcagtttaagctgtaccttcaccgaccccgtcctgttccccaagggaccactgtccggaggctcatcctccccatgtgtttttatttttctaccatatgtagctggccctaagtgatgtcggctattgttcagcgtttgaaaattttatatacattgtatcataccgcatggatcctttcacttgataaataatttgaatggtgagtgaatgattgtgcaatttgctttctttcagccaacatattttcgcaatttatccatgttaatgcatgtcatggcatttcattcattttaactgttcttcgtgcaagggagacacagaagagttactgagtggtgaaagtggtgtgagaggggtttgcacagggcacccgggtctcctggcgctccccgtacagtcggagagtcaggaaagactttttagaggagattgtctgggagctgagtgttaagggagacggacgcagaggccttgtctgccacccagcggggcttgggctttattttgggggcagcgggaaacctgactcaagttcatattttagaaagattgctcttgtcccaatacggaaactggcccaggatagggatgaagaaaggaggcaggactcacttgagaggctgctacggcaactcaagagagccaggcagggcctctagggtggaaaagagacgagatgggggtggggtatggggtgaggccaagaaaagggataaggctgacacctgactggctggctggtggcttcacgttctgggactcgggaggaacatggcagctggaacaggtgtgggggaaatggcgaggctagtgtgagaggtcagccgaagacagtggcccagatctcggaggtgtggtcagggctggggtaaagcgccccgcagcatgggagcaggagaagcggtgggctgggcgaaacgcttgggcagcctgtgctggtttggaagcggaaagagccatatttgttgagtgaatttaatttaccagaagaggcattttcactgttctatatatttttaaaaaaacctttctgacaaaattccaaacatacaaagtgggtaagctaaaaatcaatattctttacccagaaacacacccagaatctccccaggtggctgttccactcgggatgcagggaacacatggatgttctggctgctctctgggcctcgcagctggcctggcactgtgtctgcggagggccaggcctggggtcttcctaggatgcacggtgctggcctattataggtattcaggaaatacttgtgcaaagaacgaacacactgcgtggaaggttgtgatgcctgactcagtggccttttctgcccggacgggtgaggatggctcatccatgggtgcctggagggagccctccatgcccccatggggaacatctgcctgggtcccccttggatggggctctgttatcctcctgagatgaagagccagcagttagctaccaccaaaattctgtagaatcgtcctcccagcagggcgtgtccccgagtctcctttgtggctcccttcgccatgtggtggaagggcatctacatgtctttgccaggaagggtcttctgggctccagtgagctagggcagcctggaagggccctgcagtgcccgggatggcctctgtgtggagttgtgattctgactgtttgttttctggcctctcatggctggaaaggctcgtcccaggacagcgggctcaacccttcctcactgcccacagaggtactaagaggaaacactcttttgcgtgaaatggctgtgggatcctggcattcacgttctccttctgggctggtggggtgggtgatgctacacagcatggccttccgcactctctcatgtgaccctcatgatgatggtgggagggaggtgggctgggttgctttcccctcctcaaagatgcaggaacagtgacctagagaggtgaagtaacttcaaagcccaggcctcagtctccagccaccttcctggcccagcagagaggaagaaagtctcagaatagctgatgagcggtttaagtgggggccccagcctcacagcctggcctccatccctggggttcttaaccctgtctgcacatcagaagcaccaggggagcctcaggtgtggaaagaagaatcccaagctccaccccagaccgagtaaatcagcactctggggtgggcccattggtctgtattttcaagtgctcctggtgctactgtgcagccagggttgagaacctttgcctttcagcctctactcatgcaggctctgctctgttatctgcagagatgggcgcccaggctcagtggaggaaaccaaggcaatccaggccaagtacctcagcgctcaggccggcaagaccctggagacaagactgtcatcccctttacactgggcacaggctcagggccaggactggaactcttcttcagttagcccctgacgtaaggactggctccttttcctcctgcatttcccactcgacctgcactcagctgagggccacaagtacagcaaacacctgcttagttgtgggtgtggatgtgtgtgacgaactgggaaggagcaccaactctgtgtcaggcactttgcatagattattctatttatctttgaaacaactgagtgagatgggtgagatggttattccagttttacagacaaggaagtcaaagccacagagaggttatgcaactttcttgagtttgcatagtccgtggctcagccaggattgaaacccagaggcacctgactccaaagcgtgattccctggtgccccctggcacccgctggctctggggtgcccttggaggaagttggtgaactccttactgcttcctttctcctttcggatcaagggggtctgagaacctgccagtctccgctgggcccgttcatgcctggttaaaactgttagaggtgagcctctttaaggggaagcaggaaatgagatgtggactgtgaggaccaggagctgaggcggctaaaacatacctccccagtgccaccaggaacagaggccatagacacgctcagctcaggaccaaactcaagtcccacgtcaggcagggaatggtgtccggccaggcaggggcgctcccagctcagcccacagggcctcagcagcacctcctggagcacacagggtgaggccagcttgggagcccagctgctcggccccagccctctgcatccttggccttgggcagtctgaccccagcatcagggagaatttctgcccctttcttggatgattccttggaaggttgtgttaatcagcagtatgaagggatcacagggcccctaaagaggcagcagacctgctggaatttgtggccacaatgaaagacatgggaagcaccaagtagcatttctttttctttttttttaattttttttttttttgagacagagtctcgctctgttgcccaggctggagtgcagtggcgcaatctcagctcactccaagctctgcctcccaggttcacaccattctcctgcctcagcctcccaagtagctgggactacaggcgcctggctaattttttctatttttttttagtagagacggggtttcaccgtgttagtcaggatggtctcgatctcccgacctcgtgatccgtccacctcggcctcccaaagtgctgggattacaggcgtgaaccaccgcacccggctttcttttttttattatttttgtttttgagacagggtcttgctctctcacccaggttagagtgcagtggtgtgatattgacctactgcagcctcaacttcccaggcttaagcgattctcccacttgtcagcctcctgagtagctgggactacaggtgtgtaccacctgtatctttttgtatcttttgtagagacagggtttcatcatgttgcccagactagtctcgaactcctgggctcaaatagtccacctgtcttggcctcccaaagggctgggattataggcatgagccaccgcacctggccccaaggaccatttcaaacctttattaggtttctcctgtctttttttctttttctttcttcccatccctttctgactctgactctttttcctcttcctctttttctggttctgatctctttccctctgcctgtatccctagctggacccttggtatgagctactggataggggtttctggccaggcctgggatccttcctcttactgccctcattcctctttgtgaatcaccattatgtatgttagttactacctaggtaggtacttgttgtattgcagatgctgataatgagcaggtgtttggaggatccagagtgggtagcattgatgatttagtcttgaaaagtttactcatttgctaggtccaagcgcaacataggccaattaccatgtcccgcctgccacttggctgtgacaagaaagttcttaagaccaaaaacaatctgaatctggaagtcctcgctggtgctaagggagggatgaaacccaggaggtggagttggggctggtggatctgcaccacgctcctgttgcttccaccctccgttggctttgtctctggtgacgtgatctaagggaccctgctgatgggattgatactgggatcgcagaaaggtggtttcactgggggctccaggagtcccaggtgccagggttgctccatgagtggcctgtctcagcaacatgagagccttgaggactggaatctatctcagtcaactctgtgtcctccaacaccagcacggggcttgctgtgggcaggggctcaataggtttgctaagtgaatgaattaaggatgaatcaaaaacagtaaaagaagtacaagagaaaggctctggaacccacatggaggtgtggagaaccctagccccttagctgcttatctgcagtcgcctgggcgatggatactccccaggcctccctccagagaggcgccaaccttcctgtgttggcagcagttcgcaggtattccgtctacacagaatggcagaggatcgcacaatgcctgtgtggaggcccagcccagggtggggccagcttgcaagcccagtcagaccttcttgggaagaaggaaggaaggaagggttgcaactgagaagaaactgtggctttgaaagttttcctccagggtttttttgtttgcaaggaaaggagatgcttagggaggcgttatatactggacaaaagagtgcggccgggtcagtggtgaaatcagagtgcatgtctttcccacagcaggtcagcagggatagctttgtctgcgaatgcccacgtgctgggaagacgttgcagcctctgatacaacagctctgtgttccttagatttttttttttttttttgagaaaagtacatgtgcttcatattacctgtgtccacagcacagatgtaagtgagtaaaatttaaacaaggatccagatagctgggacgaagagtctcttgacctgttctttccgactgtgcaggtttgagagaaagaccagggatctggcagtgttggccagatattcctgcaggtcagttggaatccagttggggatttgctgatgtgaaacactcatgaacagtcacaaaaccaaacatatggggccagaaagcaagaccgacttgaccttaaacaaaatcctcctttgcttctgagctacacgccaggcaagacaaatttagggaaataggaatatggatttctatttgttaagaaagatacagttgtttctcatcaggcttttccagttctagcacataggattgcagtgacctcatttttgatcaatggccaatgcattcaactgtctggtggaataatctattaactgggcacctgccaattgtctagaataggaactagcttaggcatatgttttaaaaaatgataacattgttatgagccctgccgagacaagaggatgggaagcccaagcaggtcagcactggctctgaagtcagtttgggatgatagactgtgtttttcagtagactcactgccctgtgactgacctccctctctccctgcattaattacatggtatttaaaggcaaaccaacaaaccacttaagagtcccggaacccgggcatgtggaatctggatgagtgaccttcgctgggtcacacatagccactgttggaacccagttctcccagctccccagccagtgctctggctgtgccctgtgcccccgtgcagctccctccgagtcccatgtgaccacctgtgtttatgatgagtcctcactcacatctgtgtatcgattctcttgcaaagaggccccttatggcactggctggtggaggaggcagctatgctgtttgacagcccaccagcaggctaagtttgccacttttagggatccatgtcttaatcctgagtgtgaaaagacttaaggtgttataagcgtcacccgcttcatctaaactcgcatttgcaaccagtggctgattgagagatggcaaaggctgtggacaccaggaagccatgaggagaaggaccccctcagcaagggtcaggacttgtggacctttggatggaaagaacttcacttgcagatagttatcatgtgtagtcagatgctgcttatctgtaatagtgaggacagtggtagctaacctttattgagcattactatatgccgggcactgattttttgtactttatatgtattaattcatttaactcttacaaaagaagtagatactattattcccattttacagtggggaaacagaggtggtgagaggtgagtacctcacctaccataggtagatttgagaaccaagtcgcactgggtgcggtggctcacccctgtaatcccagcactttgggaggctgaggtaggaggatcacttgagcccaggagttcgagaccagcctaggcaatacagtgagacttcatctctagaaaacattttaaaaattagctggacatggtggtgcacacctgttgtctcaggtactcagaaggctgaggcaggaggaatcacttgagcccaagagttcgaggtcacagtgagcactccagcctgggcgacagagcgagaaccctgaccctaaaaaagaaagaaagaatattaccagtaccattgcttctttccagttgcatctccacagcagtcactcttagacttttggttatttatgtacctactttctgttcatagagtcaaatctgagtcccagaaaagggcatgtgtctgggcagctggaggggccgtcataggcctggggttctagatgaccagagggagtgcttgggagagcgagctgctctgtatttttcctctaagctcctcattgcctacctctaggtctcaggagtgggtcaaaccagaacactgcctgggggctggtggctcacgcctgtaatcccagcactttgggaggccaaggcctccatctctcacacccatgtccagaaatacctggtgctgccagctcctgagacctctgagcatttggagggctaaatcagattggttctcagattttctctctgctgacttgacattccattttcttgggactgatatctgtaccactggactatctactttttaacttctgaaattttgttgctgtgttctactgttttccccattcttatggatttatatccttttaaaaatctctttaatgggtgcggtggctcttgcctctaatcccagcactttgggagaccaaggggggaggattgcttgagtccaggggtttgagactagcctgggcaacatagtgagaccccacctctaaaaaaaaaagttctttgatatatattagcaggatgtggggagggaacgaaattaggtacatgtattcagtctgccatcttaactgataagtctggtattaatatttttcaatgacaaactaaccatacttaaaaaatttttaattagagaattttattatttcctctccaaaaagtatcatttttcatttagaaaggtgtattcgtatatctctttgtgagagatcattgtctgtcttgctctggcaaactttacagtcctagattcaggactgtgatcactgtgaattctacccctgattctagggaccatttgtggaaatctgaatagtgctttgtaaacagatttctgagtctttttgaagccatttgggatggtatcatggaagagatatgaagaaggtattttctcttggtgggttgctgcaatatgatttctgacttagtgtcatcataaatatttgagactacttgttatcttcagtaggtgttaccttatgggctgatacttaatcacagcagtcagaaactgtgaatttgcatggtgacacccttccaaagtgactgtaagagccttcctccctgacttttgaggatttgcaaacagcagagaagcaagtttttaggtatcactccagggaaaatagtgatttcatgcttgaaatatgtgggaacaatatctaaagaaaaagcttaagttgtctaaagaggatcttataatagttggatacacttataattagaaaagcccactgggggcccaggcactgtggctcacacctataatcccagcactttgggaggccgaggtgggcagatcacttgaggtcaggagttggagaccatcctgggcaacatggtgaaaccccgtctctactaaaaatacaaaaattagctgggcgtggtggcacatgcctgtaattccagctactcgggaggctgaggcaggagaattgcttgaacctgggaggcaggagctgtaatgagccaagatcgcgccactgcactgcagcctgggtgacagagcgagactctgtctcaaaaaagaaaaaaaaaaaggaaaagctaatttgacattggggcttactaggaacaaatataagcagagaaatggcctacttagaaatgaaaccttagattgaaacaagaaaatgtatttattcctgaaaagattttccacagtgagttgtcaagttgtgtcttgctaacattcggtccctgattccttcatttccgccatccttccttggctcatgtgcctcttcatctctgtatttctttgtctcctccccacctagatctccctctctcctccactctaatcagttcactgaaaaacttttcctgagtcccactatgtgcagaaccaaagctagaaattgaggatacacacaagaataaggcacaggctctcccctaaccaaacaatcaccatttcctgggtcagtattttaaaggaaaatatgcaagttgcaggtggaggagagtggaagaaccttgaccttggggtttctgagatgtcttcaaggagagggtgatgcgagtgtaccccagaggtcacacaagtgttcacctggtagtaaactggggatggtgatcccaaggaacaggaacagcatatgtgaagactcagcgcgcatggaagagttcagaaagtgcaggaaggtaggtgtgctggagctgagtgtgctgggacagggtttggggacagagggccagaagggtacagagccttttcaggttcaagagagagttcttcccagttccctgaggtgatggtgcttcaaagcgaggaggcagagggaagctcagggaactttcagcttctagggcttccaggattggcttgtatcacaggtcttggtgaaaagcagaacagtagcttgtctctgttcagatcacagccgttatttttcacttatgacaggtttatcggaacatggccccactgaaagtcaaggagcatctgtatttataattagtgtatttccttccagtattcttgccttgcatatttgtattcatatatgtgagtagatagtacctactaaattataattttaacttatttttattaagaactatacatatttaatttaaaaatatatctaaaagctatttccttatagcctttttttcatcctttttcgttttaaagcataattgagctcacatagtatataatatttttgaagttaaaactaatgtagcaacattcagaagtcccagatggaatgtactataaacagaggcttgatgacatatcttgagaattttcttagtctctctagttagaaaagcaagcaaacaaacaaacaaaataaccagaaataagtttaaaattcaacatgcgttttaaagatacggaaatcataaaagctgagcaaaaggtcaataggcttttctttgaagcagggaaggggttgaatcagatttgctctttggagccctgcctggagttagggtaggcacaaatggggagggactgaggctggggcccttcaaacgtggttgcaattgtccagtctagagaagacacagcctggactgatgcagtcgaggtggggtagagatgaagaccagatgcagtttgggagacagtttcgtgatctcattttcttgatttgtttgtacatgcctcttaattgtttccattcccgcccttctcatcccacctctcatcccatctttggtccaccaccgccatcgggaacatccacatacttgttaaacacaaacaaaattattttaaccaatgagaactttgattgattttttgtctcgttagtttataatccaaaacaatgatgaaaacatttaaaagggtccaagatcctgccataagtatttacttttctcgcgccactggctacatgagtgggtgcacacatagacccatgcatgatcacacacactgatggcctggccctgagatactggagacgaagcagccggcaccatgtctggcacatgaactcaaacacttcacttcctctggtgaaccttggccagccccatccatgattcagtgacgaaatgccttctcactctgaactaaattcatttgcacggtttctagcgtgctttgtatttttagtccttttccacacatggcctctcccattggatggcacactccctcatcacagcactacagctcagccacatgccccgtgagagcatgatgaggcagccggctggggtctctgcctggcccggggcctggattatctctgtatgtggccaccatttgcatgtgaaaatcacgtctggctcacaagtctgtgacccaaacaatagtctctttcaccctgagcatacggtctagggatgtgaagggaaatttcccttgcttctctgagaatatgtgccacttttctgaaaaattaaaaataattggagttacgaagttgggttttttttttttttttggcaagagtaagcaataatgattaagaaaagtggttcatcaactgttaccctgctcttagtcctttcaaacttccttctttttttttttttttttttgagacagagtctcgctgtgtcacccaggctggagtgcagtggcgtgatcttggctcactgcaagctccgcctcccaggttcatgccatcctcctgtctcagcctcccgagtagctgggactacagctacttttttgtatttttagtagagacagggtttcaccgtgttagccaggatggtctcgatctcctgaccttgtgatccacccgcctcagccttccaaagtgctgggattacaggcgtgagccaccgcgcccggctcaaacttatttctaataagccatcagaaaattatgtcagatgtctacatcaattcctgcatcagaatctcacagtgtccttatcagacattctttaccaaacagcctcgccgaaattaatactttttgaaacactgagtatatttctgcttgtaagcagagaagaaagtaaggtggaataatttattaagatgagaaaaaagtcctgggtcaattcacattgctgtacatttcttgaatttaagatttgaaggtggtgcggtgagcaagggaagtaacacagtagcttccaccccgccacccacggtttcactttccatggtttccatttcccgtagtcaaccacagtccgaaaatactaaatggaaaataccagaaacaaacagttcatacgttttaaattgcccgccattctgagtagcatgatgaaatcttgcaccgtctcacccgggacatgaaccctgctttgtccagtgtggccacaccgtacacaccgcctgccatcagtcacttagtacctggcttggttatcaggtcaactgtcaagtagcagagggcttgagctcgaggccaataatagccaagtgctatgtcacgatgcctgcatcatccgcctcacttctcgtcacgtaggcgttttatcatcttacatcatcacaagaagaagggtgcatacagcatggtaagctattttgagagagagacgttcacataacttttattatagtatattgttagagttgttctattttattattaattattgtggttgatatcttcttgtgcctaatttataaattaaactttaccataggtatgcatatataggaaaaaacgtggtgtatatagggttaggtactatccttggtttcaggcatcccctgggggtcatgggatgtacccctaatggataagggaggggggatactgtaatagctaatgtttattgagcattctgtttgtgccaggtgctatactaagcattatacatctcactatatcctatctatggagtccctgtgtgttattgtccccatgataaagatgagataactgatgttcagagaggttagattgcccagcagttatccagctggtaagcaatggagccagaatttgagccctggcttctgacctcagggtccatgtccttaaccatcaagctcacattgtttccagctgctggggccgcctgctcttcactgactgaattagaaaacaagcaggacacataagtcccatgtagggcatggcattgaaaatgcagtttgcgaagctgctgactagtgaagtgaaaggggacggtagttaaagtattttgcactgggagacttgaagccagcattctctctaccactgtctgtgggaccctaggccagcaccccaatatctgtgggtcttcagtttccccataataaaacttgattttaaaattcatcatctggccgggcatggtgactcatgcctgcagtcccagcactttgggaggccaaggtgggtgggtcacctgaggtcaggagttcgagaccagcctggccaacatggtaaaaccctgtctctactaaaaatacaaaaattagctgggtgtggtgtcacgcgcctgtaaccccagctagtccagagctcaaggccaataatagccaagtgctatgtcacgatgcctgcgtcatccgccccacattgtctcgtcacataggcattttatcatcttacagcatcacaagattctcctggtgaggcaggagaatcgcttgaacctgggaggtggaggttgcagtgagccaaggtcacaccactgcactccagcctggatgagacagtgagactccatctcaaaaaatatataaataaataaataaatacataaatttcattatctcttagaagtcagtgggctgcccagccaggggcagaacttagtgcgacacttgcccaactcctcgtatttgtcttgtacttcccagcatgggagatgtgtcctaaatgaagaagcacaagaacatgctattgagaagagtccctcaattgcggccatcctttggtgtttctgaaagtaacaaaacaaggcatcagatatagcagaaagaagcactggtggtagctgagagagtttgataggcagctacagaaaatccccataccttggatgttgatggcacgcggtgctgagtaggaaatgcagaggtcattgtttttcaggctgtaaaaacctcaagcacaggaatcccatattattgccgttttatcctggcatcttggaaagtaccgggcacatggttggctctcggttgcactttgctgagtgactgactgggaaacacaccagagtggatcagcatccagtgaggcagatggatggacacagtcctaggaaacgtaatctgcgcagcttgtgaaagtgtgatgagagttgcaggagaatggagttgatggaacagattgtcagagcactgtctccaaagaagaggagtggcagggtggacggagcgcctggctgcacacacacctgttccgcctccctttctttcttcctcccatcctcccaccctataggtagtcatcaaagcctacggggtgccaggaggtaggctttgggatacagcggagaataggatagcgatggtccctgccctcatgaaacagggaatccatgtcagcaatatatgcttttctgattaatgctatcagaacacatgcttcttgttagccgtgtggctgtgggcaagtcaccgaaaccctttgagtttgtccatctgtctaatggaaagaaataccctcctggaagagtgttttttaaaggattagaaataatatgtccaaagtagttattttttctttgagtttggggggaggggtggttccttctctctctccccctgccaactgttttctagaaaatcagcacttactggatattgtagagaataattttggggttttattattttgaagacggtttcttctgttaaacttcttcctgcatcctcttgaactggcagaaataaaaatgctagacttttaaagatatgacactctagaatcctgattgctaaaaatgaaaagcattctaaagtaaataaaataacaaattcaaacagtaaatctgtaatgaccgaatgagcaccattttaaactcacacgtaccagaggtgatcgtggtatgaggaatgagcatggtacattctgaagctcctgaagtaatcaagggacttctgttatggcctaaagcaaacaaacagccaccatacaaacctatatacatttctatttcttttccctcaaatttctacttgaagcaaaaggaaagtcacttcttgctttctctgccccagtaactgtgggtggcagccagtttttggagcagttctggagcaattactctgcaatcccaaattcctagtgtatgaacaaatctgctcagacattatcagggaagaaatactggaacctggattttagtcctggctctgccactttctcaatccttgaccttggggaaatcacctaagcgtcagtttcctcctctagaaaatagagaataataatatctgcctcacagattatttagagattaaatgatgtaataaaacgtatttcctcaattccaagtcaccatcaattttaattcacaccaaattttcaggtggaaaaaagccttacattaagtcctcatgttgcttgtaagacatccaaatttcagaaaatcaaaatgtttttaaaaagttatactcaaaatgagcaactactataaatacgattgccttggcaaaggaagattctaaataaacgtaagacagtcttgttatcgtggtcatcctccctgggcggaggatctgcaatctgtgcctgggtttccctgtcgccaccactctgctaagcagccggaagcagggctgccccttcagcatttctcttgagacctaccgcaccccctcacaatcccagatcagatgccaaagccagtggggactggacaacatgatgagcccaaaccaatccacgctgagcttggcatctgatttgggattctccaccttgcagagaatcggaaagtatctccacaatttcttttggaccgagctgttcttccctttccatgagtttcttttacacctgacctagagcctctcaaccatttttatgtcactgcacagccagaaaatgataatatttgtacagcactccagggaaaagggaggaacagttgggccaagaggccaatgacttcaccatctggaacccattcagggcattccagcgtggcccaccttctccaattagcctcctcaatgaaaaagaaagagggggaggaagaggaagagaaaagaagaagaaaaccctggtaatgttcactgttttttgctttagaattataagggcactttagtttttcgaagcgtctttatgataatggtctggtatagtgatcaaaatacccttgggcttgaagtgccataaacaaacaagttgtgatacttgcgtgtgtatcagaatccctgaggaaacttggtgtgtgtgtgtgagcgcgtttcctaatagcctgaggcccgggaatctggattgtaagaagtgctccaggtagttttttatcatgatttttaagtcagctctgggaactactgtcttcgaggcccttggaaggtttctcctggcactctacctttcatgttctgcattgctcattctattttcccctgtaaaggtagcctttttgatgcagtagtccaaacctcgtcttgcggtgcccttgtatatgtgctcagtcctaccccctagtgtacaagaatcgcactgcaaggagtagataatcagctgacctgtgggaccagaagctcagcctctcaggcttgcaatgttctctgagaacagtgtgtctcagcgtttggtttggagatttcctgtatcggaattatctagaaactcattagaaaaacagtctgatccatactctcaaattttggactagtaatctacattttaggtaagcatactggaaattcttatgtacattcagatttggaaactactacgtatatgggatttactaatcctattgatctgtaaagggttaatttgactcacacattgttacctgtctttgacaggccccttactgcgaaataaccatccatgtacacaatggaccccttggagtaaccagccttgcttccaatatgactgttggggtagtaaccaggagaaggtgcttaggccctaaattctgtcactgaagccaatggtatgattaaagctcaatgtgaagacttgaatacaacacatcccaccctcattttagtttcatctggcaattgaggtgtttttgctttggccattatgggtctcccaatcagagtggagcttctagaataagtatttttaacatagagtccttgagcccctgaagttgcatgcaaaattgtatgtaaataagtgtatttttctaggacagggttcagaactactgccagattctcaaaggcattcttgacctgaagggggaaagattaaggattagaacagaggtacttttcagggttagaacagtgaagaattataaacaaaggctcatgtccaggtaaggatttctgagcctctgcagaccaagcctgaccaattgtccagcattccccaaaatccacctgctctccctcctcttttctttgtgcctcatcctttcttcctttatgcttttctctctctgttttttctccccaatccttttgtctctctttttcccctctgcccccactttgccatctccccatccctcctcaccttccatttcttctctttctctcccttcctggcctgaataggaagcaaagcatgttctttgacttgttctacctgttgaatattttcaatattccacttattttatgttggtggttcttgtttgtaaaattatgtgagttgcacatttaatatttctctggctagatgagaaactaatgctttaggcatccttgttccttgattgtttggatccagcccttgttagaaggctttctgtgggcagtggtccccatcacccctggccagcagcaggcatgccttaggcctccctcttgttctgagattgattctgatgaagaaaaactgactgaccagaatcccagacccctggctctgagcccctaccctgatcccaaaacccagctgtctctactggattattctcatttgctggctttggcttggggatcagagaaaggagccatgggctgaagaggccgtgggacctggtcaagtttgcagaaggaagtgcgagcgagcgctgcccagcttcgacccccgagtctgctcccactctgtgactctgtgagcaggagggatgggctggcccgactccctggctgggcgttccgggtatggatgcctgccacatgcagtcaccagctggggagggcccttccacacttctgagcctcgcccgcctcagccctgagcagctgggagttccgaggaagcgatgggtgaccgctgaggggtgggccgacacatcctgcctgtgcccccccgctgctggtttgtgttcctctcactgcacgtggcaggtgtcccctggctgtggggaatttgcagattactctccatgtgactgtagaagcgtccctgaaggcacttctggcttcaccattttgggggtacctcctggggtaggaggcaggatggtgggtctgtataaagcacaaagtgggatatgtgccctcaagtcactcacatttgggtggggagcaaggcagccagctacagacccagagaacaaggcaggaagtcctgggctgacagtgggcatgcagagagtgggctctgtggtgcgagcagcctgtgagtgctggccgagggttgggggtgggagtgaacccagaggtggagctggcaggagagtgccgcctcctgaggctggcaggagatgatgccccaaattgcaaatttgaaagttaaataatatacaaaggacccacgtgggccccccaccccactcttctccccactaccctcactccagggcccagacaaggccagtgctagagcttccaggcctgctcgcaatccaacttacatgtccctcttgcctggatcttcatgctccctggggactgaggcatgcaccttcatcttcagggacgtgttttgaagaaatattgaggcctctgccacagggttgacctaaccccaacacataggtgcccacaccccaggccagcactaggcaatggggcagcctctagacatctccctggggattgcatttgcctttaaatctctgggccccatagcgagttggcaagtggctgtccttgttggcctaatgtgaaagattgcatcacatatactacagttgtcagagacatggctttggagtcagacctccaggttcaagctccagctcagctataatttgctgcatagaattggtcaaggtagttaacctctctgacctgctctctttgtttctgaaaagcaggtaataacgcctgcctcgctaggttgccaaagcataaaataagataatgtttataagaggcctagtgtcatgcctggcacaaagtaggtgctcaataaataatcattgtcattatcattgcttgtcctggaagagtaggtccctggaggccctgggttatactctaaggcagtgcttcaggatctggggatcttgttaaaatgaaggttccaatgccgcaggttggggaccatactttgcatagcaaggtagtttcctggggcacctcaatcacgttcagtcaggagcagcagcatcctttctcctcctcttgctctcccctcgtgctctctgggttgatcagtcatcaaaacacttcccaggctgtccaggcaggatgtagggcaggatgtatggtcactggactcatccagcaccccagtgactgcagccacctgcggatgaggaggggatccggagggaggagggaacttgtctctgaccttgaggattcctaatctgacggggagatggtacaaacacacctcactctccataagcgcctgcagaaaaggcacacaacggcttgcaaaggaacacacagaggcacaggaaggggccacttctggttttctcctctcagagctagaaggctgagagcagagtgcccctgccagccccacaaagggaagcggagtgcagcctgaagctgcaaggtcaggtgatatggcagtagcccagggcagcccgggttaaaggcacactcactcaaggccggctctcatttagtggcaccgcaggttaaatgctgctcccaggccttgggtcccagtgaccaggaaagttttgaaaatgagaacatgtgttgaccctaggactaggacaacagcgcccttgattttgcggaagtcttccctggaagttgggcgtgcttgatattgagacgctgcactttgtgtttcttgacggctttgctgcaaattctcacacaccttgcccttgagtaaaaccccaaggattccagacgtcggcaaactcccgagcacaacggtcctttccacctaaacccctgagcacacagtgatttctgcctacattggtgactggtggtcagatggcttgctgggcagcttccccgccctgcttctcgtggaggaagggcctccctgtggtgggaagaggtgttccctgtggcaacaaacagagaccttgtctctacaaaaaatgtacaaacttagctgggcatggtggcgtcagcctgtagtcccagctagtcgggaggctgaagtgggaggatcacttgagccatgggaggtggaggctgcagtgagccgtgatcatgccgctgcactccgagggaggccacaactagtaggcagggcctgtggctctgtcctcaccttccaccatccttggccaggaagccccctttgtcctctattcccacatctgtacggcagggaggagcccaggccttaagcaaggatgcagggtgccatctctgaggatccctggggagggtgctgtggaaagaaatggcttgaggttttgtttgattgtttgtttgtttgttttgttttgttttttattgtggtaaaatatccatagcacacactttgccattttaaccgtttttaactgtacaattcggtggcattagttacattcacactgttgtgcaattatcctaaccatttgcgtccaaaactttgtcatcaccccaaacagaaactccgcccccactaacttctgttctatgatactttctgcctctctgaatttgcctattctagatatttcataggcagtagttccccttatctacagttttgttttctgcagttgcagctatccacggtcaacagtggtccaaaaatagataaaaatagtatagtacaataaggtattttgggccaggcgcagtggctcatgcctataatctcagcactttgggaggctgaggtgggagaattgcttctgctcaggggcttgagaccagcctgggcaacaaagtgagaccctgtctctacaaaaaatataaaaaattagctgagcatggtggcgccagcctgttgtctcagctagtcaggaggctgaagtgggaggatcacttgagccgtgggaggtggaggctgcagtgagccgtgatcgtgccactgcactccagatggggtgacagagcaagacccagtctcaaaaaagaaagaaagaaaagaataaaaaagatattttgagatgagggagagagaccacattcataaaacttttattataatataattgtattttattatgtcattgttgctagtctcttactgagcctaatttataagttaaacttgatcacaggtatgtatatataggaaaaaacatagtatatatagggtttggtattatctgccatttcaggcctccactgagggttttggaaaggatgccctgtggataaaggggagctactgtaaggggaattatacaacatttgtccttttgcatctggcttctttcacttagcatgaggtcttcaaagttcatctgtgttgtagcatgtatcagaaattcattcctttttatggtggaataacattccattgtatcgatataccacattttgtttatccattcatctgtggatggacatttgggttgtttccattgtttgttattattaatgttttatattttttgcatgtcccctggggctaggtgccagagacaccccagaaaataagagagcgtggtgcctgcccccacctggctcatagtctagtggaaaaaacaggcaagtagccagccagtaacagcagagagatggggacccataggacatattggacaagggcttggccacactgtgttctggtctcccctgagcagctgctaactttgtgacgtgggcatctcctttctcaggcctcagctttcccatctgtaaaatggatttgaggctaaagactgctgtgatgctaactttctacagttctatgatactgaatctttagccatggcattctgagggaggccctgctttgtttcttgggtaggacttggggtgggggagagctgcccatggcctcagaacttggtggggaaggggtctgagcatgtgaatattttcagcctggtgcttggcaggaggggggctctgcttacatatcggtgtgttgatactgactgccccttccctgcaggggtcacttgacctcccaccccgtctcagctgcctgcctggcgaggatatccaagcaacagtggggcagggaagacttcttgaccagcttggagctgtgcaggggcagctgatttgagggggccatgagttgagttaggattattttgggggtgtcaggggtcaggagttgaagcatgggaagtgggatgccagaggcagagacagccagaaggaataagtggtggctgggaggaacccacagccagggtggagacttcccgttaaaacagcccgttatcctggcaggagggagagtgcattcctttcccccaggagataaggaggccagattttcctttctcagggctcctttctagggtaggctagtgggggctctgtgggctgggctggggccaggtccctctggacccctctgcagggtcccagctggagcagctggagctcctggcactcatccaagactccctgcagccttggacaagcactgctgcagcagtggcagcacaacgtttgaatcccagttgcctctctgtgcctcagtttccttccctgaaaaaaatccatctacctcatagggtagttgtgaggcttcaatgagttaatacggtaaagcacttggaatgagtggtatgcagcggaagtagacagcactgttctcaccccaagatgcctcttgtttcctggggcccaggtgagaacctagtgtctcctcaagtcagattcttttcacattcttgggcatttgacagctctttccgctgtaggcctctctaggcaaaaatctcatctcagcttactgaccccaaggccattatgagaaaaggttcattaagcatttaaaatagagcccgtgttagcagatggaacaatttcttggttattagaaaccattcttcatgaagaaaaggcttatctttcctttcacaaatgaggaatccttagctcagaaagagccccgggactgccctcctagaccgcagggcatggcaggagctgctcttgttatgggacactttcagccccttccctcccaggccagggaggctgccctgacatcccccagtctggcctttcatcccctgggttgcccagccctgggggtccttcccactgtttcacaacagccagtcctcccacagggtggaggctctccccatggccaggcagggctctaggctgctcctttctaggcaggctgggcgggactcccctggccctctgggcaggtcaagccccacttcagatttcccttctggccactgttggaatgcccagccctccctctgtgtattttctctctgggtggggtcttaggctggaaaccctgtgcacatcctctctccaccctctctttgcaggaccaaagtcaatagggctgaagccagagaggagactgtggtccgaggaagactccaggctcacgcccaggactctttgggggcctcttcgaaacctatcattatttcctcttccaaatctccaggcagtgatcaatacaaagcaatacagcccgattcagtttaatttcaaaacagtccaacgcaatacagccgattcagttctatttcaaaacacttttattgaacaccaatagttgtaccaggattgttatgacccagttcaatgggagagcccaacagattgggacttgatactatctggactccaaactgtactctcaattagggttactgttccccttttgactctgcgtgtcttttgaacagttggcttcagctctgcacttcagtttcctcagttgttaaaacaggccaatgaattagaccatgaaggtttcctcatctctctgcccttccatgtaatctctcattatcggccagtaaggttttattaacatatggaactgtggtagtgagcttgtttcacggttctggagcacatcctgtatcaacaatcacagagtcagggaagggaggagggcatgttatggaagctggtttgggattttacctctgccattggaaaccaactgtgtatttggacagtgtgtcctgagaggcctgagagtgggcttctggctgggaagacttcagaattagaagggttctgaaaaatcatctcgtactgtgctactgagagttcgatctgcaggcaggagcgtggcatctccggggagctcattaggaaggctgggtctctggcccatgccggtctcgctgactcaaaatttgcgtttcaaagctccgagggaaaagggcttgtttacagtcccacagtgagtcctcgcataaccagggcccgaaccctggttcctgattcctgattttgccactgttcttgccttcctccacccagagatcttcagggtccttgtgcctggaagggggccctgtgcttcacgccgagggaggataagcatggcagggacttctcccaaatctatcctccttgagttcagttttgactgggctcctccctgataacctgtaactgcttcaccctttgcagctcccagaagaaaaaccccatccccagcccagggaggccaggcctgctgtgtttaattgcccatctctgtgcctcttagcccatctggggctgggcagtatctgagtgagtgtccgggcgaggatggggctgcttgggaaggaactcttgtgggtgacaagtggcaggatggggcccgtggacactccccttcctcccctttccgcggaccccctgggtcaggcagtttcggattggctgcagatccccgtctccgtgaggccgcgtctggcgaggtacaggtgctgagaggcgctgggctgtccagaggcggcgcgcgaggccgggtgcgaggtcttgcgtgcgcgccgcgcccacttcctttgctgaggagcctcgcgcagtctccggggcctaccacttcccccgacgcccttcgggcgtcgtcgtgcgggtcccttcccagaagcggcctctcctttccctttcctcgcagagccgctcttcctgcgccctccgagccccaccctcctagctccgtccggagcccttcctccgcgctggctattctcggttgcgccagcctctcccattgtccattcgcaggaaagggctgtctggctggtcgtcggtcgctggtccaggggtgggggacccagaagagagcgccgccggaagcccccgccgcggcagcagcccgcagcccgcagcccgcagcccgcagcctgcagccccagcatcatttttagaaatctcgctttctaagttagtcaacagtgcaacccgacgcccacagggaggggtatgacttcccgactccctcttctaatttcagcagcccccagcggcgtagggggaggggatgtcgggggcaccgcaggtgccacccagagcccctagcagccgcctacccagggcaagggtcccatgcccggctgctgggcaccccaagcagccctgctggagcagttctcagtcccactagtgacccccgctgcctgcctttggctaaggggaggagggtaggctcccacgagcaccccttgggagcagatggtgggccctgaagagccacagcccactggccgcatcacaagaagcctgaattacccgaattccgggtggaaagatcaagcctttctgcagacagagcttcaaggactttccctctgcctgttcctgcctgggtcttgttgtcatttgttctctgtcttacccgcaccccaccccacccccctttttgtttttgttcttcctaaaagcatacagctcaaactggaccaaagtatttttattccgtggatagagaaacagatgttcaggtcaaacccagatccattcacacgcagcagctgcaggccccatgcatcccaggccttcgagagttgaaagatgtcagatgacaggaccccagaccacaagactcagtttcaccagcagaggaattgaaagcccaacagagaggcaaagagactcttctgaggtcaaaaaacaagtgttggaaatccctggggaggctagacgtggtggctcacgcctgtaatcccagtgctttgggaggccaaggtgggagggttgctcgaggctgggagtttgaggttgcagtgagctacgatagtgccactgcactccagcctcggtgatagagcgagaccctgcctctttaagaaaaaaaaggaaagaaagaaaagaaaaaaaaaaaggaaattcctggggaatgactttgggatggattacagagggtcagtgtggtagatggaggcctgaattcactcagatgtggggtccaggacaggctgtgtcctcccagctgtgtaagctccagccagttgcataccggtaggcacatggtgttccacaggataggactcctgtctgccctacacaaatggggccgggggagatgccatgatctctgtgggcatgtttcctggggctgaaaggcaacctgtgctgtaagggggtgcagtgccagggcctgggaacccacctcctggagagaggcctggcttctgccaccgggagaggcagtgggtgaaatacaggcagatctggctatgtaaccctcggacaagctttttcacgttccggagcctcagtgtcctcagttagtcatcgtacaagtatgacattgtaaggtcttgttgttcagtggctggcacgtaggaagggttcagtcactggtcgctcagcattattttcagaagtgaggttgccctgtggtgtccttggagtgacctgcacaatctctgtgcacacagtcttggccattgcttggcaaggactgtggcatgaagacattattggctatgtcactctcagggctgctgtccactctgaggcagggcatggtggcagtcaggccttgggaagttgtaggtgcctcctggcgggacaatctcacgtgcagatgtagctgctagagtagaggtctcgaaccttaaggtccatgctctccagagaggcttcagaaatctgcccttccccaaaatggtatgcaaaatgtggtgtctatggggacagggaccatggtattcatcagactctcaaatgggggcaactaaaagaattaggaacctttgttctgggcatcagcaagtcaggcattaagagccactgtcggagggcatggcaggcggcatggacctcagccctaccctgggtgtgacccactgacctcacaccatgcttagctagccagtaccggccagtcagagacatgagtgcctcccctgggcacccactctgcataagcccaacagagagtcaaccatgcctgaggtctgggtgggccaccaggttcagggtgtgggaaagagacccaggccccagcaggcaggatggggaccagtgagcaagactctttggggactggctcaggacaggggaccgtgaggtggggtggtgataggtgaggggtgcaagtcatgagggcctgggaaaataggggcagaggaaatgaggcagggtccactgtgccagctttgggggctccttgttgtccactggaaagtggcccatgtgagggatgggccaccagatccaatgccctgcctcagtgcgcttggtcaaagagttagaaaattctctctgaataaggcctcagactgtgggtcatggaggtacgactgggggtgttctcaccctctctctcttttgctcagtttctttctttctttggtccttattttatttttcctgtcttgtttatgtttttctcataagccactcaagtcattttgggaaacagagtacaaacggaaagaaagaaaagctcttcatacatagaaaagctgacgagaaagtgggctttcaattgtgggatgttttgtttgttttcctaaaagatattttttgatgacaagtagattatgttcatttaaaaaaattattttgtcacccaaactggagtgcagtagcatagtcacagctgactgcagccttgaccttctgggctcaagtgattcttccaccccagcctcttgagtagctagtaccatgccctgctaagtgtgtgtgtgtgtgtgtgtgtgtgtgtgtgtgtgtgtgtgtgttttgtagaaggggtctttctgtgttgcccaggctggtctaaaacacctgggctcaagcaatcctcccacctcagcctcccaaagtgctgggattgcagacatgagccactgcactcagccctttaacttaaatgtggatgttttgtagaaataaaaaaagaaagtacaagaattgcctgtaattgcattatacaaacaaccacagttagtatttcggtgtgttttcttctagctgtttcttacatgtatagattaatacacctttttttgtatttatactatggcatccagttttctgaattagcatatagtatatataacatggacagttttctcttatactaaaaactctttataagcatttaaaatgtctcagttccacataaacatttagaacctcctctgattttttcattttttatttatttttaaattttaaaaaattgagatggagtcttgctctgttgcccaggctggactgcagtggtgcaatcttggctcactgcaacctctgcctcctgggttcaagcaatcctctcgcctcagcctccagagtagcggggactacaggcacaccccatcacggccggctaatttttgtatttttagtagagatggggtttcaccttttggccaggctggtttcaaactcctaatctcaagtgatccacctgcctcggcctcccaaagtgctgggattacaggcgtgagccactgcacccgacccctcccccgattttacattattgtaaacaaagcattgacacatatttttgtccatagcgttctttgcaaagttaagactatttcctagagcaagattcagaactgagcttggcttcagcccagagcaggctgggccagcagtagtgtgagtgtgagcgtgtgagtgtgagcgtgagtgtgagcgtgagcgtgtgagcgtgagcgtgtgtcagcgtgagtgtgcactttgtgaatgtggcagggctgcatttctcattggccctgcaagagatggcaactgaggcaggcccacgagggagccaagtgactcattatctcagcctgtgggtcttgctgaagggatgggcagagaaaaggcttcccagtgactcatctattgggcctgaaatccctctgaaccttcaggctggccagggcaaagcccttcaggcccagtgaccaaatattcccctgtgtcagggccgcccttgggcccttggagatgaatatgcctgatgaagtgttttctgtcctgcgaggcgggcctgccgggcacacacagccctccgctcagatgtgctttccgacctgcacattagtccagcttggctgagctcggttccaaggcaggctgggctggttttctcctccttaagactcatcagtgaggtcagccagcggataagctaaagttaacttagctattattgcttttttgttaatgaggggagggccagctacaaaaacgccaaaccattcagaaaagttgtacagcacttgggattgaatatgccagaacaaattctgtgttcaggcaaaataaagcaattgacaatgatttaagtcctgactggactcccaagggtcccttgtgcttccctgagatttcgtttcattattttttaaaaaaaatatttttcttatgaagttatgaatcttggaagctgtgtgaagtgcgggcgacctcattggactcatcagagtggcaggagccttcttttgtggatggaagcttgggctgtaattaagctccgagcgggtggaggatgaggcttggggaaattctgtccctgaaaccctagggttggctatggagtgacagctgaatacccatcctacgggactacaggggttgagggaaaaggagcagggattggcttctcttggacgacagttaataggaacaaaccaactccttctcagagacaagattcagaagcagaggctgaatatcctgggtgttcctgaaaccaacaacacttgacttgtgtcttaaaattccacagcccactagcatgttcacagatgctgttcaaagtgacctcctttgacaaagaagcaacgtgcctgcagggttgaaaccacttgaaaaaagtttgttaaagtcgatgtacaaaaatgtttaaaatgctttgaggaaatgagatctgagatgttcctgctatgaagtaggctgtgaacaagtcaaattgaaagtgtggaagcgagatgtgtccataggctgagagatctaagagaaaggttcttttcagcgtgacccatatttgcaacctacctactgtgcaccagtgcagtgcttggctctgggggatagagatctgcagacctggatttcatgcctcaaggagtttagttggggaaagtcctactgtggccagacctagcgtcaacagcagtgaggggggaggaatagattctgattagggagtgcttataaagcccaaaggagcaccatttgggctgagcttgaagagttggcccactacgatgcttagagatgtgggagaagagtctggaaggccaggagactgcctaacgaaggcaggggggtgggtgtgggtggccttcctcagggtgtggctgctggggaggagaaaaagcaagggatgagtagggagcggtggctgttgccaggttgtggaggctttgataggagtttggacttgattctgtagctattagggacccgtggaaggttttcgagtacggaagtaacttgcaaatatcgattaattttttaaatggaaaacaaacatataaatacatgctcattgaaagatatttcagctatattaaagtctatgaagcaaaagatgaaaatgctccccttcccagaagtaaccactgcttcctttcatgttatgtcatccatctgtgtctatgggatcagcacacaaaagtcaaccctagaagtgggaaggtagatggttctgcagacccgctctgtcgctgtgtgtcacatacatgcccctacctttccaatatttaaagcgatatatgaaatagtaccataatctagggaaatgtgtcctgtgtcttctcactgggcttacgttgctctccattgctttatttcagaacatggtttcattggatattcacccgaactgctacagaacaacacgctgcccgattacagcccgggggaatcttttttcactgtctttggggttttcttcccagcggctacaggtattgtaatctgggttcttttttactctcaaattaggggtatacattcttggttccaaaattcagcatcatcattggcctgcaggtactcttggtatgtatatccaactttagatatgggcttagctttgactaaaattttgttattttatctgtttatgtatgtattttgtagagacagggtctcactatgttgcccaggctggtcttgaacccctggcctcaaacataaaaatctattattttaacagagtttactgaaggccttcgatatgatttaatcctcctcactccttatacattgacaccttttgttcatagaaaggatacatatctcatagggctgaacaggacggattcctcagcaggacaagccgctctttccacaggtggaataagtgcatacctggaatcgaaacttcccttccccctacccgtaccagcacatcttctcccagagggcagagaaacactattgtcttttgttttcttgctgtatcaggtgtgagccaaaccagtatcgcgggggtgaggaatgaatctccttaccctcccttccccaagttcctgctctgcagtgactgtagaggagcctcccacagccaaggtccctgtagggctcctgccccatgcttgggtccctggcctggaaggcaataagctaacatgttgaccagatgctccataaaaaataacatttgctagtgactgggcttgtccccagggaacagactcttaatgaagagagaaaagcatttcactcttgatcaagagagtattgatggccagaggatatctgtcttgtctccttgtctctctctcctttccctctgccctcctacatatggccatttccttacttgttgtccccaccccaaatgggatagggacagaaaaagaaggagaagctactagagtgtctaagattgagaagattgtccatacaagtgttagcaaggatgtggagacaccagaaccctcatgcactgctgaagggaatgtaaaatggtgcggtgactttggaaaaaagtttgacagtttcttaaaaattacatccagctattccatgcctagttatctactgcagaggatcaaaagcctgtgttcatatgaagatttgtacatgaacttccaagcagcttaaattttaatagtcccaaactggaaatagcttgaatgttcatcaacaggtgagtgcataaataaactatgatgtagccacacaatagaaaaccactcaataataaaaataaataactggtcaggcgtggtggctcatacctgtaatcctagcactttgggaggccaaggcaggtggatcacctcaggtcaggagttcaagaacagcctggacaacatggtgaaaccccatctctactaaaaatatatataaaaaaaaattagcctggcatggtggtgcatgcctgtagttccagctacttaggaggctgaggcaggagaatcacttgaacctgggaggcagaggttgcagtgagctgagatggcgccactgcactccagcctgggcgacagagcgagactgtgtctctaaacaaagaaaaataactatcgatacacacaacaatataggtgaatctcaaaataattatgctgagtaaaataagtcagaccaaaaaaaaagcaaataaatatgattgtataaatttccatttatatgcagttctagaaaatgcaatctatagtgacagatgcctgggaatgggagtgagaggagcacgaaggagggattactaaagtgcagaaggaaactttggggggatgaaaaatatattcctggcctggcgtggtggcttgtgcctataatcctaacactttgggaggccaagacaggaggatccctcaagctcaggagtttgagaccagcctgggcaacatagtgagaccctgtggtctctacaaaacatgattaaaaagttagctttggccgggcgcagtggctcatgcctacaatctcagaactttgggaggctgaggcagccggatcacctgaggtcaggagtttgagaccagcctggccaacatggtgaaaccccatctctactaaaaatacaaaaattagctgggcgtggtggcatgcacctgtagtcccagcaactcgggaggctgaggcaggagaatcacttgtagtgattctcagctacttaggggtgggaggtgggtgacaggaggactgcttgatcctgggaggtcaaggctacagtgagctttggtcacgccatgatactccagcctgagtgacagagtgagaccctgtatcaaaaaaaaaattgtgtgtgtgtgtgtgcgtgtgtgtgtgtgtgtgtattcctgattatagtgatggttttatgggtatattcatatagcaaagcttttcaagttgttacactttaaacatgtacatcttatagaatgttagttatacctcaataaagctgttaaaatgaaaaagacaataactttaatcatctttaattgattttcctcaatcccacttttccttatagcaatagcctttccctctcctcttcaaagccaaacaacatggctccccatgtccattcttgtatcccctactcaactctcccagtctctcctttgggaattgcaagcctgtctctgcaatgacatggctctttcaccagtgacttccttgttactaaatgcagcgtgcatttttagtctctcactttatttaactctcagcaacaacccacttccccttgcatttctcttgccttccacgatgcaggcttctcagctccctcctactctctgacttgcctttataggtgcatcccctccacctgcctgtccaatgttggggatcttcaagctattcctaggccctcacatctctttctcaactattttccttggagtctcatccatgcttattgttgaataaccaccctcaaaactggtgactccaaaatttacacttccagcccagacttctcttccaagcttcacatcatacattcagttgtccatgtgacatcttctcttgggtatcttggaccgaacaagtttgaaccaaacccatctcacctacccctcaacttgtcctcctcctgtactcctgatgtcagtaaatggcacctccacccagccaaatgcttatgccagtgatcagacctccctctttctttccagtgccctctaagtcttgtcaattttacctcctaagagttgctagattctctctacttctccttatgtctaccacctgaccactctggtcccagcttcatctatcacttgtatcactgtgtcagcttcctgcctgacttttcttaaggctcggccatggaaatgagcctggaactagggcttggaagtggcaggtcgaatcctggtctacaaatccagatttgccagaaatagtgcgtcgctttcatttttataaaacaaaaagagtcagtctccgactctaagccttcattctgccaggatggcttaaaagtaagagcagtaattcagcatgcctccacctgctcctgccatgctctgcaccagctccaggggcttagggttttaaacagtacccagacatgtttggggggctctgcaattccttatctgtaaacagaaccaggccttcccattgtcctgtccatagggcctttcaggtttgtgctgcctctgagccacgttcaaggactggaaatctgagattgggaaccctatgcttagggtctatgtactccccaaacctttccttctgggggtcttaccggctccccaccagtactgccagggagttggcggggtgggggttccaggtcctcatttccccagaacctgggaacagcctctctctctccctgcccccgactccagaaccaatcttctgtcaaatatggggacactcctgtccagggccagctttctgggtgtgtgacctatgcatttacactgtccccaccctgagaagggactcatgcttgttttaaggctttgctgttactaaaattcttgggcccggcctggtggctcacgcctgtaatcccagcactttgggaggatgacgtgggcagatcacttgagcccgggagtttgagaccagcctggccaacatggtgaaaccccatctctactaaaaatacaaaaattagccaggtgtggtagggcatgcctgtaatcccagctactcagggaggctgaggcagaaaaatcacttgaacctgggaggcagagattgcagtgcgctgaaatcgtgccactgcactccagcctgggtgacagagcaagactctgtctcaaaaaataaaaaaaaaatcttaataatttttgattctgcatttgtatttttatgtggccccacaaactgtgtgatagtttttctccttgtcgcctcatgttttccccagcgattctgctgtttcttttctgtttccctccaaaatcttctaaggacctaggcttttgagaaacagaagccaaaacagtgcacaggcaaattctgcttcctctctgcctcttgtctcccacaagacaagagaatataggtcagcttcctcctgaatggacagaaaaggaaaagggaaaaacagagggaattaaacaaagttaacatctgatgatgtttcccagcctctcttcctctttccttccacacacaaattgaaaaccatctgagtgttctctggagcctggcagtgtccccactgagtgaagacccctgggccaagataccaggttagcatttaccctagaggcagggcagaaggcctctttgcctggtcacactgtgcagggaatgtctcgggcgtcctcaggtgcaccaggggtttgtcttggcaatgtggccctgatgtgcccctccactctgctcccacggctggctttcctaagagagaggatgcctggtgtgagtgggggaagggggcggtgagcctcccctccagcttctccctccaggcaggagttagcagcagcctgaggcttgaaggtgccacccagtagcccagagtatgagctggactcacatgtgagatcagctagtccaactcccaagcttttgtctttttaatccgtatttctttttctttttctttttctttttcttttttttaagacagggtctcgctctgtcacccaggctggagtgcagtggtgtgatctcagctcactacaacctctgcctctctggttgaagagattctcgtgcttcagcttcctgagtagctgggattacaacagcatgccactatgcctggctaatttttgtatttttagtagagatggagttttgccatgttgtccagggtggtctcgaactcttgacctcaagtgatccacccgcctcgacctcccacctccaaaagtgctgggattagaggcatgagccaccatgcctggcctatattcacttttgataatgatactaaaagcctcacagacactggacattctggctcagagatggagtgtcgttgtccttccgctgaaaaagctatagctacctaagacgatgagtcaagatttattttctgtgatttaaattatgagtattattttgaaagctttcaaatgtaaaatgataatagcgcatagattgtaactacacaggcctctctgccccacccctcttaggggacctgctttcctgtccctctcactctcattggcccaactgaggtgaagaatcattgatctgatcctttattttaccagctggggaggaggggtgcagaggagcttatgaaggacccgacagaggtcacgaagctgattagtggccagagttgggccgtcaccctgctgtggagagctgccctccgtgtctctgtctctgtttttcagggccccaattgtaaacacaataggcaggacgaatggtttgtatgacttgctgtctcctggcagatgttcggttaagctatgaaaagcatggatgattggcagtttccatggtgatagatttgctaaggattagctccgagtgagtcatggctggggttccctccaacaccatcctcttctggaacaagagaacctccagactgtggcgaggagagagttttgatgaacaaacccttctgtccccagccccccatcctcctgacagagatatgatggttaagttacttcagatattttatcccaagggcaggcagcttcctgggaagagcggctggagattcggtctggtgctcctctggatttaggaagctgtccccctgccccctcactgcactcttctccattacaccctgtgctggtggctgcaggggtggagtggggggagcttggagtggatgctgtacttgctttgcttcttaaagtgcattccttctcaaagtgcattccttctccaagctccactaccaaactttccctgagaagcagacatctcctctccagggtttcacacataccatgtggatgcagccactccagggatccaggaacacgattcacagaggaactaggaaatggaaattcactgaaaagaatatcagtcatgtgaagtcctgtaacccttgttcccagattctaaactcttactggaagggataagggcctctttggccacagccaacacatgggcctgtggttgaccacacccagcacgaaaaaatgtggtaggaaacctacagcctttactgaaatgtccacagtcaccttccttttcaagaacccagctatttctgtgatgccctttgacctccctgggcctgactcctctctcctgctcatgtacacaccctgggaagctctgggaatttgctgggccctccaattggctggctgtctccaggcccctcagcccggctgttagtgctcacccctcctctggcctacttcccccattcccccctcctaggcgtcccctgggtctcctcacaagttatgtgtcttgtgagtgagaggacaagaacctgctggatcagaatggggttcccatgtttaaggactagagagccccaagtagggacagtctgaagatgggggctcactccactcccttcattctgatggacttatgggcagaaacaggagacaagaaggaagctttggctgggtgcagtggctcaagcctgtagtcccagctactcgggaggctgaggcaggaaaattgcttgaacctgggaggcagaggttgcggtgagccaagattgcatcactgcactccagcctgggtgtcagagtgagaccctgtcttaaaaaaaaaaaaaaaaaaggccgggcgcggtggctcacgcctgtaatcccagcactttgggaggccgaggcgggcggatcacgaggtcaggagatcgagaccatcccggctaaaacggtgaaaccccgtctctactaaaaatacaaaaaattagccgggcgtagtggcgggcgcctgtagtcccagctacttgggaggctgaggcaggagaatggcgtgaacccgggaggcggagcttgcagtgagccgagatcccgccactgcactccagcctgggcgacagagcgagactccgtctcaaaaaaaaaaaaaaataaaaataagcttaggccgggcacggtggctcatgcctgtaatcccagcactttgggaggttggcgggcagatcacgaggtcaagagatcaagaccatcctggccaacatggtgaaaccctgtctctactaaaaatacaaaaattagccaagcatggtacatgcctgtagtcccagctactctggaggctgaggcaggagaatcacttgagcccgggaggtggaggttgcagtgagccaagatcacaccactgcactccaatctggcgacaaagtgatattccgtctcaaaaaaaaaagttttataattattatacatgtctattttttgtaattttatttatggaattaatttataattgttttatcaaaataattatacatatcaacagtttttatcaaaacaattataaatatcgacaatacttattatcattacaataacctattatgtcagccactaagcactttatgtatagttttctgtttaaacttctccacagcctgactggttccatcagacacagggctgccatgaagtggttgaagcctgggcttcaaggtccctcacttgcgtgagctccttccaaagccttgttcctaattttatattcataattttgtactttcaaaaaaatttcaggccgcatggaacctagatcctcccacaggttctattatttacccattttacagatgaggaaacaaagatttagagaggttatttccccaacatctcccagccagtaagcggtaaaccccgttgcttcccataaagagagaacacataatgttggtgccgcccctcatccagaagccaataaatcttgcctgggtcctggagttggaaagttgcattatttgacactgtctgtcccagcagcatctctaaaacattgagagggagggaaactcacaagttttgctccaagaacagagcaagacaggtttagagatttctgcaggaacagctgaacaaaccaaccaacaagccaggtatgggaaaggaatggggtttggaaatcagaaggaaggtaaagagaggcagaccagtctttaggaatctgagggatttctgagtaaggagcagagcccatctctcctgggtgagcatttatttagcacctacaaggtgccagccactgtgctaggtgcttatgaatatctgttccaacttcaccacagtcctgcaaagcaaacagtataatccccatttacaggtgaggaaagcagggctcagagccacattgccaccaaacagtaatagatcccttttttcagttaaaaaaaaaaaggcagcagatgagacttgggcacgttagtgcatgtgtagtctaccttcataagaaagaaaaataaagttatgaacttagaaaacaggcagcagagaaacgattaagctataaatggaaagaaaaagttgaagagtttctgaggacacagatttggattgaaaagtccccaggaggaatcttggaagttccttgagaaagagtaagtagtcctttatgaactaacaggaacctgaaaagcctagaaaaactgttgggattttcttttcctactaatcttcattttcaggaacagaaaagggaattggggtgggaaacgggcttgtggtaattggtgataagtaaggactttgatcaatgtgtgccactgggtgattcagggggcagggaagaaaagagatgacctacccacttgcaaatgttggtaagtggtcattgacatttacactggttattttacccaaggatatatttttgagagctataaggggttgattcattttctggccctctatgtcttctgtgagaccagacactggaagtaggcgctgaccccaagtcccctgttcacctggtgccatccatcgaaactgtaggtgtgatgtcaatgtctaggtggctacggatgccactcgaggtgtagcctcataaacctaagctggtcaagtgatggctgacaccttcagacttgcatatcaaaactgagaccataaatatgtgcctgaaggccccaggactggggtggaagaccaagccagaaggctttccccatattaaggaagctgtttacctaagtcacatggtaacagtgtgcagaccagacagatcatcgttgtgatgcagggagaaaaaatgtttttgggtaaagcaattaactgcttcctggaattggcgtttaaaacccagaaatgccatcaatccagcactgtctagagattaggagctggtgatgcaagtgcctgtggcgaaaccaatgcatcgcgccgattataactgataagctcagccttcttgtgggtatgtaaccccacattaatcatgcaattactatttcagaaggggaaatctacaaagagcaggggtgttaggaagaaatggagaggctatgtgatgtagtggaaacaacactgacttggaatcaggaaacttgagggttagtgctggttctgttagcaattagcttggaacacttgaatcaaatggcttcccttctttgggcctccgttgcctcatctgtgaaataaaaggttggagtagatgatcgctagggtatcacctagatttaagaatcatgattctaaataactgttttattttttatttttattgtttttgagacggagtcttgctctgtcacccaggctgaagtgcagtggcgtgatcttggctcattgcaacctacgcctcccagattcaagcgattttcctgcctcagcctcccaagtagctgggactacaggtgcgtgccaccatgcctggctaattttttgtatttttagtagacgcggggtttcacaatgttggtcaggctggtctccaactcctgacctcaggtgatccacccaccttagcctcccaaagtgctgggattacaggcatgagccactccatccagtcctaaatagccaaatttaaacaatttttggaagcccgccaagaaaagtgtcgagaccaaatagtaattataaaatgggcactgagtgtttcccaaactgtgctctgtggaactttaataatgaagaaagttttcatttctttaaaaaaaaaaaaaagggttcaatgccaaataagttttgcgaaactgtgtgctgtatttctcttcttagagatggacaatgaatattagcatattataggcactacaatagcccagcaccgaaaacctctctaattaaggttttcccaaccttattttcaattgtggaactttttaaaaaatgtaatatttgtaaaacacctgggcactaatgctctgggaaatagtatttgttctattacgccaaccctaaatgtaactctaaccttaatgatagtgttttaaaattgcactggatgcaaaaagaaagcaaactagagaatttctgtgacacttaacacagacaggaaaaaaatactaagtcaaaataatttttctagctctaactagtgaatgagacatttataattcaccgaagctagggaacattgcccaagaattgtgtggtaacacagaggtagaattttggaaatgacagccacagtgtgtgagcccctataacaaatgtgcaggccaggcacggtggctcatgcctgtaatcccagcactttggaggccgaggcagtcagatcacctgatgttaggagttcgagaccagcctggccaacatggtgaaaccccatctctactaaaaatacaaaaattagccagacatggtggaaggtgcctataatcccaactacttgggaggctgaggcaggagaatcacttgaacccaggaggcggaggttgcagtgagccaagatcacactattgcactccagcttgggcgacagagggaaactccatctcaaaaaaaaaatccaaacaaacaaacaaacacaaacaaatgtacactttgctgtgggaaccacccacattgccccagcaggaatcacccgtgagacttcttgtctgcagtccgagttgcctgcatctccttgtttctggctctttgtgtctgtgatataatctactttctggcttctctgttttgtctcaaaagccaagtttctggccatatctgggcctggctcattcctgtgtcacggtcagtcctttctcctcccactgagcagcatcctaatgtactgcacaacaggcagcctacacagaacctgggggaggagtaaagggggtttgttatggagacagtaagtgtttggaagcaggaagcaattaggatgaatcagtcattttcctccacagaagcatatattgctgtggtgttctcaggggtcttcatgggttaacttctgtataaaagatctgaaggaaggtgtacaaaatgacctgacaaactgtaggaggtacaacaatggcgaggaataaagagcactatgtcatgatatggtttggctctgtgtccccactcaaatctcaccttgaattgtaacaattcctatgtgtcgtgggaggaacctggtgggagggaattgaatcatgagggtgagtctctttcccgtgctgttcccatggcagtgaataagtctcacgagatctgatggttttataaataggagttcccctacacaagctctctctcgcctgctgccatgcaagacgtgactttgcttctccttccccttctgccatgatttgtgatgcctcctcagccatgtggaactgtgagtcaattaaagctgccttagcctcctgagtagctgggatgtgtgtaccaccatgcccggataacttttttattttatgaagagatgctgtgtggtccaagctggtctcaaacttgtggcctgaagggatccttcttttttttttttttttttttcctgagatggatctctgtcacccaggctggagtgagtggcatgatatccgctcactgcaacttctacctcctgggctcaagtgatcctcccaccacagcctcccaagtagctgggattataggtgtgcaccaccacacctggctactttttgcatttttagtagagatggagtttcaccatgttagtcaggctggtctcgaactcctgacctcagatgatctgcctgcctcggcctcccaaaatgctgggattaaaggtgtgagccattacacccagcctcaagtgatccttctgccttggcctcccaaagcgctgggattacaggcatgaaccaccacacctggcccttaaatctgttgcatttttaattttaatgatcatatttttaatttccaaaagttctttgttgttcttggattttttttcatagcaccttgttttatagatagaatattcttcttggatgtacctggagctactaattagtgttttcttccaaattctctctgtatcctgatttatgtttcttccagcctgggttgttctgtttctatttatgcgtgtatttgtttatttgttgctggttttcatcacacattgggtgatcttggttgtgggcatggatttccccagctgtcgcatggttaggtctgtctccctgctggggccctaccttgatgagaagtttgtgagtgctgttgattcttgagcagggctttatttggggtgcaaacgtccagccctggttttcctcagtgtattgagatcttgtagagaagcattccgaggctttctttccttctcttttcctcggtattatattctccattttctatgttctatgttccagacattcatgggaacctttcatctacttagggtcctcctcccaacttctctttgcttatgggaatttatctacttttcccctttactatgctcttaataggatcttggagaggagggaatgagaggaaagaaaatgtgcctaacaggccgttaaaaacaaaaacaaaaacaacaacaacaaaaccttaaaagttttcacgtttcaaaatgatcattgtagaaaattgagaaaatataaacagtcaaataaaaatgacctgttcttttatcacccagaaataacattgttaatgttttaaaacatgttccagttcctttttctatatatttttataataatgggatcataccatgtgttctgttttctaatatgcgtcttaaaactaagcaaaagcttctaaacatctttccatgtcacaacatatcccttacaatattctgagacctagtatttattgaaagctatatcatcacttatttaaccaaccctctatttttagacattaggttgtttctaatttccactattctaaacaagcgtttataaacacgctgggctaaatcttccctcatagccttgactacctacgatgggtaaagtcctcatagtggagttgctgggtgacagtatatgcaccccatccgcgggccagcattcagggttctctctgaaatacacccccctactttcactttctggttccaaactgtcacttcactgcacttcgcttggattctgtgaagcattgtagcagaggcattaagagcataattttcagagtcagacagaccagggttgaatcttagctttgctgcttattaaatgtgtgaccttaggctgttttaattaacctctttgaacacttttccataagatgaggaaataattctacctttctgatgaggttgttatgagaattaaacaggataaaaaaatgcatgtaaagcacttgacacaggcccaggcagtttgaaagtgttcacaaatcatggagttagattcattcccatccctaagcccattcaaatccctctttcaaggccacattcaagatacaaccccctccacgggtctttcctgaccagggcagcccatcacactgagttgttatggcacttgtgggctggatcctcatccgatgttcagaacaccctgtcttgttgctttcatatatttgtttgtatgggaagaggcaacatccccacttcaccatgcagcactgtgctgtgggtccctcatggattaattcattttcattagtgttcttgcagaagagaggtgatgatgaaaaggagcttgtgactccatgtcagtggcatcaggattggtttttttggagtttatttcaagccctttggtagctcaggggcttggaggatggtacctgaccccgaggacacaggaagctcccatggaatcagcaggcagcagaggcagggaaagctgctgagcaggaggctgccagacctttgtaatgctgagcctctccagggcattgtcccagctcagcaggcagcgcaggacctctgtgtgccttgcaagccgctttcctcccccctggttgctttgcgctgagcggtaggatgcttttggagctgggagggctttcctcctgagcctcctccaacccacaaaggtgcctttcacgccacagggatgcctccctagttgccaggggagattgaaaagcagcctatgcgcagagctgcagctggagggcttgcggtgggacagcttccaggagagggtcccgcaggagaggaaggggcagccctggggaaggcgatgcgtggaggaggctgctcaccccattccccatctgggtgtctttcaggagtcatggccggcttcaacatggggggcgacctcagggagcctgccgccagcattcccctgggctccctggcagctgttggcatctcgtaagttcccctcatggcaatcagtctgagctagagagtgggagagaaaaccccaggcagaagagggattgccccttttgttctgagagtgccccgactgtgaccaatctatttcatattccgatccttcttttaacactcggtgggctggaaaattcacgtctggtgggttcagacactgccctttcatgcgccctgcctgggaatgctgccgaggaggagtgtcgggacccagatcacagatcgaatcctttctttcctttcctcggcctcccgcccccgtccctcccccacccccattttgaacttggggatttttttaaccaccgagtttccaggatcactggagggagcataaagatgaagagttttgcaatcagacgaattggggctgcatctcagctctgccgctgattggctgcatgactctggacaatttactgagttctctgagcctccatttcctttcttgtgaaatggggataatgacactgtatgtgcttcctagattgcggcggggagagaaggcacacagtggaagctcagcacccagctcttcttcttcccccagtgagcctcccctccagctcccccaggccgtcaggcctctggggttttagttcacactgtgccacccacacaagcaggctgggtaaccttgggtctatttctgaccttttagaatattgtttctctctgtaccacaggaagaagcttctctgcccttcattgggtaggtgtgaagaggcaaagagatcagagaccagaaacaatgacttgagaagttaaaagggcctgtgttattctaaccacagtatttagaaaatattaatgtatctgtttcacaaacactgaatttgttcttagcttactgcagtgaaaccattgctatcagcctggcgtacagcatcagggtattttgtgcaataacattgggaagaaaatgaagacaacagagatagagttgagtgttgggaaggaaataaaagaaagaggcttctgaatgaggaccctgtcttgtttctggccccagctgggaggttccaggaggaacccttggcccatcctctgattacccagatgggaatgaggagaccacaggaacctgggtcttgttcaaggttacagggcatcttggggacagagccaggcctctgctctctgccttttgactttagtttccctctttattatctgatccaaagataacagaccagcaggacttagaggcccgaaggatcatcagcttgttcttttgctggaggaggctggggtgtgaggctgcggggcaaccctggcctgaatcctggcaacctagaggcaactgggcctcccacttccctactcggaatgccctttgtatgtttttcttttttaatataagaaagagaaaaaaaactgctcacttcagcagtacatacactaaaattaaaacaatacagagattagcatggcccatgtgcaaggatgacatgcaaattcgtgaagtgttccatatttttatatatatttaaaagtaaaaaaagaaacaaaacaatggtaccccttttttggtaagaaatatgccagaagagaaatagtacaaaaagtgtcctcccaagccagctggggaagcttcatgactggcctttctctcattctgatacaagttccctttggaaacagaaggttgagtgagggaattggatggggctgggtgaggtgagtcgggggcagctctgttctgctcttgggttttgcaggtggtttctgtacatcatcttcgtcttcctcctgggcgccatctgcactcgagaggcccttcgctatgacttcctgatagcggaaaaggtgagtgaggcctgcgctactccaagggctcagtctgccggagtcatttatttgttctcaccaacaaatggccaccttccccttgcagtactgtctgggaatccatatagtctttttaaaatttaattaatttattttttgagacagggtctcactctgttgcctaggctggagtgcagtgttgcaatctcagcccactgtagcctcaaccttccaggctcaagcaattctcctgtctcagaccgccaggtagctgggactacaggggcatgccctcatgctgggctaattttttttttaattttttggtagagatgaggtctcaccatgttgcccaggctggtcttaaactcctggcctcaagtgatcctcccaccttgacctcccaaagtgctgagattacaggcgtgagccaccacgcccagccttcatatagtctctagcccaggactgaagtgttgggttgtggtggggaagagacatgatggaaaaggtacaggccctgcttagggatttctagaaacagataatgatgcccagagggattcacaaatatgaggggctagataatggggacatctcttcctgtcaaaaatcaggacagaaacagaagaatctgctcaccccaaattcccagttaagcaagtgcctcacttttgctaatagcttcaccttccacaatgaatcaaatgtgctgctcagaagtggcaagtggagaaggaggctggacaggcagacgtggagggagcgggcggaagcccagtgccagggtgagggccgaggccctccttgtccctcaggtccttgacccctttggctttcctgagagtctcagacattctgggttgatttggctgcaacatctttgtttctagagtctgcaccctgccaggagaagattaatgaattcctggcattggctggaggtcatctgacatcaaggacatttatttggcatcctagaagccacatgaataagatttccagatatttttctggaaatccccaaaaactcccaccctcctttaagttcttggagaaaaagtagaccctgagattcccatcatttttcagagaaatgtagttggttagggagtttttctgtgaactcctgagtatcactgcttatattttatgtattttaaattttaatattttaattttaactttttaaagacagggtctcactctgtcacccaggctagagtacagtgacgtgaacatggctcattacagcctcaacttccagggctcaggtgattctcccacctcagcctcccaagtagccaggactacagacatgcaccaccacacccagctatttttttttttttttcaattttttgtagagacggggtttcgccatgttgctcaggctggtctcaaactcctggctttgagtgatcctcccacctcagccttccaaagtgctgggattacaggcatgagcccctatattttaggatagactaccattttctcttggtgtgaggctttgcaaagcagccctgctggtcttaatggagggccagtgcctggggcaacctggggcaggaaactctgaattttcttttgagagatatgtttgagcttggttttcacattagcacaggtttctttttaaggcttgtaggcacccatgcaaaggtgattatttgttttcaagggtcttgcccttagtataaaagcagattttttggaaggcagtacagttcagttagtgagagaactgatacccactttccagtacccaaggtcacagacccccaggtggcaaggtttgctctcagggcaggaatctatagccctcatttgtatctacatgcatgcttccgtctgaagtttcactcccaagggcctgttctctagttgtggaatgaaaagcttggctgcattacaggaattgaaggcctcagggagcagactgggtgaggctggtttgaccgagggaaatgcttcctgctcatctgcagcttgccagtggctgaccagctctgcctgcttctaaagttcctttctcatgctttccttcacagaggtccttccaccctttagggactctgatctgattatcccctgggccgcagctctcctccctcctctccttcccctgtttttcaagggaatgatcagagtaggtatatgggagggcaggcagctttgtatctaaggaaggccacaaacagcagtagggtaaaaacagcccagagacagcacatgagagcctttgtgggtggaaatcccacacctaatgataggcacacaaaccgggggagcctcctgtggaatgccacctgtcccgacaatgagcaggtaggcaagcacttagccagctgggggcacctgcttcatcaggcccagcaatgacacttgggaatgtaattatgcacacactgggatgaaatgtggagatttagttttcggagaggacaagagaccattccctggaagagaccattgtaaagcctataaaggaacaaagctactgctcttggttctcagtagaaatgggcaggtgcagcaagtcagtaagcagtgatggaaccgaccctgatgacttcaaaatagcagcacctgggtcttctggttcccactacccaccccctaaaggggaccacacaggagtttcctcccacaccttttctgctttcctgctcactggtgtcgctccttgggactgactccgctgcagtagcaggtaccgtgctcaggcagtagattgggccacagatgtttttactggcagtacctggagaatgggagggtgcaacctacactggttgggaggtgcaagggcggagtttctttactttggtcacttgacacaaccggccaccctgataacctgttcacctcagcttcctgtcttacttgtggcttcagttctgagccggcgcatctctgagctttcctgggcctgaaaaaaggcctcttctgtatgtgtgccccgcgcatcacctctggacactgagacagggtgggtctctgacatactctccttggcgctcgttcacaagcagctcccaaatgcactcctctctctcgggggctttctgccagaacaattatcttcaatggctgcaggctgccctggattcctttctactgatctgcagctggtcagttaatctgtttctttctgggtttcctgcagcttctctgatctatttctaattatttggcttctcaactcacagtttctctaagaagcgtctttttactttttttttttgtttgtttttcttgagatggagttttgctcttgttgcccaagctggagtgcaatggcatgatctcagctcactgcaacctccacctcccaggttcaagtgattctcctgcttcagccccccaagtagctgggattacaggcacatgccaccatgcctggctaattttttgtatttttagtagaaacggggtttcaccatgttagccaggctggtctcgaactcctgacctcaggtgatccacccgcctcagtctcccaaagtgctgggattacagggatgagctactgcgcccggcgacgtctttttactttttatccccactgcagaggaactttctcccagctctcaggtgtatgtgtgttcttaaacatcttgtatacagtggtggctctgagataacccatgaaagcatgtagtaggtgctaattataatacattttacctggcacatagcagatgctaactaaattttaactcccttccacactccttatgggcatacccttacagatcaagacatttattttaggaacacattttctccccacaaatccaccatatttaatagaaaagccagaacagtcaatctcagtattatttagttagaaaaggaattgtataaacagtgttagttggggtgaaattaaatagattaaatgtttcagaataaactcgtatacagtccaggaaacagatgtttattacaaataaaaaaggccaaataccttaggagccctggggcttgctaactagcaaaataagagcaatctaagaaggaaaaatatcccaaaagtattattgttaagactagggaatctgggtggttcatgcctgtaatcccagcactttgggagggcgtggcgggcagatcacttgaggtcaggagttcaagaccagcctggccaacacagtgaaacccccatctccaccaaaaaatacaaaaatatgccaggcgtggtggtgcatgcctgtagttccagctactcgagaggctgaggcaagagaatcgctagaacccaggaggcggaggttgcagtgagccaagatcgtgccactgcactccagcctgggcaacagtgcgaaactctgtctcaaaaatacaaaacccccctaaaactgggtaatcccacagagcaaactctgattcctggatttaatagtcatggtttcacatattcaagagggaccttggaagctcatgacacaagctgtacagggaagatggggatgggacagcgctggtaactggggagtgagcctagtgggccactcagcacctgggagtgggccagcctgagtgtcctctgccctccatcgtggacacagtcctgcctctcaggaagggaagcagactaggtctcattatggaaaatggctctcaagtgagaggtaaaacttgactgaaagttgagatgttgatcaattcatggagcgtggagatgttaggaaactcatgactctagaaatgagatgtgggaggaaaaaaagcgttgttgagactcggccttattaatacacttgggattgtaaaggtttttagggtgcactccccagttatgtcaggggtcaccgcaattagatgagacagaatgagcgccttgcaaatgactttaaatccagtcctttgagagaagagagcagccaatgaatgagcagagtccctcaatgaccgaagctcaagtgggagctgggagaaaatactaagagcagagagatggaagtaattattttcatcagtagttactgaagaaagaaatcagggtagctcacaccccatgtaatattttggaaagagctctgggggtggggggatggctcaaacaggtgtatgccagaaaagaatcactgtttatttaaaaagagctgttgacacacctctgctcaaataaattctcacttccacctccactggcacatttagcaaattttcagtctgatatgaatagagaaaacaattaagttctgtgagggctgggagcagagctacgtgtctataagccttgctctgcctagcaccatgccaggaacataatctgtcgtcaggaaatgcttcctgaatggatggatggatggatggatgacaaatgacagaaagagataggatttaggcaggagagagatggaatgaagtttttataatttatctagatgtggagaccaacatttcatatattactcagaaaatagactgaataatagttttatatttttttaaagtggtaagtgaacagatcattctacacaattgacaaactggacataggttgctatacttggccctgtctgaccccagctcctagggctctggaggaatcccagggtgtgtctgtgggaaggctggccaaagatggaagccaccatatcgtgtactcatggtgccagaggctcaacccagttcctgaggtcagtccaacactaggaggatgccaggctggggcattcccactcattcctgctgtgagtaaataggctttaaatgaaaaagagttgtaaaaattcaaatatacataaccttttaggtaagaagcagtgaaatttctgcaaggagatgccatgcctgactctcccaaagaattttttgaggggagaatgcagtggctacaatgtgttgtgcccaggggttctccacatcggctgcacattagaatcacctggagggctttcttaaactcaaccacgtctgtgtctcactctacactaattaaatcagaatctctgggtgattcttatgtttaggcagagtggagaactattgacttaaattttcaaaaggctctttcttgataaaatttcatcatagaatctggtttttaaaaaccagtcaacataggctgcatttggtagagaagacggaaataaaggttatcgatgaatgatcacatctcagaatggattgaggattgataatggatccagcttatctaacagttttgtaaggcacctagggcacgattacagcaaagtcatgaagctgcatgaattcagctgttgagctctgcttgccagattctgcatgaggtgctgggggaagggggccaggaagcatgatacaattctacctgtgaggtgctcagggtgctggcaggataagccatgagcataactaactatcccacaggatggaaagtaacaaaatgccatcagatcacataaagtgatggaaacactagatgacattgatttcctgtagtaataaaatggtgagtggggtgggcaggacaaacccaagaaatctgcgatattgaaaaaagagacaggtgagattctttggggataagcatgagatgataaagaaaggaatcaacagtgaattaaagacaaggtgggctccgtagtggaccttagtcttgttcatcaagcatctgaccttcctgaccatttgggggttattccaccaatggtcttgaagggagagagtacccccattgtgtgtaatagaaacccaatggaccagacctcttttgcctgtccctttgcagccctggtagggcacatgacctacactaggccattgcgtgctcccattgtaaccaatgaagtaaagataaagagctggtgagaatccatccacagggcagcaggggtgttggcagcatcctggccaagctgttcctggggaagaggctgggtgtgcctccaggcttggtcctgcccttttctgagcctcatcctttagcctcctgatgattctacaaaccaccagtgtcctacaaatatattcttttttaaagaaattttttttttccaatcaactgtcctgactgattcatccatcagtcaaattattccagtgataatttatgagccaggaaagaagtctagccagtggcttgtgttcaatgtagcttggtgacacgaatccggtgctttgctgatgcaaggaagtaaaaaatggggtgaggagagccttcatcaagaagggtgtaagtgacaaagctgaatattaactctaacctatctgtaagcattggacgcatgagtacttggaatgtacagttctggccattgtgcctaaaggaaagtagaatggaaagggcacctcaaataagaaaacaaagatgctttcctgtgggtacagatgagatctggcccaggagggtgaattcatgagtgacagcttgggatctggctgtgcatggcaagcagtcatgcagccacccagccccttagcacttttagccctgagttagctagtaacatcttggaccctgatcttttgcaagttgacaccaagaagaacagctgtgccctcttattctatctgttggtgccttgtgggtcatggatctcattcattcattcgtcatttatatttctgtgttgggcaccaagaattctagggtaaacaagacagaaggcctgcttaaatgaagcctccagattagtggagggggcaccacgataggtgctatcctaacatcatgttggggatgctatggagcactgagaagcaactactgtagtcagggaagaggggatggcctcacagtggaggtgaggttggtgctgagttttgtagcacaattaggagtttaacagacaatgagtagattagggcgtgtgaacagaggcttcctacagacagaaaaatcatgctgatcagactttcagtgtgcagggtgtggagctaaagaggtcacagaccatgaagagccttatatgtcaggacagggggagattttgatatatctgcaacggagacattgtggtcagatttgagtttagagaacagaggcttaggggatgattcagagtgaatcatctgaagatttaaactcatctttaagggtgagcttaaaggcaagaggccaatgagcattgtggttggccagtttgttctcaaagtgtggtctctgggaacgcatgcggaatccagatttctaggccccaccccaagcctactgaaccaggaactctgaggaggggcccagaagtttgtgtttagcaagccctgcagctgagtctggcagacgcttcatttgaggaccactgtgcaatccatatgaaatgtggtggtggattcagctgaaaccatggaatgaatgggggcgaggctggggatgtggaaactgtatcccagggatcagatctagacgactcagtggatgattgcatggggtgcaggtgggtgggtgctgggggggtagaaaggcacaggagcaggttctggcactggcgaatgaaaccgcttctcacacaggtatccctcatgggcttcctgttccttttgggcttatacatctcgtccctggcttcctgcatgggaggactttatggagctccccgcatcctgcagtgcattgcccaggagaaagtgatccctgcacttgcctgtctgggacaaggggtgagtaatcctctttttttggtttgttttttgaaacatgttttgctgctaacctcactgttggcccatcaattggttaagcttttctgatcagagcctctggtcaatttctttggggtgacacagaaaataatgcagaggtcatttctttcagccctgtcctctggctggcttaggttagggctaagtagatgaagcatcttaaatgtcccagccacccagccccttagcacttttaggactgggttagctaaccagtcctagtaccatcttggaccctgagcagcatgaaaatgcagtgccccatcctttaatgaaaatgaattcaggatcctccaggtttagcatagaagaaagcgtgttttggtcaggaggcgagctggtccttgcagctctaactctgcccttgagtttcaaccgccccttgggggttgctgtttgatgatttcctacacctctggcgtctacacttcctgttaaccatcatgaaccaaaccttaactgatacataaagggcagctcagttgagacatggctggaatgattaaaatagacattcctaaagtccaggggaggaccaaagagacataaacagagaatcccatttcccactaatatggtttgcaagctagagttcatttttgtcttgttggggtaccccagagggcctccccagccgcttccaattttcagcctctctctggtttagggaacacatcgttgcaacttatccttgatttcttcctttatcttcctccaaaaatgcagtttggttttggacatagtccgtttgagatcctattagacgttcactggaaatgttgagtaggcagttggatatgtaaacctgggtttcaggggaatgttttaggctggagattcaaatttggaagttgtcagtataatgccggtattcaaagccgtgagcctagttgagctcaccaagggagggagtacagatagagatctgaggatggagcctggggctgctttaaatgtggagttcagagacgtgaaaagccagccacagaaaccaagaaggagcagccagtgaagagggaggccaatcaggagaagtaaggtgaagaaagtgtttcgaagaggactgagtagccagctgggttaaagaagacagggactgagaagtgactgttgcttttggcccaagaactatgtcagtgactgtgatgaagagctcccaggagaggcagctagcaccttttttccactcctgtccacctgaaggtcaccatacccacctccattaataacaggtgtgtgtaatgtgtgtgtgtgagtatttgcggatactcagtgtcagaattagtgtcagaattcccctcctccagccaccagtgattctgctgtgtcttccgcaatctgcctctccctgggaagaatcaactttgcatttctttgattttctatgctggtattaaaacccaatgaaagacaaaaggaggaaatatttgggaagtcaaagttctataataatgccccatgttcatagttattcctatggctgggcacagtggctcatgcctgtaatcctaacactctggtaggccaaggtgggcagattgcttgaggccaggagtttgtgactggcctgggcaacatagcaaaaccacgtctctacaagaaatacaaaaattagccatgcatggtggtgtgcacctgtagtcccagctattcaggatgctgaggtgggaggatggcttaagcccaagaggcggaggttgcaatgagctgagatcacatcactgcagtccagcctgggcaacagagccagacccggtctcaaaaaaagaaaaaaaaaaaaaagttgctaatgcaactaatatctgtggagcttactgcatgtcagtctgtgtgaagcatttcgcatgcatgaactaatcccatgagtaggatattattatctcaagtttatagatgaataatcacatggggagaagtggctgagtcattatgagttgtgtttctagcctgtaacttctgaaatctctgaagcgttctatctgaaattttatggtcctgcatgttatttttgttcctgcagaaggggccaaacaaaacacccgtggctgccatctgcctgaccagcttggtgaccatggcctttgtttttgtgggtcaagtgaacgttctggcccccatcgtcaccatcaacttcatgctgacatacgttgcagtggactactcttacttctccctgtccatgtgttcctgcagcctgaccccggtgcctgagccggtgctcagggagggcgcagaaggcctccactgctctgagcacctgctcttagagaaagctcccagttacggctctgagggacctgcccaaagagtcttggagggcacgctactggaattcaccaaggacatggatcagctcctccagctaaccaggaagcttgagagtagccagcccaggcaaggagagggtaacaggaccccagaaagtcagaagaggaaaagcaagaaggccaccaagcagaccctacaagatagcttcctcttggacctcaaatcccctccttctttccctgtcgagatctctgacaggttgcccgctgcctcctgggaggggcaggagtcctgctggaacaagcagacttccaagagcgaagggactcagcctgagggaacatatggagagcaacttgttcctgagctgtgcaaccaatcagagtccagtggagaaggtgagtgctctggtatcacactggggcctcttatttggggatgaccactgattatcctacctacccagttattgtgaaccagttataactgggtttaaaatccttgttaattttgtgcaatatttgttttaaaacattatattcaggtatcagctgaattatttgtaattatactctgttatagatagttaattttaaacagaaatttctatctactcctgtatgttagacctgagagccacagctagtaattgggtatcaatctcttttcactcaaaaatgaacagaagtataaagcctcaatgtgagtaaaatcaatctctccttacaagagaagtggaaatgtgttgtgataaactacctgttaaggatgcaatatgttttctttgtggaagatgaacctcccaaaccaggcaagaggggatggacagaaggtggctcaagctttgttttctcaaatctataaacacagagatacacagagacactcacagagaggcttatagagcatgagaaattctgaaaatgagaactcgtattttcaaggacctaccatattctaggtgctttacatctattacttcgtgtaatataacatatattagcattttcccttttacaagtaagaccttgtgtccacatgaggtcacagagaagactctgacctgattctttgcacagctggacatcaccctgcattgtattgtctgtatttgaggcccatgtactttcctctacattatgctctccctggagctatatacagacaggtgtgggcaaagaggaggagatgagggacatagaaggaggtgtctgaaaaatagtgttttggccgggcgcggtggctcacgtctataatcccagcctgaccaacatggtgaaaccttgtctctactaaaaatacaaataattagccaggcatggtggctgctgcctgtaatcccagctactcatgaggctgaggcaggagaattgcttgaacccaggaggcggaggttgcagtggcaggagagttgcttgagcctgggaggcagaggttgcagtgagccaagatcatgacactgcactccagcctgggtgacagagtgagactccatctcaaaacaaaacaacaacaacaacaaaaaaccccaaaaacctagtgttttaagttctcccagaaacctgtttttccttctttgcctctaaatttctgggaaacttttaattaaaaataaaaattattttattttaatcaatgtaataagtgtacaatttaataagccaaataatattaaaagtcacataaccagaaacagtagttcctactcttttataccaccccttttacccttctctatttccagtcccattcccagaaaatcccactttgaaccaaaaatatgcttcttctgttaatctgtcactaaataatgtatttgcattgctacttcttgatatgtcagtttctgacatcatcttttgagttgctgttatggtaaatgaggatttggtgcgatctcagctcactgcaacctccacctcccgggttcaagcggttctcctgcctcagcctcccaagtagctgagattacagggacccaccaccacacccagctaatttttgtatttttagtagagatggggtttcaccatgttggccaggctggtcttgaactcctgacctcaagtgatctacccacctcagcctcccaaagtgctgaaattacaggcgtgagccaccacaccctgcctggatttaactcttatatgccactctgacttctccttatttaatgcccccagagtagttatctcacagttttttattaaattaaaagctagtattcttgttatcatgactaagtaaatattgctcagttctgagccatatgttacactatgattacatttccttttttgctcaacttttgctgtttcctggaattaataattgccttggttttttctttgcttggttttctgtcatcatttttctttaaatgctctggcagatctgtcaaatgcctttttgtgttattttcaaaatgctccaattcttcagaaatgtattcttttcttttttcccctctgtcctatggctccatccttctgttccactctagattgtttgtttgctaggtctgctacaaagctgttgtcttagaattcctcttgttaccacacttctgtgtcagatccaggaaacaagagatttcttaccaaagtcatgcttttacatagtttttctttgataattccccacccccatccctccatcccccctctattatctcgattttgtatcttcttaaatggttctctaatcttctttcttttctctttcctattgttcatttatttgttgtttttttctgggatatttcatggattttctctcccaaggcttctaatgattttttttttaaagtgttggttgttgtatcagtcacgattagttttgactgaggataacaaaattgcaaaataatagtgacttcatctagctcatacacaaggatccagaggtgggcagtccatggctgccatggcagctccatggtcctgagtgacccatgctcctttatcacttagtatattgttctgtgatccaacatgtggttgctggggtcacgccattacatttatattccaggcactagaaaaaggggagggaaaaagggcaaaagggtgagcctctaaactgagtcatttggaggaggcttcctcaaaagtcccattccaacttctcatatttcattggttggaatttagtcatgtgattacaacaaactgcaaagaaggctgataaaattgttttttaactggtcatattactactttacataaaattatgtgttttttctttttttcctaagaaagaaggagagataaggtagcaactatcagtctatgccacaattatccagtttttaatttccaagacctcttggttgtgatctaatttgtccttgtctttttttttttttttttctaatttgaacatcatctatttttgttctatgagtacaatggcttatcttctctctctgatactattattgatcttcctcctttaaaatttttttctgaggctggacatggtggctcatacctgtaatcccagcactttgggaggctggggcaggaggatcacctgaggccaggagttcaagatcagcctgggcaacacagtgagaccccatatctacaaaaattaaaaaggaagttagctgggcatagtggcatatgcctgtagccccggctactccagaggctgaggtggggggatctcttaagcccagaaattcaaagttacaatgagctatgatcactccaccgcactccagcctgggcgacagagcaagaccctgtctctaaaaataaaagtaaaaataattttaaaaagtttttctgttcctttcactgttcctgttttctttaattattttctctttggtttgggctctctctttctctctctttttttttttttttaaatcttggaggcttttactaaaatgtccattgatcttttgacttctttttgtacttaaaagtgaagcactcgctgggcacggtggctcacacctgtaatccagcactttgggaggctgagacaggaggaatgtttgagcccaggagttcaagaccagcctggacatcatagcgagatccggctgctacaaaaaactaaaaaattagtgggggtatagtggcacatgcctgtagtctcagctacttgggaggctgaggtgggaagacaacttgagcctgggaagttgaagctgcagtgagtggtgatcacatcactgcactccagcctaggtaacatattgagaccctgtgtctacaaaaattttttttcaatgagccaagtgtgatgacacatgcctgtagttccagctactcaggaggctgaggtgggaggattgcttgagcctgggaggttgaggctacaatgagccatcatcacgccactgtactccagccttggtgacagggtgagcctctgtctctctttttttttttttttttttttaagtgaagtactaaaaaactgtttagaagagctttgtacattagcagggcttgttaattggggcaccttactgtagaataaggaggagtgggctagactttttactggaggacccccaaatgtgaatatctagaggtttttctcttgggctcttcacgttttcctctggaggagagttctttaatcccttgcccgagggacacacagataggtacgggcattctgggaacaggatgaggtgagtgagttggagaggggtcccactgtttagggtatagatgttcatttaattccctgccttcaaattccatttccacactctttgctgtgcctgctgtgccaagtttaggcactctctggcttgattgtttcaaaggaaagcccccttgaggagggaattgggcaacagaagggttgttacttggcttcataggcagagaaaaggatcttggtatacaacaaatatagacctcccacagccccctataccttaccactgcatgggatgtggtgcttcctggtcctgaagctggtctgccagaatgaactgggctgctccctgccagcaccctctctgggggccctagggttcactctcctctgctctgctcagtctgtcactacggtcacctttccatcttccaggacttgtttttatttttcctctctcattctcttcgtgtttgtgggtttatgtctgtttcattccttttctgtcttctcattggattttcaggagagacgtggacagtctgcaatgtttaatcaaggaagtggtcgctgtccagctgcctagtcttagaaatgtcataggtgttgctgaccattccctctctcccactccctgctgcctttactttggtgcagacgctcatcatcttgtacctggactcttgctaagtctccaagactctcccgcatcccatttctccttcatgctgcccactgaatgatctttctaaaataaaactctcatcatgtctctcttacttaaaaatgcttgctggaatttaaccccttccgtgtaaagtcccagatagggtgtacgatgcaaggttcttcgcaatgcagccctaacctacgttcctggccacacttctcatgacaacccatgcactgtacgttccgctttcacccaaactgatgtcctaaacacaccatgttctttattccttcctgccttcatacaccctgttctgcctcctccgattgcttcacctcccccttctccatctggaaaactctgacatcatttaaaatccatctgacttttaagacccactttcaccccttttggagaaggattctctgatgtcttccactgtgcaaccataacatttgattcatattagtaatataaactattatctcatatttatatcacatcatatttatatcacatttgttcacacatttgtctttaggtttatttgtctatcttaaggaaataaatattaaactcatttctttgccactagattgtcagattcctttgttttcaaactatgtctttttacctctgtactcgtcacaatattcccatacagtacacataatgtagcaaacactcagtaaagcctacttgaattgatgagcaattgagcaaattttggctaaaacattgaagcattgatcaaatagaaagagttaaactattataagaacctaatcgttgacaaaccagatgctataaaataataataatcaaatcacaatggaataaatattcctgaaagcatggattttaaaaattaacttgaggctgtattttataccttatatacacaagaattatttatttacaacagctgtgcaagagagattttttaactacgtagacatcatcaaagacaagatatctgattaaatagaaataaaaaacatttgtacaacacagtgtcacagaaggaaacaattattctgacaaaacacaactgatgaaagcataccttccaaagcgtattatttttaaaaacaggaaggtcaaaatccagattttactgaaaagatgtcaggtgagataaatacaaagttttacatttgaaaaattaatgctcactcattcatgtccattcaacaaatgaattcttattgttaagtattattagtagctaaaaatagccagcacttactgagcacatcctatgtgcctggcactgagattagcatttaatatgagctatttcgctgaagcccagatttaggcattgttctgtctttctacagatgataaaactgaggctcagagaagttaaacacttgctcatgataggagacagtcagaatttgaacccaggtcaatctgactgtcaaacctgtgctcttaaccactacacagtgtgtatgccaacacttgcaatgggtatttgttttgaactaggccatgatattgattaaatgaacacaaattaaatcatcttttttttttttttttttttttgagacggagtctcgctctgtcgcccaggccggactgcggactgcagtggcgcaatctcggctcactgcaagctccgcttcccgggttcacgccattctcctgcctcagcctcccgagtagctgggactacaggcgcccgccaccgcgcccggctaattttttgtatttttagtagagacggggtttcaccttgttagccaggatggtctcgatctcctgacctcatgatccacccacctcggcctcccaaagtgctgggattacaggcgtgagccaccgcgcccggcctaaatcatctttaagatagcattaagctgggcatggtggctcgtgcctgtaatcccagcactttgggaggccaaggcaggtggatcacctgaggtcaggagttcgagaccagcctgaccaacatggagaaacctcatctctactaaaaatacaaaaattagccgggcatggtggcacatgcctgtaatcccagctacttaggaggctgaggcaggagaatcacttgaacctgggaggtggaggttgcggtgagtcgagatcatgccattgcactccagcctgggcaataagagtgagactccatttttaaaaaataataataataaatatatataattgcatatctattaagctataaaaatttaaataaaaatagcagatttgtgataattaggtgtatgtacacattgctagaggcaacatcaattgattcattctttctttcctgttgattaaagtttttcatcaaatttgggaagtttttggctaatatttcttcaaatattttttctgccctttctttttctcctgtccctgtgggacttccattacatatttattgatatacttgacattatcccattaggcctctgagactctctttcctttgcttccacctttccccctctgttcttcactttggatcatttttgtcttgaagttcactgattctttcctctgtcatctgaaatcttctgttgatagcatctagtacatttttcatttctgttactgtgctttctaactgtagagttttcatttggttcttttttatagtttatatttctctctctctcttttttgaaacagagtttcgctcttgttgcccaggctggagtgcaatggtgtgatctcggctcactgcaacctccacctcctgggttcaggcaattctcctgcctcagcctcctgagtagctgggattacagatgcccaccaccatgctcagctaattttttatttttagtagagatggggtttcaccatgttggccaggctggtctcaaactcctgaccttaggggttctgcatgcctcagcctcccaaagtgctgggattacaggcatgagccactgtacctggcctttagtttatatttctctgttggtattctttatttttaaagtcattgtcatccgaatttttttctcattaacattatcgttttctttaattctttaaatatatttttaacagctgctttgaagtttgaagtctttgtctgctaaatacaacacatgaacctactcagttagtttcttttacttgatgtttttctttcctgagcatggatcacagttttctgggttttttgcatgtcttgtaatttttcgttgaaaactagacaatttaaataatgtattgtagcaactctttattctgatatatatttctgagtttttggttttttgtttattttagtaaattgcctggatttcaactgtggcatctgcctcccccgtggtgtgtggctgctgatatcgttagtcagctttttattcttatgtgtttagccttgcttcctaggagttgccccctgtgtctgcatagcccttaaggctctgcatagcccttaaggctctgctctctgccagtggatctgtgtgtcacttgggaagcatagtcaaaactggatccaattagttccccattctcctctgggttttatgttttgccaggttctttcaggcctccccaggcgtgggcgtagttttctagtcatccagggaaatgtggggaggttatctagtctttctatggtgctctcatttccaggatctccccattaaatttctgctggtcttctgctcaccctagctgggtctgcactttcaggctagcaaggattttccccattcatttttctactgtgcttatcatatttagcatataaagccacagccttttgccctggcttcaaatcaactttgcccctctgacagcaaactgctggtttctgaccagcttcatgcttaatgggagcagcttaggcaagaaggctacaggctttcatgtttcttaccctcagctttagaaatttttgaaaaataaatacttctcaatttgttttcttcatctggtaaatttctggagctctgaagtaagtgttttggactattttgtctagttttatacgtgtgtgtgtgtgtgtgtgtgtgtgtgtgtgtgtgtgtgtggagaagattcactgacctcttcatactgccatggctagaagtccctctggttcattgtttgtggagaatgatctttcaagatgtaacaagaaacacaaaactgtttaattgccctgacttagtaagtctatttgagggaactgtttatcaaggaaacaaccccaaatcagccaaacagcaaaccaaaaaatgtgtacaagattgtcatagctgcattgtttgtgctaatgacaaattagaaataagtgctcagcatttggaaagtggttaagcaaattataacatcaacatgataaaataccacgtggactttaaacatgattctgtgtggactaaggcaatatacgttatcagtttatacatgctaattagaactatgtgtttatttattctgataaagatatgaagtgaattttcacagagggtttaatatttaagtaatttctataaaattacttaaatttattatttaaaaattaacataattggggtttcctcctttatgcttaaagtgtttatatctgctgtgaacatagaacttagacatatcactagattttaaaggtcaatttaatattttgccttatatttgttatgtgtagcatttttaacatgcacgatgcatgcttgtttgttttatgagtagaggcttgataaagtaaagttacctgcctagttgtaacttcctagtatttctagcatgagaagctgtcccctgcccctctgacaagtttgtacaacttgctttctccagcaaaatctgagacaagaaaaaaaattcctctagtcactttggaagagttttgaaaccctagctattcagaattatgaataattgtctattttacagtacctattcaaagagtcattgagcatctttgcataaattttcccttacattgctgatatataaaacagcattgtggctgcctagaggacaaacctttcctactacttctgcccaagttcctcagaacacacacacacacacacacacacacacacacacacacacacacacacacaattccctttaggttcagtaaaattgaggttgtgtaagatcaagtgttgtaaaagggtgagctttaacaggtgacagatctcaaagagatgcaaaaatataagttcttaaccaatagtgtttcttcttcttttttttttttgagacagagtcttgctctgttgcccatgctacaatgcagtggtgtgatcttggctcactgcaacctcagcctcctgggtttaagcaattctcttgcctcagcctcccaagtagctgggattacaggtgcgttccaccatgcccagctaattttttgtattttttttagtagagacggggtttcaccatgttggccaggatggtcttgatctcttgaccttgtgatgcacctgccccttggcctcgcaaagtgctgggattacaggtgtgagccactgtgcccggcctagtgttccttcttaataaccaagagggcaactgtattttactaagcctatgtttgccattaattaaattgttaaaattaaacaattttttaaataattatgattgccattaattaaattgttaaaactatacaatttaacatgctgaatagacatagaaggtttttgctgttgtagagcttacattctagtaggggaagacatatgataaataagcaaatacacactgtgatgtcaataagtgataagtacaaaactaaacaaataaccaatttaattaaattgttaaaactatacaatttaattaatggcaatcataacagaattatttattttttgaaaagtaatagagccatccattcagatcaatcttgcagactttattttaatccataattattaaggagacttttactgagcgcttcctatacacaaacttctaaatgcctagagttggcatttagaatataaaagagggtccttatccctgaaggtacagatgtaaaaaaagataagcataatacttggaggcacatgatgaatgcaaatagatgttgagaggatgaagtcttctcaaggtgtagaatgatttattcattcacccacatgtatggaatacctcgtacattccagacactgtcccaagtgctgggggaacatgctgaatagacatagaaggtttttgctgttgtagagcttacattctagtaggggaagacatatgataaacaagcaaataccatactgtgatgtcagtaagtgataagtataatgaataataatagagtaatgggataaagagagaccagggtggggaggaagatgcactgtttcaggtaggtttattagaaaagatctcactgggaagatgatattttaatggagaactgaattgcatgaagcagtgagccatgcagagaagtagaagaagagttccaggtagaggacctggcatgtaaaaaagtccaggtgggaactggactggcaactcatcaagaatggcagaggcccagtagtgactggagagcagtgagccagggaagagagatgagaggggtccagtgaggaaagcgggggcagtgctgtatagggccatgtgggccattgtgagtgtgatggaaggcgctgaaagttctagctacagctacaatgtgaccagagtcagtctttaagaagatcactggcttttagaggtaagagagagagccaaggccaatttggaggtatattaattagggtaggctaaacaaataaccaaaaaatgttatttacttgctttacagtgcaagaagggtgttccaactccgtgggaggctctcttccatgcatccactcagggatccaggctcctgccatttgtatgacttcactatgccctcggacctagtcatgtgaagaatcaagactgagttaccacattcagatttcaggcagaggaaggggaaagtgcacagagaagaggcacacattctcttaaagaccttgggccaggagtggcactcactgcttctgttcacattctgttgctgagaacttagtcacatggttacacctaacagtgagaaatcctgtggactgtactctagctggggtctgtaccacaggagcccgctgcagtaaatggatgaaagatgaaagtgggttggactaggatgggagcaatggaggcagtgaggagtcattgtatccagaatatattctgatagtagaataaacaaggtttatggatggaataagtataggtgtgagagaaagaagggagtcaggatgaatcttacatgtttgtgtaaatggtggtgttatttattcaaatgaagatttgaggtgaatagatttctgtgttagtcatgttaagtttaaggtgcttattagccaactaatgggtgatactgagaagacaatgagctattcaaaacttaagttcaagggagaggtcgaggatgatgtaaacttggagtcatcaatatatcagtagcatttaaagccatgagactagaagaaatctcttaggagtgggtatacatggaaaaaaggagtgctgaagactgaatgttggaatactccaatattttcaggttggaaggaggaggcgagccagcaaagaagactgagagagtgggcagtgacatagaaaaatcaagagagtgaggcatcttagaggataatttttccaagaaggagaaagtgatcacatgtatcagatgctgcctgaaagatcaaatgggatgagggctaggagttgaccacagaatttgaaaagattcaaatcattggcaactttggtaagagtagttttagtggaaaagtagatacaatcataagagtgggttgaggaaataatgggatatagagactgcataggcaattcttttgaggaggtttgctataagggagagacagcaataggacaataactaggggtgagctgtagacatttgtttaggtgggagagaagacagtatatttgtatttgttgggaatgattcagtaggggacagaaaaattgatgatgtgagaacaaagtccttgaacaggccaaaagggatgggatcctggcacaagtggagggatgggccttagttaggatcagaggctgttcatccaccgtgaaaggaaggaaggcagaatagagggtatagatgcaagtgaattggctaattgggtgatgagagaacatgaaaagttctctttggagaagagagcttgtaaatttgttctatcagagagtaggaggatgagttgcctaggtatgaggctgctgagtaattctgaagcatgggagcagatgtgtatgtaggtaagaggttagggaaagcgggaggtaggtgatggaaatcaaaaacatactaaggcaaactatctaaaggtccctctgtagactatgaatggttggaatgaggaacagcagagcaaatgagcttaacgttgcttttaaaggaggttatgggctgagagtagattgctgaaagtcatgatttaggaagtgtaaggttactggtaatgacacaccgcaagtgcagctaagggagttgacagttgggatgagtgaaagaaaagattattagtatgaggatttcaaggaatcgagaaagtagggctttggatgagttgtttttgtagaagtcaccaatgatgacaatggatgctgatagagaaaaagatggtgaaccaggggctgaaatatttaacaagcaagagaagaatgacaagttggtaaaagactgtaatgatgaagggtagggtgtgaaatagtctgatggcatgtgcttcaaaggggctaggtcataaagcaacagtgaccagagaggatgggagacttgggctaggaatacttagtgagttctgctacatgccaagccctaggctcaagatggatgtggaccctgcccccatgaagcatataatccaatgggcatagaaacatgtaaataagtatacaactacaaatgatggtaagtgctgtgaaggaaatgggccataaggaaatattaatggtatgtgggaatatatttagattttcctgtgggggctgatttccctgaggaagtgataactgagctgagggatgcataggagttagataagcagagggctaggggatccatgagacgtggatcccagatagattccaggaaccaacacatcaggagtggttgacatggggaagaacactggtatatgagacaggatttggaccgtagtgaagaaggaagggctgggcagaggagatgacacagtcaagagagtttggctgaagtggaaatttgatattggagaacagagaagggctatgtagggagctttctactatatttcctgagcaacaaactatgaaggttgagaacacctgaagttttagtgttgaaatgaagtataaacatactgcgaagttaattcaacatatcatttatttgaaacattattgtggtgttcatggtgattagaccatattgttaaacaatctagatgcattttcatagttaaattgagcatttctgcagaaatagaaagtcaaatgcctcatgtcttcacttataagtgggagctaaataatgtgtacacattgacatagattgtggagtaatagactttggagactcggaaaggtaggagggtgggattgagagatgagaaattgcctaatggctacagtgtacactatttgggtgaggcttacactaaaagcccaaacttcactactctgacattaaaaaattattattatttttaaattgagcgcttctggagccagctgtaaactgagaatgcagagctgaatagaacatgacatagctctgaaagccctgttgtgcctgaaaggatgaggcaggatcatgcatttgtttattgccaggcccctttcccctcagccatttcaattgccagaggaaggaatcagaggagctattctccctccatctttctccttcatcagtttctggttgatacctgagacaggtctaacacgagctaactttcagagtcagaaggtagcaaagaccatctctcattagacaaaagccaacctgccctagcagtcccggtggtcacacctggaagccaagaataccagatgtctagttctcccactctaacaccttacatctgaaaaagaggggagagctgagcttccagttgccccagatgacatatctggacagttgtgccttgagcatcagaggaccttcctctccactctgtctctctcttctctttctttctcagatccttggctggtgggaggccataaacacttctttcttccttctgcaagagcaagccctgggagatgtcttttaggctaagttacaaaattggggaagaggagctcataggtatattttcctaaaaaacagtagagagttgatagcaatttggcagccaaatctttggctattttttagatttcttcctgaagtccaggctccaagaacaagatgtctggagaagatccacttctttctatacccacatgtgcaacccctgggtctccctgttgggggtgagtaacttcatcttgatctcagttgttcttgggacagagttcaggtggacacatgtgtgatcttgggctgtgggggaggaaagatggagggcctaattagaagcaatgtgatttgcctgttgtattagaatttagatgagactacatatggcaagattacatttaatgactgcttattttaatcaataatttcctttttaaataattgtctatgataacttctgggttactaaattttaaggtacgctaagttatcatactttcatcctaatttgtttcttatagggaggaatgggacaaggagataagatagaatatctagttgatagttttaattaaagagttattttcagaaggtgtctgcccaaatatctgcttaagtgaggttttttgaattcttcataaacttcaattattcagacttttacagtgatcagaagttgatgagagggaatgttgttgctgaagacattagccttgtggcttgcttaccatgtagaaagccattaggtgatttgctcttcctactctgttttcacaggctgttgggtcccttctcatcatgtttgtgatacagtgggtgtataccctggttaacatgggtgttgctgccatcgtgtatttctacattggccgggccagtccagggcttcaccttggtaagcagcagagccattttgccactggttccctcattctctctaccattcattgggaaaaaaaagattttgaatatcaattgaatgccaacactgattcagatgtgaatcccattttcaaataatttatagtctaggaggagaactgtgacaagcacatgaatgattaccaataaaaataataacttaaaaatgaggtttataagatatgtagaagtaaaaatgaataacaatagtccaagagctagcagtgaagtgaaagtatactgttgtaagtttcttatactttgttaaatactataacatcacttgatggcggattgtggtaagtttaaaatgtatactataaaccctaaagcaacctaagataacacaacagttatagttaagccagtaaaggagataaaaagtactcaatcaaaataaggcagaaaaagataataaaggacaaatgagacaaacaaaaaacaaataacaagatggtttatgtatatgtaatcccagccatatcaataatcacactagatatgggtggtctaagcaccctaattgaatgccaaagattgtcagattgaatgaaaaagcatgacccaactatatgctgcctacaagaatccttctttatatgtaaagacacaaacatgttaaaagtaaaaggaaggaaaaagatacatcaggctaacactaatgaaaaacaaagcagggtagctatattaacattaggcaaagtagagtttggagaaaagaatattacagtgataaagagggtgatttcatgaagctgaagggaaaaatacatcaggaagacataacaaagcttaacatttatgcacttaaaaacacagctttgaaatacacaaaccaaaacctgatagaactacaggaagaaatagaaaagttcacaaccatagtcagagatttcaatacctccttcctaataattgataaataagtatacaatcagtaagtctacagaagacttgaataacactatcaacaaacctggcttaattgacagttagagaacattctaccccaaaacagcagaatatatgttcttttcaattatacatgaaacatttaccaggagagactatattctagtacataaaaaatatttcaataaatttaaaagtattcaagtcaattcaagaacagagtatgctctctgaccagagggggaataattagaaataaataacagaaagatatcagaaaatccttgaataagccaggcacagttcgcacacacctgttgtcttagctacttggagggctaaggcaggagaattgcttgaggccaggagtttgaggccagcctgggcaaaataacaagactctgtctcctaaattaaaaattaaaaaaagaaaagaaaatccccaaatatttagaaactaaagaatattacataaccctaattaaaatacagaaaataaataatccatgattcaaagaagaaagcagagtgaaattacaaagtattttgaactgaataaaggtgaaaatggaacagcaaaattgtgggatgtagctaaggaaaatttatagcatcaaatgcttacgttagaaaagaagatcatttgcaaatcagtgatcccaacatccaacttaagaaactagaaaaagaagagcaaattaaacccaaagtaagagcccagtaggcagaggttgcagtgagccgagatcaagccattgcactccagcctgggcaacagagtgagactccgactcacaaaaaaaaaaaaaaaagagaaaaaggttcttcagaattagaatagtctgatgcacttcaaacactttgaaagaaatgcacttcaaacattttaagtcgtgtgtattaaaaataatgatttagaaaacagtaatgttaagaagaggtccttatgttagctgacttcatggatagaatatattttaattaacagtgattacttcagtgattgcttctttatttcttaaaaagtagtttgatcttaagaaatttcaattatttcctagaaatctattcataggaaaacatgaaatcaaatttcaggccaatgtccatctaaaattcaaataatttagaatctaaattatcacacttaagtagggtgagttaataaaatatgtttattttcttccttctgacaatctcaaaatgtattagaaatcttctctttgcaattgcaaatgcagatctaaaatttatcttccctttagccataagggcctaaatgatattgaggaaacaggttatcagctgcatactgttgatatttgtggagattttaacataagcctcttaaaataatgctattttcctgatcatatattgaacattatctaatcaatcaattttcaatcatatgtatgtataatttaggaaagcattttctaaaatcacatttgatttgtttctctaaagttatatataatttactatgtgaatttttttaaacctacaccaaaggaggaatggatttttttcaattgataaaccctattcaaatctgtgtgtttgatgtcaggattatttggctagaatcaacaacaatgtcacttcaaacttcagctctaacatttctacatgtggaactatttgattcacttaacacctgttaaaaaaattcttaagtgccagatcctgtgaggtactgtgatgattataaggatgaaaaagacatgttcccaattctcagtgtatggtctagtagaaaattttatggcgtgtattcaacacttgtcagtatgaatcttaaaaaatttatcaaagttttttaattcttaagactaaagttagcaagtctctgcatttgtctttatagcactttatccagttttttgggagtgattttggagtttggaaataaacttttgaaggattcacatgagtaaaagtccttagtaggctgctgtcatggaagattacaatgaaaattatttgtttagactgaaaaaggaaaacatttgtgttaattctgtgcgtgtgtgtgtattggggtttgcattcaccctattaaaactgagcttctagatgccttatgtagaaccttcaaaaatggttatgtatatgtcttccctgcaggatcagcctccaacttcagctttttccggtggatgaggtctctcttgctcccctcctgcaggtctgtgccaatttggagccagtaccagaatggatgagtgtccagagtcctgggaggtgccaagggtgtcccattcctggctgggcttgggcctggattgtggcatgggaacctaacaactgggcacctccgggagactcagatgttgctcctgcgtgcactccaccacactcggcccccagattcggctcatcagaagcttcctctaggctcatgtcctcttcccttcttatcctcagtcatcaagaacagaggctttatttagaatctggttgctggggtgataagtcactactctcagtgagtttacagtctaagacacattcacatcaatgcataatcacacacaagattaaagcccaagggaaatgtaacgccaggaagcacattcttccatctgagtcagaggtagttgacatgactgggttggggacagtgcagaggccaagtatagaaataaagtggagatcctggaggatttctgtgggacctctatggtcagatatacaggaaaggagaaaaaaaactttcctgagaaatagaagcctcatagagagggtatatttcacatgtgccctaatctcactccttctcctccactcttgcagtatcactgcttcttaccttttaaggccctgggattctggggaattacacccaccctctgtcccctttcaatatcagtgaggagctagagctgcaggctaggaaaatccaggcagaacccaaccgagtgttcatttggttgcattttgttggtttgtttttgagactctagatgtccgggttgtacttgctaatatttccaccctgcatgttcagacattgctagtggatcatgggatcctttcccattgatcccagatgtaacttcataatccttttttctcctcattttaaaaattatggtaaaatagggctgggcgtggtggcttacgcctgtaatctcagcactttgggaggccaaggtgggcagatcacctgaggtcaggagttcaagaccagcctggctaacatagtgaaaccccatctctactaaaactacaaaaattagttgggcatggtggcgtgcctgtaattccaacttctagggaggctgaggcaggagaatcgcttgaacccgagaggcagaggttactgtgagccgggatcgtgccactgaactccagtctagttgacaaagtgagactccatctcaaaaaaaaaaaaaaaaaaagtgaaatacatgtaacgtgagatgtaccatcttagccatgtttacgtgcagtgtgcagttcagtggcattaaggacattcacgttgctgtgctatcatcaccatgcccattaaacactctgcattcccaagaatcctatttaagacaactcttcacaaataattgccaatctattcaagatggcacaagaaataaagccttcgtgctggagcttgggatgacaagaagcagcagcaagggctacagacaccagcagggacagggcccagggatggaggctggggtgcatggggagcaccctgtcatctgcttacttgggccagctggtctcaatgtctcatgtggagctgcagagagggtgagtgatctttctgcctcttgtcctgtccgatgcacaaggttgggtgagccaggtcacaacatttcttcactgatctcttctcccctacaacccagtcctgagaaagagtagagtttaaatggaaatagattctgtgtaaaagctgcctacagattctggagctgcaagtggtgtgtgggtgagactatttttttgccttgcctgatttacaggaatatttttagtcatttctggttttaaagcctaaaaatgccataggaggtcaccagtccttatgttgtactctgaattcctaggatttcaccttggaggtcacagcagtgctatgtagaaagaagaatgtactagggggagattattcttagaaaaggacagtactttggttggagtagaatcagtccacaccattcataacacaaacaccaggctctgtgggctgtgaggtggggagcagaggcctcagctaagtcaacatcaaacttattggccttaccatggctgctgggcgatattttgggatggttattcaggaggttgaaagaaccaagaaaggctgggcgcagtggctcacacatgtaaccccaggactttgagaggctgaggcgggtagatcacctgaggtcaggatttcaagaccagcctggtcaacatggcaaaaccctgtcaccaggcatgtggcaggtgcctatagtcccaggtactgaggaggctgaggcaggagaatcacttgaacccgggaggcggaggtttcagtaagctgagatcgcaccattgcgctccagtctgagcaatagagtgagaccttgtctcaaaaaaaaaaagaaaaaaaaatggtgatttattttaaaatagagattggtcagatgcactggctcatacctgtaatcccagcactttgggaggctgaggcaggccgatcacttaggccaggagtttgagaccagcctcggcaacatggcaaaacaccatctctactaaaaatacaaaagttagccgggtgtggtggtgcacacctgtaatcccagctacttgggaggctgaggcatgagaattgcttgaacctgggaggcagaggttgcagtaagctgagatcaaccactgcactccagcctgggcaatagaatgagactctgtctcaaataattaaaataagataaaaaataaaaatagagattggtagctgtgtttctgctttgtagttttgagttcccctcccagtccccaactataacccccaaaatgctcttcaaaacctaagaagaagaagaatgtagggtgtgttttggcagaagaatttggctaggttacttcctctgttatgcctacaattcccatgaactatgtgaagttgagcctgtcattgagaaggctttctttcttgaagcactagcaactgtccaaatgaggatttgaaagtcattctagactagagagtgaagtattttacttctccagactcagaagaatgtaatggtttcacctaaaaaatcaaaacaaaagcattagcaaaaacacttacatgttgactggtgtgacatttttgtcacctcctaaactttttggagattcagcctttatagaagttaattcagttctcaagaaccctcagagacctatatgatttatacatgttctcaacaactggctgtaatgccatagtcatgtgatctgaacttctatagcaggacatttggccagagtccgttgaaactttctgtttaagttccacagatcaataacattagatttctaccttttcgcaactctcaaatgtattccatattcaaacaattgaaacttattactcataaagtagatgattcttttagagtaaaaattttaagaggaaatccatgtctaaggtatgacttacagacctaacacagactataggaactggaagagacccgggaagatgagaaaatagagacacaagaaggtaaagaggcttctggaggccacctagctgattagggatggagctgtgactgggtctgccttccgtagcagctgcctggacagccagcctgagctttcctcactcctttcttcctcttagcactttccctatgcatccctaacatttttctttcccagtttattccaaccgaaactgtatgcagagactccagtgacagtgggatccatatgggacttgctcttcacctgaggccaccttggtgtcaaaagcctttgcagtccctcttagctgcttgctgtgtgagccttagctcttgaaatcactccttattcaactttcttttcaatagacctacgagaattttctctttctgctcttctcaattttccagcctctccattccattatttttgacaaaaaaaaaggcaaagaaaagctacagagccccaacatgataccatttggagggcaaaacctctctttgttggttatttcctatcaggtaggtacagctttatacttttctacttagggagggtaaatatcactctctctgtctctttttattttatttgatactttgtatttctcatgctttgagttcatatatacctgtacatatacctttcaagaattatgttttaaacatttaaatacatgtgtgtttacagataatttctttatgcccagtagactcacctctactgttcagtctctgttctgtccttctcaccatcctctgtgtctctctcactgcaggagcttgcggtcccctcaggagcagatcatcttggcgccgtccctggctaaggttgacatggagatgactcagctcacccaggagaatgcagacttcgccactcgggatcgctaccaccactcctccctcgtgaaccgggagcagctgatgcctcactactagatgcagtgctgggaccttcctcttttggagctgtcccatgtacagtggacccaagctcaggaccttcgtggagctgcttctccaacctgagaaactcaagacccatcctcccgctgtcactttggacaatggaaatctacattttcttttccctttttttttttttttgagacagagtctcgccctgtcacccaggctggagtccagtggcacaatcttggctcactgcaacctctgcttcccgagttcaagcaattctcctgcctcagcctcctgagtagctgggattataggcatgcaccaccacacccagctattttttgtatttttactggagacagggtttcaccatgttggccaggctggtctcgaactcctgacctcgtgatccacccgtctcagcctcccaaagtactgggattacaggcgtgagccaccatgcctggccagaaatctatgttttcttagaacatgtggaagaaggaaaaagacaaaaaaggaaatctggattctgaggaccacgtctcacccagggtgacatcaggaatggtgctagcctctgcaacacgacacccagtctgaagagctctatacaggtactaagactagcaggggacaccaagactctgcacaaccagattgcttgtgcagagggccacaataagtgtatgttttatattttattgtattatttattcaaaaataaataatacactcacatgtttccacacccaaaagatatatagagtgaaaagtctccctccaatccttattctccacctgctcagttcctgtctaccctggcctagaggtaaccactattctcatccgtacatccagcatttctttatggatatacaagcaaatgggaatgtagagtctcacattctctctttatacacaaaagttagcacgttatacacatgttctgcaccttgcttttttcccttaacaatctatcttggagacatttcatatcaattcatatgccatttgttcatttttttcattgtataaatgtgttataatttatttcgccagttccacaatgatgagcatttggattctttccaatcttttgcaatgacaatcagctctgcagtgaataatcttgtacaaatgtgcaagcataaagtgtatctctaggataaattcccaaaagtggaattgcaggatcaaaaggtacatgcatttgtaaactattattgtttagtgagggtctttttaattaaagaattaacatgaattgcctaa

SEQ ID NO: 55 - DNA, 78685 bp, Homo sapiens
gcactctgctcctgggtctgcactgggagcagctggctttgctcccacacaacctgacttttgttcacaatgcaaagactccaactgttgagagtagaagtactcctgggtgtgaaacaaggagatgaaatgcggcatttctttttttcttctcagacctccactctggagaagagtcagaatgggggcgtcggggaggaggtaagtggaactagatagatcatgcttcaaggcaggtagtccatgtcgaggatgatttctttaaaaaagggaaaaacttgccctcctgtctctcttaatcagcacagtgtgttaagtgggggctgtcaaggccaccaagactcaccgaggctgagcttgcccgcagctgtccaaagggcaggtaccagaagctttgttctttgctgaagggggactttgcataaaagcctgagctgaattcccccatcccccgctccctgtcccattgcgtctagggtaagagcctccggagtgaaagaccaaagggaagggggttggtggctggaaggccaacttactatgttctttgccaaggaaagcaatttgaataaagttgaggtttaggaacctgtctgacttcagatttgttggactaggctggcataagggcgtgttaaaatgagctaacaatttagtagagttgatcaaaataaaccaaaaaaacaattataatgttgtgtgataagtactgaaaaaagtgcactggatgctaagagagtacaaataatggaggatggggtcgggaagggatgggcagggaagactggacgatcttcagtgatctgagaaggaaaaatgtggagagaagggaattgcagaaaattaacagtttgggtaaaggcatgagagaaaatgatgggttccaatactgttgtttagcaggactcaaaggcaggggtgcaacaggagggagttgtggcagagaacacggcaactaacacttagtgagcagattactatcagagctgtgtgaaccagaacgactccatcttcaataggagctgggtaaaatgaggctgaaacctactgggctgcattcccagatggttaagatgttctaagtcataggatgagataggaggtcagcacaaaatacaggtcataaagaccttgctgataaaacaggttgcagtaaaggagccagccaaaacctaccaaaaccaaaatggtggcgagagtgacctctggtagtcctcactgctacactcccatcagcgccatgacagtttaggaatgccaaggcaacctggggaagttaccctatatgctccgaaaaggggaggaatgaataatccacccgttgtttagcatatcatcaagtaataaccataaaaatgggcaaccagacgaccaggctcatgcctgtaatcccagcactttgggaggccaaggcgggtggatcacctgaggtcaggagttcgagaccagcctgaccaatataatggaaccctgtctctactaaaaatacaaaaattagccgggcgtggtggcgtatacctgtaatcccacctacttgggaggctgaagcaggagaatcgcttgaacctgggaggcagaggttgcagtgagccgagattgcacccctgcactccagcctgggcaacaagagcaaaactccatctcaaaaaaaaaagggggaaccaggtcaggcacggtggctcacgcctgtaatcccagcactttgggaggccgaggtggtgtatcacctgaggtcaggagttcgagaacagcctgaccaacatggagaaacccgtctctactaaaaatacaaaattagccgggcgtgatggtgcatgcctgtaatctctcagctacttgagaggctgagtcaggagaattgcttgaatccgggaggcagaggttggagtgagctgagatcacaccattgcaccccagcctagacaacaagagcgaaactcagtcttaaaaaaaaaaaaaaaaagggcaaccagcagccctctgggctactctgtctatggagtagcctttcttttattcctttactttcttaataaagttgctttcactttgccttgtggacttgccctgaattatttcttgtgctcaagaaccctcctggggtctggatcaggacccttttcctgtaacattaatatgcatgaggcactgtcttgtccatattgtagccatcttaattatatctagcccaaggcctgatacctgtgtatgtatatatttgatcatcttggtttatatagagatggagtgtcaaattggtcattggaaattagagtccagagacctgagaagtaagtaggtgaccataggtagaaaaggactgtaagctttaaattaaatctcttctaattagtctatattctcctgatattccttttttcttttttttttttttttttgagacggagtcttgctctgttgcccaggctagagtgcagtggcacgatctcagctcactgcaacctctacctcccaggttcaagtgattctcctgcctcagcctccggagcagctgagactacaggcatgcaccaccacgcctggctaatttttgtatttttagtagagacggggtttcaccatgttggccaggatggtctcgatctcttgaccttgtgatctgccaacctcggcctcccaaagtgctaggattacaggtgtgagccactgcacccggccagtccaaaatcttaaagacatctttgtcaactatgccttcaaaatatatctagaattcaatggcatctttcttgtaatcgtattgcttttgcatgcttctgttttccaccattgagtgcgtttttgatcagcacatgaacaagggcttggtgaaccagcagagtgtcaaaaaatgattatgctttttaaaaacgtgcatttctttatttctttcattactgcttgtgtcacaggactgctggggtggagattacctgtttctcttgccaaaagggtaggttcacatttggcatgtgtgccaaccgaagctgcagttgacctttcctaagtgctataatgaagaatcaaatggaggatagggagggggacactgcattaaggaggtaatgttaaagctaggtagatttctggaggaagaaccagagagacaacattggtggcaaaagccctgattctggagatttcctgccttcttcctggatcaatgaggggccaacttcatggtgctgtgggagaacccaaggaggcaaagacagactgtaaagtacagggccagaggaaggattctgtgattcagcagtttgactcgtgactctgaatgagagaaagccaaaggaagattttgagctaaggagtatcttgatacgaccgtctttaaaaaacaacaaaaaaatcattctgacgaatacattgggactagattataggaaggcatgggtgccaacagagatgacagttgggagacttcttgaataaatcaagtgataggatttgcataaggcaataggtagacttggagatgattagaaaaggtcaagtgcagcttggattgacatacatgccaaatgtgaacctaccctttggccaggcaacacaggtaacatacattctatctatctatctaactatctatctatctatctatctatctatctatctatctatctatctatctatctgatttatctacctactatcactagaatataagctctgtgagggcaattactttcatttttcacctgtttaatttattgtcttgtctgcaaccctagaagagtatgaatggttcattcaccagcatcctcagcaccacctgggagcttgttagagatgctaactgatgggcttcaccactgaataggaatctttggtggtagggatcaggaatctgttttaaaattctccctgtgatttttttttttcatgacagcctaccattgaaaccaggtgatttttctgaatgctattgtttaagaactactcttctagagagaaccaggcaaaaagtaggaaatcattatttggccgggcgcggtggctcatgcctgtaatcccagcactttgggaggctgaggttggtggatcaccagaggtcaggagttggagaccagcctggccaacatggtgaaaccccatctctactaaaaatacaaaaattagccgggcgtggtggtgggtgcctgtaatcccagctactcaggaggctgaggcaggagaattgcttgaacctgggaggcggaggttgcagtgagccgagatcgcgccattgcactccagcctgggctacagagcaagactcagtctcaaaaaaaaaaaaaaaaagaaaatcattatttgttgatgaaggaatgggcataaatgagaactagggttttgtaaacaaatagagggtaggagtcatttccttacatttaaatattgaactgcacatcaatgtgatatacagaataactcttgaaaataacagtggtcattgccttaggtcccctacactgacaattcaatgagccttgaacaatgagtctttaattcacaactaacagtcttccttccttcctctgggaggtagagttactctccaattaccaatgatggaaagatgaacaccataactactgaaactacttagtttagttagagattacaaatggaattatcagcatattcttcactattttgcctattttacccataaaaacacaaaaagaacctttttattatgaaaaattttagctagctgcagtacttcacgcactcccagcaatttgggagactaaagcaagaggactgctttgagcccaggtatttgagaccagcctgggcaacaaagaaaaactctgtctcaaaataaataaataaataaataaataaataaataaataaataaataaattttaaaaatttaattagctgggcgaggtggcacatgcctgtggtcccagctacttgggaggctgaggtgggaggatcctttgagcccagaaggtcaaggcttcagtgagccatgattgcatcactgcactccagcctcagggacagcctgaccttgtctcaaaaaaaaaaaaaaaaaaaaaaaaaaaaaagctgtccgggcgtggtggtacatgcctgtaatcccagctactcaggaggctgaggcagagaactgcttgaacctgggaggtgggtgttgcagtgagctgagatcgcaccactgcactccagcctgagcgacagagtgagactccatctcaaaaaaaaaaaagaaggaaagaaaagaaaaatttcaaacttacatagtgaacaatacaataaatcttcacatatgtatctatgaaccagtttaattaacttgctcatggctgtttcatcaatgaccttaccatgagaagaaattttgaagtggaataaaagattcaactaacagaaaaatatatgagacaccattgactcctttttccacgatgagcatcacttattgggctgggcatcacacgagacctactgaataagaatctcgtaggtgggcccagaaatctgtcctttatgaatctctgatttttgtttgtttgtttgtctgtttacttttcttttttcactccccatgatatagagcttgaaagaatctctgatttttgtatatactaaattagagaagcactgctcagactacggtgcttggcagcatgaaaaaaaaaaaacttaccaatttaacaaattaatgaatcatttccaatagctaaaacattaacattcagaaaattggagagttacaagaacttttttttttgagacgaagtttcgctcttgttgcccaggctggagtgccatggcattatctcggctcactgcaacctccctctcctggattcaagcgattctcccgcctcagcgtcccgagtagctgggactactggcgcctgccaccacccctggctaatttgtgtatttttagtagagatggggttttgccatgttggccaggctggtttcaaatgcctgacctcgtgatctgcccgcctcggcctcccgaaatgctgtacaggcgtgagccaccacacctggctctttttagttattattttttctttcctatggtgctggaaaaaaaaatttctgactcatggttcagctttggatttgtcagattgtactctaactaaaggcttttaatattcaaggactgaattactatgtataccaaattctaaggtctactggagagttcaaaagactaaaccatcaaactgcattgtcaaaaatagtcctgatcgttttttggttcctgaaaaatatgaggaaaaaaaaaatagtcctgaccttgaacaatattgttgccagggtatttatgacttcctctttcccaccctaccctcaggggatctttgacccaatgtaaaaagggatttatttttaactcctagtaagtctagcccgcagggagaggagaaacatctaagaatgccttccaaagtttaacaaacaaaaatagaaccttgctctggaacagcatattaacagcccagaagagaatcgccttctcaatttctcagtaggtgttagagaaggaggaagaacatgtgggcagagttgaggaaggtgaagtgatgatgatgttgagagagaagtccagcacctatgacaatgctattatctcgaccttagctgttgctccagttagctgatgtgggataaaatgaagctgttgaccgtaataatacagcaaccaaatagtgaattatctacgtagtgagttatcccaattgattgttcagggtcagttacagatcaaactccttgttccactcttccccatccccccactacggcacttcactagtattaaaagctttttacaaaaataaataaatattatacttaaaatattgcaggacatcagagtatttcagttattgcaaaggggttggaggaagaaggagcaagaggtcccagcctccaggagtaaataagtttaattatgtgaaagaaagagttcaaacttatagcacatagtgtgatgttgaaaaggaaattcaggctgggcgcggtggctcatgcctgtaatcccagcactttgggaggctgaggcgggcagatcacgaggtcagatcaagaccatcctggctaacatggtgaaaccccgtttctactaaaaatacaaaaaattagccagttgtggtggcaggcgcctgtagtcccagctacttgggaggctgaggcaggagaatggcgtgaacccgggaagcagagcttgcagtgagccgagattgtgccactgcactccagcctgggcgacagaccaaggctccgcctcaaacaaaaaaaaagaaagaaagaaagaaaagttaattcagatttaagaaagcatttgtgggccaggcgtggtggctcatgcctgtaatcccagcagtttgggaggccaaggcaggtagagcatgaggtcaagagatcgagaccatcttggccaacatggtgaaaccttgtctctactaaaaacacaaaaaattagcccggcgtggtggtgggcgcctgtaatcccaactactcgggagactgaggcaggagaatggcatgaacctgggaagcagaggctgtgagccgagactgcactccagcctggtgacagagagagaccccgtctcaaaaaaaaaaaaaaaaaaaaaaagaaaagaaaaagaaaaagaaaaagaggccgggcgtggtggctcatgcctgtaatctcagcactttgggaggccgaggcaggcggatcatgaggtcaggagatcaagaccatcctggctaacatggtgaaaccctgtccctactaaaaatacaaaaaatcagccatgcatggtggcgggcgcctgtaatcccagctactcaggagactgaggcaagagaatggcgtgaacccaggaggctgagttgcagtgagccaagatcacgcccctgcactccaccctgggagacaaagcaagactccatctcaaaaaaaaaaaaaaaaaaaaaagaaagaaagaaaaagaaagcatttgtggttttgtttggttttggattgttttttgagactgagacttgcttttgtcacccagactggagtgcaatggcatgatcttggctcactgcaacctctgacttctgggttccagcgattctcccaactcagcctacggagtagctgagattacaggtgcccaccaccatgtccagctaatttttgtatttttagtagagacagggtttcaccatgttggccaggatggtcttgaactcctgaccttgtgatccgcccaccttggcctcccgaagtcctgggattacaggcacgagccaccacacctagccaggagagcatttaagagtcttagtccttttttttttttaaacttgaattgagaaacaacttccaagtggtgaacaagtctcaagcaaatttttttgagacagcctcactcatcacccaggctggactacagtggccagatctcagctcactgcagcctctgcctcctgggttcaagtgattctccagcctcagcttcccacgtagctgggattacaggcgtgcgccactatgctggactaactttcgtatttttagtagagatgaggtttagccatgttgaccaggctggtctttaacccctgagctcaagtgatccacgtgcctgcctcagcctcccagagtgctgagatcacaagtgtgagccactgccgacgctagcctcaaataaatatcttttatttttctttgagaggtaagtttcgctccgttgcccaggctggagtggaggggcgctgtgtcaggaattgggggattcttggtctcactgacttcaagaatgaagccatggaccctcgcggttagtgttacagctcttaaatgtggcgcatctggagtttgttccttctgatgttcagatgtgtttggacttttttccttctggtgggttggtggtctccctgactcaggagtgaacctgcagaccttcacggtgagtgttacagctctcttaaggcaacccgtctggaatcgttcgtttctcccggtgggcttctggtcttaccggcttcaaaagtaaagctacagactttcacggtgagtgttacagctcataaaagcagtgcagacccaaaaactgagcagcaacaagacttattgcaaagaaaaaaagaacaaagcctccaagtgtagaaagggaggccaacatgttaccactgctggcccgggcagcctgcttttattctcttatctggccccacccacatcctgctgattggtagagcccagtggtctgttttgacagggcgctgattggtgcgtttacaatccctgagctagacacaaaagttatccatgtccccatcacagtagctagatagagagtgtcaattgatgcattcacaaaccctgagctagacacagggtgctgattggtgtgtttacaaaccttgagctagatacagagtgccgattggtgtatttacaatcctttagctagacataaaggttctccaagttccaactagactcaggagcccagctggcttcacacagtggatcttgcactggggctggaggtggagctgtctgccagtcccgcaccctgcgcccacactcctcagcccttgggtggtcgatgggactgggcgcgtggagcaggaggccgcgcttgtcggggaggctcaggagcccacggaggtggagcggggaggctcaggcatggcgggctgcaggtcctgagccctgccccatgggaaggcagctaaggcctggggagaaatcgagtgcagcgccggtgggccggcactgctggggaacccagcacaccctccgcagccgctggcccaggtgctaaatccctcattgcccggggccaccagggccggccggccggccgctccgagtgcggggcccgccgagcccaaacccacccggaactcgtgctggcccgcaagcaccgcgcgcagccgggttcccgcccgcgcctctccctccacacctcccgcaagctgagggagctggctccggcctaggccagcccaggaaggggctcccatagtgcagcagggggctgaagggctcctcacgtgccgccaaagtgggagcccaggcagaggaagtgccgagagcgagcgagggctgtgaggactgccagcacgctgtcacctctcagtgcgatttcggcttactgcaacctccgcctcccgggttcacgccattctcctgtgtcagcctcctgagtagctgggacaacaggcgcctgccaccacgccagttaattttttgtatttttagtagagacgagtttcaccttgttggtcaggctggtctcgaactcttgacctcagatgatccacccgcctcagcctggcaaagtgctgggattacaggcgtgagccaccgcgcctggccaatttttgtatttttagtagagacagggtttcagtgtgttggccaggctggtcttgaactcctgaccttgtgatccacccgcctcagcctcccaaagtgcagggattacaagcatgagccactgcgcccggccaatttctctcttttttttttttttttttttttttgagacccagctaatgtttgtatttttagtagagacagggtttctccatgttggccaggatggtctcgatctcctgacctcgtgatccatccgcctcagtctcctaaagtgctgagattacaggcatgggccaccacacccagcctcagtagtaatcttgatggaattctgttatcaatattgattaatattgattaatcagtattttttttttttgagacaagagtcttgctttgttgcctaagctggagtgcagtggtgtgatcttggctcactacaacctccgcctcctgggttcaagcgattctcctgcctcagctttgattttttgtgtgtgtttttgttgttgttgttgtttctttttaaaatatgtatttatttatttatttttgagacggagttttgctcttgttgcccaggctagggtgcaatggcgcgatctcggctcactgcaacctccgcctccaggttcaagctgttctcctgccttagcctcccaagtagctgggattacaggcacgctccactacacctggctaattttgtatttttagtagagatggggtttctccatgttggtcaggctggcttgaactcccaacctcaggtgatccacccgcctcggcctcccaaagtgctgggattataggtgtgagccatgatgcccggcctgttgtttcttatttttttggagatgtcactctgaggcctaggctggagtgcagtggtgccatttcgggtcactgcaacctccgccttccaggttcaaatgattctcctgtctctggctccctagtagctgggattacaggcaggaaccacaatgtctggctaattttttgtatttttagtagagatggggtttcaccatgttggccaggctggtcttgaactcttgggctcaagtgttcctcctgctttgccctcccaaagtgttgggattacaggcatgagccactgtgcctggcctaaaaaacttgttgttatattttttttatttattttttgagacagagtttcactcttgttgcccaggctggagtgcagtggcgtgatcttggctcactgcaacctccacctccagggttcaagcgattctcctgccttagcctcccaagtagctaggattacaggcacctgtcagcatgcctggctaatttttttgtatttttagtagagatgtagtttccctatgtttggcaggctggccttgaactcctgacctcagttgatccgctccccttggcctaccaaagtgctgagattacaggcataagccatagcacctggcctctttttttgttgttgagacatggccttgctctgtcatccaggctggggtgcaacttttgtttttttttgttgttgtttgtttttttttgcagagttgaggtcttgctaggttttccaggctggtctggaactcctggcctcaagctgaggcagacgttaaaataataataataatgagtactgcatttattcactccaagaaaagtaaaagctaaggcccggaatgtggtaaggcaagggttaaaaagaaaagaagaagttttcctatgtaagcagctcacttcaaggacagttataagataatgctgtctgaaaagccaaggccaaaggaatgggcttcagacacccctactttctagagtaaggttgaggaaaaaaaagaaagacaaattgtttttttttttttttttttttttttttttgagacggactcttgctgtgtcgcccaggctggagtgcagtggcaggatctcagcttactgcaacctccgactccctggttcaagtgattcttctgcctcagcctcctgagtagctgggattacaggcaggtgccagcatgcccagctaatttttgtatttttattagcaacagggtttcaccatgttggccaggatggtctcaatctcctgacctcgtgatccgcccaccttggcctccgaaagtgctgggattatcgccctgagccaccccacctggctcaatttccatattaatacattcattttacttgagaaagatatttcactatgtttttatttttttctggtaaaatgttagcaagagtacaaatatacacccacagtatatactttaaccatctaaaaatctttaaaactggctgggcagggtggctcatgcctgtaatcccagcggtttgggaggcctaggtgggtagatctcttgacgttaggagttcaagaccagcctggccaacatggtgaaaccctgtctctactaaaaatacaaaaattcgctaggcatggtgatgggtgcctgtagtcccagctacccaggagactgaggcaggagaatcacttgaacccagggctggcacagtgactgacacctgtgatctcagcactttgggaggctgaggcaggcagattacctgaggtcaggagtttgacaccagcctggccaacatgatgaaaccctgtctgtactaaaaatacaaaacttagccaggcgtggtggctgccacctgtagtcccagcaacctgggaggctgaggcaagaggattccttgaacccaggaggcagaggttgccgtgagccaagatcacgccattgcactccagcctgggcgacaagagtgaaactctgtctcaaaaaaataaaaaataaaaaacaataaggccgggcatggtggctcacgcctgtaatcccagcacttttggaggctgaggcaggcatatcacgagctcaggagttcgagaccagcctaaccaacatagtgaagccccttctctactaaaaatacaaaaattagctgggcatgatggcatgtgcctgtaatcccagctacttggtaggctggtgcaagagaattgcttgaacccgggaggtggaggttgtagtgaactgcactccagcttggccaactaagtgagacttcatctctaaataaataaataaatagaatttaaaacaaaaatgtaaaacaatttttttgctgggtttggtgactcacgactgtaatcccaccactttgggaggccgaggcgggcggatcacccgaggtcaagaatttcagaccagactggccaacgtggtgaactccacctctactaaaaatgcaaaaattagctggacgtgatgccctgtgcctgtattcccagcaactccagaggctgagacaagataatctcttgaacttgggaggtggaggttgcagtaagccaagatctcaccattgcattctagcccgggcaacaagggcaaaactccctctcaaaaaaaaaagaaaaaattttgtactctctctcctaagcccaggaggttgacgctgcagtgatctgtgatcatgctgctgcactccagcctaggtaacagagcaagaccttgtgttaacaaaattttaaaatattattcagctttggccagacatggtggctcacgcctgtagccctagcactttgggaggccgaggcgggtggatcacctgaggtcaggagttcaagaccagcctggccaacattgtgaaaccctgtctctactgaaaatacaaaaattagccgagtggcatgcgcctgtaatcccagctcttgggaggctgaagctggagaatcatttgaatccgggaggcagaggttgcagtgagcggagattgtgccactgcactgcagcctgggtgacagagcgagactccatatcaaaaaaaaaaaaaaaagaaaaaaaattattcagctttaaaaaacaagatcttgccattcacagcaacatggagaatatcatgctaattgaaataagccagacagaaaaaaaaattatatgaactctcttatatatgggatatgggaacagtcaaatacgtatattagcctcctgagtagctgggactacaggcgtatgccaccatactcgcctaatttttttttctttgcacccagaactttcctggcatcagtgagttttaaaatctttgacagagcttaggtcccattaagttggctaagctactattcatctctccacagacgtttagattgtttccatatcttggctattgtgaataatgctgcaatgaatatgggatgcagttatttttacaaggtgctggtttcatttcctttggatatatacccagaagtggaattgctggatcatagggtagttctgttttaattttttgaggaatcttccatactgctttccataatggctgcaccaatttacatttccaccaatgtaaacactttctcttttctccacttcagcaccaacacttgatttgggtggctgggaagtccaagatcaaggccccagcaaattcactgtctggggagggcatgcttccaggttcacaggtgactgtactcttgctgcgtcctcacaaggagaaatccaggagagagctccctgttgtctctcttttttttttttttttttttttttgagatggagttttgctctgtcacccaggctggagtgcaatggcgcgatctcgactcactgcaacctctgcctcccaggttcaagccattctcctgcctccacctcccaggtagctgggactacaggcatgtgccagcatgcctggctaattttttttgtatttttagtagagatgggtttcacaatgctggccaggcaggtctcaaactcctgacctcaagtgatctgcccacctcggcctcccgaagtgctaggattacagacataagccaccgcacccagcttggtgtctcttttttttttctgggacgaagtcttgttctgtagcccaggctggagtgtagtggcacgatctcagctcactgcaacctccacctcctgggttcaagagaatctcctgcctcagcctccagagtacctgggattacaggcatgcgccactgcacccggctaattttttgtatttttagtagagacggggtctttcaccatgttggccaggctggtcttgaacgcctgacctcaggtaatccacctgcttcggcctttcaaagtgttaggattacaggcttgagccactgagcctggccctggtgtctcttttataagtacactaatctcattgatgagacaccactcttattacctaatcacattccaaaggctctataccctaataccatcacactggggtttaggatttcaacatgttaatattgagggggtagaaacattcaattcatagcaataattttttttaattttttttttttgaaagggagtctcactctgtcacacaggctggagtgcagtggtgcaatcttggctgactgcaacctctgcctcccggattcatgcaattttcaggcctcattctcccaagtagctggaattgcaggcgtgcatcaccatgcccggctaatttttgtatttttagtagagatggggttttgccatgttgggcaggctggccttgaactcctagcctcaggtaatctgcctgccttggtctcccaaagaaattatatatatatatataaatatataaaaatacatatataaatatataaatataaatatattttaatatatttatatattatatataattaaatatatatatttaattttaaatataatatttaaatatatttaactatttaaatataatatttaaatatttaaatttaaatagaatattaaatataatatttaatatataatttatatataaatatatatttatatatgtatttatatataatttttatatatgtatttatatataatttatatataaatatatttatatataatttatatataaatatatttatatataaattatatataaatatatatttatatatgtatttatatataatttttatataaatatatatttatatatgtatttatatataatttatatataaatacgtatttatatataatttatatataaatacgtatttatatattatttatatatttatatatttatatatgtttatatagttatataaatatttatatatatttttatatattttttatatatttatatacatatttatatatatttatatatatatttatatatttttttgagatggaatcttgctctctggcccaggctggagtgcagtggcgtgatctcggctcactgcaacctccacctcccgggttcaagcaattttcctgcctcagtctccggagtagctgggattacaggcgcatgccaccacgcccggctagtttttgtcttttcagtagagacggggtttcaccatgttggccaggctggtcttgaactcttgatctcatgatccacctgcctcggcctcccaaagtgctgggattacaggcatgagccactgcatcctgcctaaatatacttttaaaatactgattgcaaaggccaggctgagatgaacattttagtacctactttttggtgaatatatgtatacatttctgttgagtgtatacctaggagtggaattcttggatcgtggggtagccatatgttctaataaatattgccaaacaatttatcaatttgtaccccattaacaaatgtgtgagagttctgaatgttccacattccccaggtttggcattcacttccttttttctccacaccccaactcccatctttgttttagtcattctagtgggcacgaattggtatctcatgtagttttaatgtgaagttccctgatcaacaattcagttgcatgccttttgacatgtttattgttgactgagatatcctcatttaagaagtgcagtatagacccttttaatggcccttgtttgctattgacttgtcaaccctgtactgaaggccatgctgtcgtggtaaggctccaggtaattccaaggtaagccttatgcttgggctaggggagaacaatctctccaaaacaccttcgtgctgtctgcaggggccttaccctggatggcaccaatggggcagcaggggatgatctttattactccaaagccgaaaacctagagagtcttttccaggaggtggagagaacgaccgcggggcttttcatccaaaaagagctcctgagtctgaaataactgttttgtttgtttgtttgtttgtttgtttgtttgtttgttttttgagacggaatcttgagctgttacccaggctggagtgcaatggcggagttcagctcactgtaacctccgcctcctgggttcaagcgattctcctgtctcagcctcccaagcagttgggactataggagcgcaccgccaagccccctaattttgttatttttagtaaagactgggtttcgccatgttggccaggctggtctcgaacccctgacctcaagttatccgctctcctcggcctccaaaagtgctaggattacaggtgtgagccaccgtgcgcggcccgaaataactctttacaggatctcgccctgggccttcccagcccagccggcccgcccgcggggatagcccgggcactatctccctgctgcaggcggtgaggggctcgggtatctttgaaaatagatacgttcacaccctcctaacggcggcgccaagggtggtgggtcccaaaactgtttccccgtaaagagttcccccgcccggtcgcaggaagacgcctgagggggcgctcggagggatccccagcagccgccggggctggaccgtgcggtgcgcaggtgagaagccgggaggggccggacaaccccgaccgcgagccggacccctgctctgaccgcaggtgggtgcttgtcttgcttacggagggctcccgatgaaccgagtcacgttttgtaaccacattaacggaccattcaaagtcgaatcctaggcttttcgaggcagttagtgggtcccaacggctgcaggcggggccggcgggggcgcagcggcccgggaggtgcgtggttgagcgaagccgcggggcccaaccgcagtcgcggggtctgggaggtgggtgcgccgcgccgtccctgcggccggggggtgcgggaatgaggacctgagctggggtagaggtggccgagctagagtagaggtgggcggctactcggaggtgggccgggctaagaaagaagagagctgcggctctgggaaactagccttggagccttggagaagagatttgtgatttactgagcacctactatgtcctgggctccgctctaggtgctgggatcccacagcaaacgaagccaccccagcccttgccttgctggactgtatattctagggaagagacagacaagaaaatgtatagatacgtaacaaaatgccgtaaatcttcatgaataaaaatgtagtagggctaggggagtggactgtgaagttgggagtggggaaggggtcggtctgagaggcctttgtgaggaagtgtcttttggcaggagacctgaatgaaatgagggagccttgggagcatgatccaggcggagggaactggattcgggaggaggaactgccttggccttgaaagatacctaccaggagttcaagtgctgtgcgggtgcatcagctttgtagatttgtgcaagatgaaaattggaattgtcttaggaaattatggatcattcatttattcagtgctggattcattcagtgatttatgtctgaagtgtgacagaaggggagtaaggccaagtgtccttggtaaaatactgttattagttttgtcccagtttaatacacagactaaatttagaatttccattgatttttaagaagaattaatctgagttaattttacagataaataaatagtaccttactttttttttctttttcttttttttgttttttttccatgctcagccctctattggagattctgcctcccctgggacagatggcttcttgagcacactcccacgatgggtggctgctctgggtgggtgtgcgctggtgtctcaacagggtgtaggggaggagtctagtgtcctgtcctctgagaggggactttggtgaacttgtgtttgggtggggatgcatgtgaaatggtattggatctcaggactaagggtcccttcctcctgggggcacacaggttcccttcctccttggggagcagcccaggaatggctgtcttgggggctttctctcagtacctccaggtcctggaggcccatctcttcataaggcggtctttccctggaggggtcagagactccagcccagggccctagggtcacagtgagaacacctgcctcagtcctgcactgcacttctcttggcgtgatttctccactgggagctgggacccgaagccctcaaagggaggatcccctgagagaaggtcgtgggcagagagctggtacagaccagtgtgtgccgggggtggggagatgactggcgggggggccagggtgtcgcgagggctggggtggcctagtcatctttgcccttggcgccatgtatgaggatgcaggtgaactccacctagttgaacttgtctttttttatcaatgggtgcctcccagtacatctcatccacttcttcatctgtgaagctgtcacccatggtggtgagcagctcctggaggtggtcctcatgaatgaaacctgaggattcctcgttgaagcaggtgaaggcgttttggatcacatcctgggggtctgttccattcagcttctccccaaacatggtgagggaagtggtgaagttgatgggccctggggcctcgctcatcatgccctgcaggtattcatccatggggttcttccgcggtgaagccagcttgtcgtgctgtcccccttgtcattgaagccatcatggttctggtcaatcatgttgaaagcctccttaaactcctggatgtggaactggtcgaacatcacgaagacattggatgtggccccttgtgctgtggtcgcttcttggtggtcttggctttggtccacttgctgaacattttggcttcaggtgggtgggggcttcactgggttcttggagctgggctgaccatactactttactttttttgaaaagtatatttatttgagttaaaagagttctgaggttttttttggtttgactttatttgttttttccaagtgtgaatgacctagaagataagaactagctgatacaggaacaaaaacagtgaggcgcagggtggggaaggtagcagagagaaatgaaaatgaaataaggaggatgtggaatagtggaagggacagtctgtcctaattctcctcctcctaatagactcaggaaataacacaggtgttcaacataacgtatctcagcagaccttcagaactatcagtccaagtcagcagagctggtagaggaggaaacagactcacatttggtaactggttaagcagaatcacgacttccaacttcactgtggctcactgaagcagtttaggctaaggtgatgctatgaggagaggtggcttgttctaagtgttttaaattttatatggcaaggtaaaccacattaaatcacagaattttatgacagcaagattacctaatccaatccttgctcattttgcagatggggaaactgctagttggtgacagagaaacaactcaaaatataggagagacatttttaccttaccttcagctgtctctccccagaacccttatttgaaaaaatgcttctcaatggctactgaatgagtagaataaactttgttgaggatcccagaattgagttaatctaaaacatcaatagaattatataaattttcacttttcttccagaagtatttattggagtgtccattggcgagggggctaaatcacagcctcttccctcaaggagcttaagtagatggagtaaatgaataactagacaattacaatttacaggaagcagtaccttgaagagaaattggagagggagtcaattcctaggatagcagagagatggacaacagacagaatgtgagtattaaaactgatgtcagatatcaaattggtttgtcagagttatgttgataatcacagtacctatcatcttcctaaacttttcatgtcttgataatgtgtaatatacgtaagtggtggtgggagagactgttacagccaacagacttggtacattcccaaaatctttttattcataagcaattactctttgccatttgcagccttttgtgctttaatattatcaagaacaagacgaatgataaaatatttatgatcagcattgtaattgcaaacaggcctccgtaataatcatatgcaactggttttgcgggaatttccttggaaagaaccatggctatatacgcgtgaagagtaacatagagtaatatatgaatgtacacagtaataataactttttctagagcagactatagagtgtaactgagtcattgtacttgcatactgtgataaagatcaagaaaatgtattcagcaacatatgagcctttggattgggctggagggtaggataggcagcatctggtggttaagttacgtaatgcctaatttgccacatgtgctcacctctggaaagactcactaaacttattttctgggaacttacccgcatcttgaatgctttgcatctccaactcccagattttttctgaacattttaatgtgacacttagagaagcagagcatacttagtcaacactgttttttttttttttgagatggagtttcactcttgttgcccaggctagagcgcaatggtgtgatctcggctcaccgcaacctccgcctcctgggttcaaacgattcttctgcctcagcctcccgagtagctgggattacaggcatgagccaccatgcccggctaattttgtatttttagtagagatggggtttctccatgttggtcaggctggtcttgaactcccgacctcaggtgatctgcccgcctcggcctcccaaagtgctgggattacaggcttgagccaacgagcccggcataatttttttgtatttttgtagagacagggtttcgccatgttggccagactggtcttgaactcctgatctctggtgatccacctgcctcggcctcccaaaatgctgggattacagccatgagcgagccactgtgcctgaccagacatattcttttattcaagtattttttctctaacaaaacaagttacaggctaatatgtagcttttttctgggaagatgtagtagttcttcatgactcatttattcactgaaatatttctcgagtagctattatactacaggcactcttggtgcctatgactaccctgatagagaaggaagtgataaattctaagaagaaaaataaagcaagataaagggatagaaaatggtggaatggacggggaggattttgattattctaaatacaggcatacctcagagatagtgcaggtttggttccagactgctgagagaaagctaatatccaataaagtgagtcagaaatactttggcttcccagtgcatataaaagttatgttacattatactgttgtgtatttcctgtacaatagcattgtgtctaaacaaaatgtatataccttaatttaaaaataccttcttgctaaaaaatgctaacaatcatctgagccttcagcatgtcataatctttttgcctctggagggtcttgcctcagcattgatggctgccgactgatcagggttgtggttactaaaggctggggttggctgtagcaatttatttaagtaagacaacaatgaagtttgctgcatctattatagactcttattttcacgaaggagttctctgtagcatgtgatgctgtttgatagcattttagccaagtagaacttctttcataattcgagtcagttctctcacactttgttactgctttattaactaaatttacgtaatatttgaaatcctttgctgtcatttcaacaatattcacaacacgtttactaggagtagattccatgtctagaaacacttcctttttttttttttttttgagacagagtctcactctgtcacccagtctggagtgcagtggaacgatctcggctcactgcaacctccacctcccaggttcaagtgattcttctgcctcagcctcccgagtagctgggactacaggcgcacgccaccacacccagctaatttttgtatttttagtagagatggggtttcaccatattggccaggctggtctcaaactcctgaccttgtgatctgcctgcctcagcctcccaaagtgctgggattacaggtgtgagccactgagcccagccaagaaccactttctttgcttatgcataagcagcacctcctcatccattcaagttttcttatgagattgcaacaattcagtctcatcttcgggttccacttctaattctagttctcttgctatttctaccacatctacagttacttcctccacttaagtcttgaacccatcaaagtcatccatgatggttggaatcaacttcttccaaagttctgttaatgttgacattttgacctcctcccatgaatcacgaatgttttttttgttttttttttttttttttttgagacggagtctccctctgtcgcccaggctggagtgcagtggcacgagatctccgctcactgcaagctccgcctcctgggttcaagccattctcctgcctcagcctccagagtagctggggctacaggcccccgccaccacgcccggctaattttttgtgtttttagtagagacggggtttcaccgtgttagccaggatggtctcaatctcctgaccttgtgatccacccgcctcggcctcccaaagtgctgggattacaggcgtgagccgagattgagcaattgcactccagcatgggcgacaaaagtgaaactctgtctcaaaaaaaaaaaaaaccatgaaagtcctagatggcatcttcctccaatgtaaggctttttcatctacactgaaaatctgttgtatagtgttgccacttttatcaattatcttagctaaatctggataactagttgtagcttctgtatcagcacttgctgcttcacctaccttgtacttttaagttatagggacagcttctttccttaaacctcatgaaccaacttctgctaccttctaacatttcttctacagcttcctcacctttctcagccttcataaaatgaaagaaagttggctgggcccagtagcttatgcctgtaatcccagcactttgggaggctgaggcgggtggatcacctgaggccaggatttctagatcagcctggccaacatagtgaaaccctgtctctactaaaaaatataaaaattagctgggcgtggtggcaggcgcctatagttccagctacttgggaggctgaggcaggacaatagcttgaacccaggaggtggaggttgcagtgagctgagatcatgccactgcactcactccagcctaggcgacagagcaagactccatctcaaagtaaaaagaaaaaattaaagaaagttagggccttgctctggattaggctttggcttaagaaaatgtttagtggtctatctagaccactaaaactttctccatatcagcaatacatctgtttcactttcttttcttttttttttttttttttgagacagagtcttggtctgtcacccaggctggagtgcagtggtgcaatctcagctcactgcagcctctgcccactgggttccagcgattctcctgccacagcctcctgggtagctgggattagctgggtacaagcgcacgccaccatgcctggctaatttttgtatttttggtagagacagggttttgccatgttggccaggatggtctcgaactcctgacctcagatgatccacccgcctcggcctcccaaagtgttgggattacaggcgtgagctaccatgcccggcccctgtcacactttcagtgtgttcactggagtagcacttttaattttcctcaagaacttttccttggtatttatagcttggctaactgtttggtgcaacaggccttgcttttggcttctcttggcttttgacatgcctttatcactaatcttaatcatttctagcttttgatttaaagtgagatatgtttgactctttcacttgaattcttagatgccatttagggtttttaattggcctaattttcaatattattgtctcaggaaatagggaggcctgagaagagagagaaggagagagaaatggggaatggccagttagtggagcagtcagaatgcatacagtatttattaattagatttattgtctttttttatttttattttcatttttttttttgagacagagtctcactctgccgcccaggctggagtgcagtggcacgatctcggctcactgtaacctccgcctcccaggttcaagagattctcctgcttcagcctcccgagtagctgggactacaggcatgtgccaccacgcccggcgaatattttgtgtttttagtagagatggggttccaccatgttagccaggatggtctcgatctcctgacctcgtgatccgcccaccttggcctcccaaagtgctgggattacaggtgggagccaccgtgcccagcctgcctggctaatttttgtatattcattgtcttatataggtatggttcatgccaaaacaatgacaatagtaatatcaaagatcactgatcacagatcactataacagatataataataacgaaatgtttgaaatattacaagaattaccagaatgtggcacagagactcaaagtgagctcatgctgttggaaaaatgaggccaatagacttgcttaacataggattgccacaaaccttcaatttgtaaaaaagcgcaataggagcaaaatgcaataaagcgagatatacctgtagtgtggtcagggaaggcctctttacggtaaatttgagcagaaaccagagtgacataaagagccggccatgaggagatctgaagaaagagtgtttcagatagagggaaaggcatatgaaaataccctaagagtatggaggcttatctgattagagcctgggtcggctgactctttttgtgcagatagaggctttgtgggccatagcggctcagtcaccactacagctactcagttccaacgtcatagcatttaagcagccacgttcattacataaacaagtgagcatgcctgtgttatagtaaaagagacttaacagtaaaagctcagccgggcacggtggctcacgcctgtaatcccaacactttgggaggccgaggccggcggatgatgaggtccggagatcgagaccatcctggctaacatggtgaaaccccgtctctactaaaaatacaaaaaattagccaggcatggtggtgcgcacctgcagtcccagctagttggaaggctgaggcaggagaatggcttcaatccgggaggcggaggttgcagtgagctgagattgcaccactgcactcagcctgggcgacagagcgagactccatctcaaacaacaataacaacaacaacaaaagacgttaaaagctcaaaccacaagaggaaaaattgataaatttgggcttatcaaaatgaaaagcttttgctctgcaaaaggccccatgtatatggtgaaaagataggctacattcagagaagatatttgcaaaccacatatcccaaaggatttgtttctagagaatgtaaagcactctcaaaattcagcagtaagctgtaatcaaaacaatgtggtggccgggcgcgggggctgacacctgtaatcccagcactttgtgaggccgaggcgtgcagatcacgaggttaggagatcaagaccatcctggctaccacagtgaaaccctggctctactaaaaaacacaaaaaattagccaggcatggtggcacatgcctgtagtgccagctactcgggaggctgacgcgggagaatcgcttgaacccgggtggtggaggttgcagtgagccaagatcatgccactgcaccccagcctgggcaacagtgagactccgtctcaaaaaaaaaaaagaaaaaaagaaaaaaaaggaagatggttgatatagggagataagttttcatctgaaataaaaggaagttaggcttttggcttccaaagccaaaagatgtggctcacaggtttctccataaacagtatgtttgtcatttagtttatatgtcaatgaattgaatgagctatgtccgtattccaaggtttattttttatttttttttaagatggagtcactctgtcacccaggcgggagtgcagtggcacaatctcagctcactgcaacctctgtgtcctgggttcattctcctgcctcagcctcccaggtagctgggactacaggcatgcaccagcacacccagctaatttttttgtatttttaatagagatggagtttcacaatggtggccatgtgtctggaattggtgggttcttggtctcactgacttcaagaatgaagccgcacaccctcgcagtgagtgttacagcccttaaagtggtgcgtctggagtccctcccttctgatgttcagatgcgttcggagtgttttccttctggtgggttcgtggtcttgctggctcaggagtgaagctgcagacttccgccgtgagtgtcgcagctcttaaggcagcgcgtcaggagtcgttcgttccttccggtggcctcgtagtctcgctgggctcaaaaatgaagctgcagacctttgcggtgagagttacagctcataaaagcaacgtggacataaaaagtgagcagtagcaagatttattgcaaagagtgaaacaacaaagcttcaacagtttgaaaggacacccaagctggttgccaatgcgggcttgggcagcctgcttttattctcttatctggccccacccacatcctgctgattggtagagccgagtggcctgttttgtcagggggctgattggtgcgtttacaatccctgagccagatacaaatgttctccacgtgcccatcagattagttagatacagagtttccacacacagattctccaaggccccaccagagcagctagataaagagtgtcaattggtgcactcacaaaccttgagctaaacacagggtgctgactggtgtatttacaaaccttgagctagatacagagtgccgattggtgtatttacaatccctgagctagacataaaggttctccaagtgcccaccagactcaggagcccagctggcttcacctagtggatcacgcaccggtgctgcaggtggagctgcctgccagtcccgcgccatgtgctcgcattccttagctcttgggtggtcgatgggactgggcgccgtggagcagggggcggcattcgtcggggaggctcgtccgcacaggaggccacagagggggtgggaaggctcaggcatggcgggctgcaggtcccgagccctgccccgtgggaaggcagctaaggcccggcgagaaatcgagcgcagcgccggtgggctggcactgctgggggaccctgtctcggccttccaaagtgctggtattacagacatgtgccaccgcatgcagtttggtgtcttcttttttttttttttttttttttttgagagacaagtctggctctgtagcccaggctggagtgcagtggcgtgatctcggctcactgcaacctccgcctcctgggttcaagcaattctgctgcctcagccacctgagtagctgggattacaggcatgcgcgaccatgcccagataatttttgtatttttagtagagacggggtttcaccatgttggtcaagctggtctcaaactcctcacctcgtgatccacctgacttggcctcccaaagtgctgggattgcagacctgagtcaccacactggcctttgtttttgtttttttttttttgaaatggagtctcgctctgtcgcccaggctggagtgcagtggcgtaatctcagctcattgcaacctctgcctcccgggttccagcatttctcctgcgtcagcctcccgagtaggtgggattgcaggtgtgcgccaccatacctggctaatttttgtatttttagtatagatggggattcaccatgttggccaggctggtctggaattcctgacctcaggagatctgctgcctcagcccctcaaagtgctgggattacaagggtgagcctccgcgcatggcctgttttttttcagttaaagtttacaaagcttttatgtatggtttgtatggttttcgggacaagtgaagggctgaaacttagttgtgcggttttgtgggataagtagaggctgaaatacagcctgcaatccactggccaggctctcctcctcatccagaggaaggggcacattttttctttacacaagagtaccgttcctagaaaacctgctttttcccaaaagggcacctttgcctaatttgcacaaaagcaatggaaaagctagcagtggtactgaaagcatgtataccagataatagacagcagaaattaatccctggaagctacttaaacataaaaaaattttcttagatgtcaacttaaaaatgtgtaggggaaatacatagtttttgaaaattattatggggaataaacaagcctcccccccaccaaaaaaaagactattgctccaaactctcttccaatgttgctctggtgccttttcctcaccttgcactacagatcttcacatctcccctctctctttggttcttccttttggctgcttctttctttaaacaactgataattaatttatgaaaacagttgatgccgggcgaggtggctcacgcctgtaatcccagcactttgagagaccgaggtgggtggatcacttgtggtctggagtttgagaccagcccgaccaacatggagaaaccccgtctctactaaaaataaaaaattagctgggcatggtggtgcatgcctctaatcctagctactcgggaggctgaggcaggagaatcgcttgaacccaggaggcagaggttgcagtgagctgagattgcgccattgcacttcagcctgggccacaagagtgaaactctgtctcaggaaaaaaaaaaaaagttgacaagtaagtgcagtggggagcagcctcaattcctgactcaatactgatggaaacaatctgtttaacaacctcagaaggactgtgtgaggcagtgagtcatctgtggattctcatctggaaatgatcccaaatcccagaaccctcaccataaggcgtttttcttgcagtgatttatggagtcttggcattccaactggtccttcatgctgggattcttttcctttgtgcctctgatccaatcagcgcacaccttctccaaggatttcccgctgtggctggttggggtaatcctcattcagtgaattatcacctctggttccaagagtgtatttccggagttttgtaaagcctagggcagcgtggctatcctgaccaactagttcctaaaggaatggccaggaggacatggctgtccctccaagagccccctactactttttagacctcattatactctcgccctgaggcaatttcctttccttttatcttctgcctgatattttccctaaatgttcccaaatttatcctcttctctgagggctttgcttcttcaggcctaactaaatacacaatccacaagccactgatctcacctcagctgtacctgtgctaattctcacttccagtttttctccagggccagtactgggagggatggcgcaaagatatacactgccacctggtggccaactgctaaccagctctggtaataccaaggatgttactagcaccacagcaacgggctctggaggcggatttgcaaaagcaccaggcgtgggtggagcagtgtcagctctttggttggtaatagcatctctctgcctggaattatctttccaagtctatttctctcaaaattcttttcatctttcaaggtccatataaatgccacgtttcccatgatccccttcttgatctttcaagttagaggatctcacttctctgaaagtactacagggtaggttcagcatttcgtttgtaactcttatgatgctgctctttgcctacttcaaactgttgctaatcccttaaaaactcagcttcttttcagtgcatgccatcaggatattgtaataatctactgaactcctgggtcacttcccccacattctctgaaaatttagaagcctgattcattctcttggttttcaccattcctactgtcatcagtcctggctattccatgatgtatggagacaactggccctcagtttcttgtccactcatttccaatcatcttgttttccagtccacctcagtcatttattcccatggttaataccctagccctggtcatgtataataaatgggctccttgcaaaacctgtatattttgcacctcacattgactatcacttcctttccaaaatttatttcctttttttttttattttttgagacagcggagtcttgctctgtcacccaggttggagtgcagtggcaccatcttggctcatcgcaaccactgcctcctgggttcaagtgattctcctgcctcagcctcctgagtagctgggattacaggcatgcgccactacgcctagctaactttttgtatttttagtacagacagggtttcaccgtgttcgtcaggctgatctccaactcctgacctcaggtgatccgccctcctcagcctttcaaagtgctgggattacaggcaccagccatcacgcccagcctgttcaactgatttttgacaagggtgccaagattattcaatgggggaaagaatagtcttttcaacaaatggtgaagggagaagaggataactgtatgccaaaaaatgcaactggacctttacctcatactgtatacaaaaattaactcagaatggatgaaagtgctacaaccataaaactcttagaagaaaacataaatgttaatgtttgtgatcttggattgggtaatgatttcttagctatgacaacaaaagcatgagcaaatgaaaaactgggtatattggatatattcaaaatttaaaatttggggctgggcagggtggttcacgcctgtaatcccagcactttgggaggctgaggcaggcagatcacctgaggttgggagtttgagatcagcctgaccaacatggagaaactccatctctactaaaaatacaaaattagcagggtgtggtggcacatgcctggaatcccagctactcgggaggctgaggcaggagaatcgcttgaacccgggaggcggaagttgtggtgagctgaggtcatgccattgcactccagccttggcaataggagcgaaactccatctcaaaaagaaaaagaaaagaaaattaaaatttttgtgtttcaaaggatacccaagaaagtgaaaagacaacccacagaatgggagacaattatagcaaatcatgtgtatgataaggggcttgtatctagaatatgtaaagtccttttacaactcagtaataaaatacaacccatttatatgaacaaggagagaatgataggttttgtcagatgttgagtggttgagtaagaaggctcgagaattgaccattggatttcataagatagtgtttgttgatgactgacaggaatggttcaaatagagaaatggggcaaatgccttactggtataggttcaatagggaattatttaaggaaatggagaaattttgtttttgttttttttcagataagagttttgctgtgtcacccaggctggagtgcagtggcacgatctcggctcattccagcctccacttcctgggctcaaacagtacttattgcctcagcctcccaagtggtgggattaaaggtgcaagccaccacaccaggctaattttaatttttttgttgtttttagtaaagacggggtttcaccatgttggccaggttggtctcaacctcctggcctcaagtgatcctcctgccttggcctcccaaagtgttcatgtcaccatgcctggcctggaattttgctttaaaaaggaccatatgggccaggcccagcagcacctgcctgtaatcccagctacttgggaagctgaggcaggagaattgcttgagcccaggagttcaagaccagcctgggcaacatagggagactctctgtcaaaaataaataaaagggagcgcagatatagggtactgttctatcctctcaagctgaaggtaagatcaagagaactatttaatttttagaaaggaatatatgtgtttgttttgttttgttttgagatggagtttcactcttgttgcccaggctggagtgcaatggcgcgatcttggctcgctgcaacctttacctcccagcttcaagtgattctcctacctcagcctcccaggtagctgggattacaggtgtgcaccactgcgctcgggtaattttgtatttttaatagagacggggtttcaccattttggtcaggccggtctcaaacttctgacctcaagtcatccacccaccttggcctcccaaaatgctaggattacaggcgtgagccaccgtgcctggcctatatgtgttttatgaatggtttttgtttatgttttttgtttgtttgtttgttttttgagacggattcttgctctgtcacccaggctggagtatagtagcaagatttcggctcactgcaacctccacctcctgggtttgagcgattctcctgcctcagcctcccgagtagctggaactacaggcacgtgccaccacacccagctaatttttgtatttttagtagagatggggtttcaccatgttggccaagatggtctcaatctcttgacctcgtgatccgcccgccttggcctcccaaagtgctgggattacaggcgtgagccaccgtgcctggcccaaccatcttcttaattctaagacaaatatactctggaaattagggtttgtttaccaattgatccttctaaaactttgcattccaacctgagcgacagggcgagactctgtctcaaaaaaaaaaaaaaaattagcattcattaatacccacttcaaaggcttgttaatacagatttcctgatcccactctgctgaaattgtgactcagcaggcctggggtggagccgagaatttgtatgtctaacagcctccctgaagatactgatgtcattcatccatggataatcacacttggataaagtagggtggtgctccgtttaatcatctccatcgatgccgtcaatagtgctcttcctcagcagctatgcactcttaaattgtgcatcttgcaccacagtaaaagtttaacatgggttagagatagcttttcttttgcaaagtagaagaaagtagcgaaaagtagaaaagaaaaatgagcaaaccacacacattagtttttgagacaggatcttgctatgttgttctggctggagtgcaataactggctattcacaggcgccatcccactgcggatcagcacgggacttatatgggccatgctctgtggagaagctagttcacttctccttaggtaactttgtggtcccccgctcgtgggagattatcatactgatgccaaacttagtgtcaacacctgatgtgcaaagcacacttcagcccagaactgctggcctcaagtgatcctctcgcctaagcctcccaactacctgggattataggcacgcaccactacgactgggcaggcacattcttaagaaaaccagttttaggaaacaaaacccatgaaagctgaagttttggaaaatgactttgttaaatacgtgtaatcaacttagtcagaattttacatgtctggttttgcattaaaaatataaaaatttttacaatatgatatggctaattataattataaaatgattttttaaaagtctacttcatgttgtgaggctggtgcattgagagggagcttttgtaagccaggcgcggtggctcacacctgtaatcccagcactttgggaggctgaggcgggcagatcacgaggtcaggagatcaagaccatcctggctaacatggtgaaaccccgtttctactaaaaatacaaaaattagccgggctggtggagtgagcctgtaatcccagctactcaggaggctgagacaggagaatcatttcaacctgggaggcggaggttgcagtgagctgaagccgtgcaactgcactccagcctgggcatcagagtgagaccctgtctcaacaaaaacaaagaaaaagaaaaaaaaaggagcatttgtggaagaagcagtggtacatgtgtaaacgtttcgggtaagggtggcatcacactggttgaggagaacaggcagctgcaggggtagtaatggcctgtttagatttcttcttaagctcccaactttgctgatacagccatttggggagcaagggggtggtcatcaaaaaacaaacagagagttgggcgcagtggctcatgcttgtaatcccagcacttttggaggctgaggcaggaagatggcttgagctcaggagtttgagaccagtctatgggcaacatagggagaccccatctccaagaaataaaaatgaaaacaaatagaggaagcatgcttttgttttacctgccctccctgaaaagaaattgaaattgacataactgtcttaagaggatgtaaagatggaatgcctaatgtccagagtgggaatcaaggggttactctgggaagtgatgaagactggacagatgatgctcattgatttcccaagctatatataaagtgcgatacctggctggatgcggtggctcatgcctgtaatcccagccctttgggaggccgaggtgggtggatcacgaggtcaggagttcaagaccagcctcgccaacatggtgaaaccctgtttctactaaaaatacaaaaattagctggtcgtggtggcagacacccgttatcccagctactcgggaggctgaggcagagaattgcttgaacacgggaggcggaggttgcattgagctgagatcgcgccactacactccagactgggtgacagagcgagactccatctcaaaaaataaaaaataaaataataaagtgagatgcctgtaatcccagaatttcgggaggtcgaggtgggcagatcagctgaggccaggagtttgagaccagcctgaccaacatggagaaaccccatctttactaaaaatacaaaattagccgggtgtggtggtacatgcctgtaatcccagctactcaggaggctgaggcaggagaattgtttgaacccgggaggcggaggttgccatgagccgagatcgcactccattgtgagccattgcactcgtgggccattgcactccagcctgggcaaccagagtgaaactccatctcaaaaagcaaacaaacaaacaaaaaacaaaagaaaagagaggaatcagtgagactcattaggagactacttcagtagatcaagggacagtttataatggctttgacaagtatggtgtagcagacatgtgcgagtggaaggaatctaagagtattttggagataaaggtaacagtttttgttggtggattagatatggaaggtgtgggaaagagaaaaatcctgaataactcctagcttttgcaatttggtgaacagtgataaaatatttactgagatgtaaaagactagagaaggaaaagatttgggagtttgaaagataaacaggacttctcctttggctatgcttaatttgagaggctttttgaccacccagatacaaataagacaggctatagatatatgactctaatcacttctcagtcttttggccaagatcaagtgatattgactctggaagtcagggggaaagccatcattgaaaaacttaactaacttacgagacaacccattatattttggatagctctagttatcagaaagttcttgcagttacactaaggtgactataaatgttatataaatttgatgctcatttccattcagggttcctgaaaagtacacacttttctaagcacattcaatattggaagaaagttatcacattctccatcttttattttctgagctaaacaatcaattctagtttctccagctgttcttcatgacctgtttctagacatgtcatcatcctggttggtcatatgccatataaggtaggatgccaaggactaacgtgaccagaataatcatatacaaaatgtaagactgtcatccctcggatttgccattctttcagaaatatgtttgccttttataattcatctgttttctttctttttcttttcttgagacagcatcttgctctgtcacccaggctgcagtgtagtggtgagatcttggctcactgcaacctctgtctcctgggttcaagagattctcctgcctcagcctcccaagtagctgggactacaggtgcgccaccacgcctggctaatttttttttttttttttttttttgaaatggagtctctctctgttgctctggctggagtgcaatggcatgatctgcaacctccacctcccgggttcaagcgattctcctgcctcagcctcctgagtagctgggattacaggcgcgcaccaccatgcctagctaatttttgtaattttagtagagacaaggtttcaccatgttggtcaggctgctctcaaactcctgacctcatgatccatccacctcagcctcccaaagttctgggattacaggcatgagccaccatgcccagccctgttttctttcttattgtcattagtgtgtcagtgttcctacctgtggcatacaatgtctcttcttattttcatctaatccgttgttggattcggaaatcaaataaccaattgaagctatcagatattaacattttgctttgtatgtttgggatattttgtaataatttaaaaggagagagagagtatgtgcttcctgagagagaccaaagcctttctatgagttgtgctttgaattttagtgagaaaacctttcttttttctctgtttcctcctgcctatatacaaaataaatgagtttcccaaacagttgagtgtcagatgggtgaggtatttcagccttttgcacaggatctcattggagattttctgagatgtcttgctgaaatcaaggtgcatggtgtctaaggcagtggttctcaaacagtggtgacttgctcccagtggacatttggcaatatctggagatatttttgttgtcatgattacaagaaagggattacatatttctagtggggagaggccagggattctgctaaccattctgtaatgcatgggacaagcctctgtaacaaagaattgtctggccccaaatgtcagtaatacctatatttgggactatggtatttctctgattttattaactttatgggaaaaagttagaaaagttttaaacttactgaaataattctacttccaactaatcactgctctcttcttttattacatagaaatcatctgtgaataatctttctagatggggaaaaaatgaagcactgcttttttccacttttgtaaaatggaaaagtttacatttttctgtcaccattctcaatctacataatttttttaatattaacagtgcccgatgattaaatttggacactatgttcatatactgttatttaaagaaaaattatactttcaccatatctcattttcctttctggccttctgtttctcttccccacgtttattcatttgttacagttgtaaggtttttcttgaggaggtaagtaatcctgtttttcttctgtcatctctaaaaactaagtaaatacaatacaacttaaactagaagctctgttcttatcttttaggacccctagtgagacatgtagctattttggaatgaggctatactaatcatgttgactagctacttattagtgagagagatgggggcagaagtcactgtcccgtcaccaggtagataagaatgtgggagacaaagaatgatgctgtctctgcacgtcctccacgtggggacattggaatcttttcctggggctgtggcatttcttttgtattgactgcagctgtcaggatcaaagaagagctaatgagacaaaagtaaatagcttcattctcaggctacctgagaggagcaatgtctaatggagattaaaagatgaaaggggagaaaaattctttctcagccatacccagatacaactaagtcactgttttcacatgcttctgattcttcaaattctatgttaaccacttagaatctagtggcaaaaataatcttttcctaatgcttttttacttattacattttcattattttaaagatagaggacagtaatgtttcctgatctcaatgcttttatatttagagctagagatttattcagtcagctagtcatttattaaattattattgactatgtctatatgttccagacccaaacatgaaccagggaaaggctccaaaaacttggcagtttcaagtatatatttgaaagaggattgataagtgaacacctgatttgtagttgaaatatttatataatttttcacctttcttccggggtgatgactacttcagatgcattggtcaggaagtatttgttagggctgtgtatttgtagaacccttgagactgcacagaataaaatagctagtatccttcttcagccataagaccaccttctagaattagagaactgagacacaggtttaatgacttaagttttcagcacagtctgtagcgtagtctgtaccacagtctgtgctgatacttacgttttctaacttccaaccttgtctttgttctaaaaacacaggtgagggaagattgcttgcagaaaatgctttctgctgttgtaccaagggtgtttctctccagaaagcctctgaagcaaccaaattggggttcagggttgaggtcgaggaaaacaatggaaaagcaagagtgaaaaaagcacagaccaagaaaaaacattttaactgaggcaaagcatctaggataaaagagacacatttgatgtatgtggaacacaagtagtatgtaggtgctgtgacagagaaaaaaagccctaagattttccttcatagctggtctaaatgcagtggtccttacaaccaactgatcacaaccagtaacaattttctttgttccttctccactctcacagcttcacttgactagccttaaaaataaataaataataaataaatggcctggcctggcggctcacgcctgtaatcccagcactttgggaggccgaggtgggtggatcacgaggtcaaaagatcgagaccatcctggccaacatggcgaaaccccgtctctactaaaaatacaaacattagccgggtgtggtggtgcacgcctgtaatcccagctacttgggaggctgaggcaggagaatggcttgaacccaggagacggatgttgcagtgagccgagatcacaccactgcactccaagcctggtgacagagcgagactccgtctcaaaaaaataataataataaataaattagttcattcctcacctgagggcttacacttgaagtagaactactggtattcaaagactgctgcagcatccccgaacttgcttttccagcattatctcttcctagactcctgtaagtgccttattcctcagctaaactggactaagcaccattccccagccttcccacaaactgcccaccaccagacatgtgcccaggccattccaccttactgaaatgctcttgtctaatctttatctcttatctcttagtctacccatcttccaagatcccttccaaataccaacttcaagaagcctttctgggtgtttccacgtgaataaaatctcgtgattcttggctcttttttttttttttagcactttcttgtcttgtcccctccagcaccacattgtaacttttgaggtcagggactttgggttccctgcatcgtacagcagagtgttgtgcattttgtagactttttccttttttttttttttttgagatggagtctcgctctgtcacccaggctggagttcagtgccctgatctcggctcactgcaacctctacctcccaggttcaagcgattctcctgcctcaaggcctcccgagtagctgggactacaggtgcccgccgccacacccggctaatttttttttgcatttttagtagagacggggttttaccaggttggccaggctggtctccatttccctacctcgtgatccgcctgcctcagcctcccaaattgctgggattacaggcatgagccactgcacccagcccagactttttcaatatatatccacatacattttaatttttttcatcacctttaaaaaaaagctcattcaattctttctgggtttagaaagctgttctttcttgatttacttatgtgtgtaacagtcttgctgtcttgcccaggctagagtgtagtggcatgatcatggctcactgcaacctcaacctccagagcttgaatgatcctcccacttcagcctcccaagtagctaggaccacaggtgggcgccaccacacctggctaattatttgtattgtttgtagagatgaagttttgccatgttgcccagggtggtcttgaactcctggactcaagcaatcctcccacctcgatcttccaaagtgctgggattacaggcatgagccaccacgcccaatgtatggatgtttttatcaagatgttatcttgcccgaagattgagaggtccaaataagaactcagtgaaagcgggcgcagtgtctcagaccagtaatcccagcactttgggagacggaggtgggctgactaccctgaggtcaggagtgccagaccagcctggccaacatggcaaaaccctgtctctactaaaaatacaaaaattagccgggcgaggtggcaggttcctgtaatgccagctacttggaggctgaggcaggagaatcacttgaacccgggaagcggagtccagtgagcccagatcgcaccactgcactccagcctggaaaacagagcaagactctgtctcaaaaaaagaaaaaaaaagaggccgggcgcggtggctcatgcttgtaatcccagcactttgggaggtcgaagcgggtggatcacctgaggtcaggagttcgagaccatcctggccaacatggtgaaaccccatctctactaaaaatacaaaaattagccgggcatggtggcgggcacctgtaatcccagctactcgggaggctgaggcaggagaattgcttgaacgcaggaggtggaggttgcggtgagctgagactgcgccattgcactccagcctgggcgacaagagcaaaaactctgtctcaaaaaaaaaaaaaaatggaattggaaaaagcagaatttgtggctaggatgggcggggacaaggatgactaggtaatagagactggaaaagagaatggaatagacgtaaggagcattaagttagtggctacctggggtaaatggaaaaagaaaaacaaagaacaagaaagggaattgtaaaaaataataataaaaaaaagacaatctgagatacaaatattgaagagatggcaggagaacagtcaagacataagagctgtgtctaagggacatattcctggcttttggttgtcctagggaggttcctttctgtgcacgtcagaagatgacaggcaagaaaacaaagtggaaaacaataaggaagtgaaggtaacccctttataacctcccactgcttcattccttggaaatagaaatgactcagggaggcagatgaggataaataaaacgctgccttgaaacagtctctatgcttagctagattctgtctgcagctgctttctgcagaatcctgcaaattgggtttgtcatctgaccgtgtctctctcctcctgtgtctctacatctatttcaggtccctgggtttgctcgtgtctgttgccttggttcctctgctgtgttcctctaactgtgggcaatgcctccatccatttctagaagtaaatgtgttgatggcattttatcacctgtgtagttcctcttttgactctctcaattctcacctatgtctgcgcctgttgtttttaccttcgtcttttatttttctttctgcacccttttgtttctgcttctgtcactgcttctctctaccagctggctttctatgatgatgacatccccatagcaacctctctctggggaagaatgaggggaaggaaaagagagagctagaatagatgggctaagagaagccagattggagctggaaggtgaccttttggattgagtcctagaacagagtacagagaaactatgaagactgataccagccaagttacacaaaaccctaagaaaacacaaattgggagcccaaatccagtccctgctggcaaaactcattcagcaaatcctttctgttgtaaattaacctgtcatctgttttcccttccttgtgattcagatgaactattcttcctttctttgtttctaggtctcatgattcttaaacatgtatagttctttttttcttcttaaagctagtcaagtgaagcagtgtgagtggaaaaggaacaaagaaattcataattggtacagtggtacaaacaccactgtactcagatcagccacatgtatattttctttccttttcttttcttttttgagacagagtttctctcttggtgcccaggctggagtgcaatggcacaatcttgggtcactgcaacctctgcctcccaggttcaagtgattctcctgcctcagcctcctgagtagctgggattacaggcatgcaccaccacacttggttaattttgtatttttagtagagacagggtttctctatgttggtcaggctggccttgaactcccaacctcaggtgatccacccacctcggcctcccaaagtgctgggattacaggtgtggccactgcgcccggccgccacaggtatattttcttttaaaatttatgaatattcaggaccagacgtggtggctcacacctgtaatcccagcacttcgggaggccagggcaggtggatcatgaggtcaggagttcgagaccagcctggccaacacagtgaaaccctgtctctactaaaaatacaaaaaaattaggcgggtgtagtggcgggcgcttgtaatcccagctactccagaggctgaggcaggagaatcgcttgaacccaggaggcagaggttggagtgagccaagatcacgccattacactccagcctgggtgacagagcgagactccatctcaaaaaaaaaaaaaattatgaatattcacattgtaaccacaaggtctttcttttgatatactatagttttttcactaagattagttctggacaccatactttaagtgatacatgaaatacacttggaatgcccttagaaaaagaccaataaagaaaaaaaccaacatgaaatgatattatccactcttatttaggaccagaatgttagataagagatttaataaggataaagttttttttttttttaaccaataatgagatttgtttcatgtagggaagggttgttgagtgagttaaagcaatggaataattctgctcagagatctttaaattatataaatatccaaatatctgtaaataaaattggttagatcagttttccctcaaactttagcttcctttttccaccgtttcctttgacctccacctggagagctggttagacacaaattcctgagctctactctcagtaattctgattctgtaggtctggggggataggaggggcttgagtttgcatttctagttctttttctttctttctttcttttttttgtttagacaaggtctccctttgtcaccctggctggagtgcagtggcaccatctcagctctctgcagcctcgacctcccaggctcaagctattcttctgccttagcttcctgggtagctgggtttacaggcatgcaccaccacgcccagctaattttttgtatttttgatagagatggggttttgccaggttgcccccactggtctcaaactcctcagatcaggaaatccacccgccttggcatcccaaagtgctgcgattacaggcgtgagccaccacgcctggccttgagtttgcatttcttttttttttttttttgagatggagtctcgctgtgtcgcccaggctggagtgcagtggcgcgatctcagctcactgcaagctctgcctcccgggttcatgccattctcctgcctcagcctcccaagtagctgggactacaggcgcctgccaccacgcccggctaattttttgtatttgtagtagagatggggtttcaccatgttaggcaggatggtctcaatctactgacctcatgatccacccgcctcggcctcccaaagtactgggattacaggcgtaagccaccacgcctggccttgagtttgcatttctaacaggatcctgggagattctgatgttgctggtccccggaccacaatttgagtagcactagtctagatgatttccgaagtcaagcaatacagttgacatacatagtacataaatgtgtggttattttattgttccttgattaaaaataactttcctttgggaatggaggagcatgaatagactaaatcaagttggttttgtttttctctgccatttgcaagctgtgatatccattgacccctttctttgttttgtaaaatgaccaaccatagaggtttgcccaggtactttcagtgctaaaactgagatagtcctgggcaaacgggatgattgggtgacctctccattcacgaggctagtgaaatagaaagaatgtataaggaaaaatgaacgtggctagggatcagaaaatgcagtttctagtcgtaattcacaacttattaatattctgaccttaaattgatcatttaaattctctttcagtttttgcacctataaaatggtgataatgttaactactttacttacttaccacaaaagttttgaggatcaattgaaataatggataaaaagattattaaaataccatatacatattaagacaaagatgtagctcacttgtttttgcttagaatttacgatttacagcccggtgcggtggctcacacctgtaatcccagcactttgggaggccaaggcgggtggatcagctgaagtcaggggttcgagaccagcctggccaatatggtgaaacccctctttactaaaaatgtaaaaattagctggatgtggtggcatttgcctgtaatcccagctactcgggaggctgaggcacgaaaactgcttgaacctgggaggtggaggctgcaatgagccgagattgtgccactgaactccagcctgggtgacagagtgagaccctgtctaaaaaaaaaaaaggagtttactatttactggcaaaaaatagcaacccagcaatctcattcctaagcatacaacaagtatacaatcgagagaaaagaattcatacattcagcaaatatcaggaatgtttataatagctcgaactggaaacaatgatgcatacatcagtgggagaatagataagtaaatgttgtcatagccaaaagtggaatactactcagcagtaagaaggaatgaactaccaacaccaccacatagtactcgtagacacgatgctcagtgaaaaaacatctgagcacaaaagagtacatactgtatggttccatttaaaggtcaagaacaacaaaattcattgatgatggcggaagtaaaaatagcaatttcttctggagaaggaggctatagactggaaccagcactaggaaactttttgaggagcaagaaatgttaaagaatctagatcttgatctggttaatggttatgcctgtgaatacagatataaatattcacccaactgtaaactccagattagtgcatttttatctgctttattgcatgtgcccttcagtaaagtagaaaaaaataaaagaaaagacaacaataaaggaaggaagaactcaccctcaattctatcaccactagaaaacaatgtgtttttttcttgaaatgtttgcattctaaccgccccagcactaagaagaggttcagttttgtaattggaacgtctgatgagcatctgatgagtggatccagaggttatcccctcatgtcgagttgatgatgatatttcagcttctagacttgagcaagatgacagcaaagggaagcggaaaccctgggtcactggttcaggaagacggccaggtttacatcaacgttgcaacaaatctggtggctttttttttcgtttcgtgttgctgtttcttttcttcctcttcatctttgggtccgtttgctacttttcttggattgattttccactctaccccactacacaacgtactctttggggaggaggggggtctttacattttcttccactctccgactttcccatattttctcatgtgtctcagtgaattcaatggtatgtgctaacattttcttttatgagtctattccaggggctcacatcctgtcccctgcccgaggagccttccagtagcctttacagccgcattctcaggctttcatccactctttttgaaacagcgcctgtgacattcccactcattacagcgtgcccctcccatgcctccaggaaattctctgttttcccaccggctttctactcagcagctattctcagtctaatgcgcttcattcaccgtcagccttcctcaggaagacataaaaaagggtgaaaaagaacatttatttctcaggaaggattggtcagctgactaagttgtctgagggtctaaaaagatgagggggtaactcaaagcataaatgcttgaggagatggataccccattctccatgaggtgattattttacattgcatgcctatattaaaacatttatgtggccaggcgcggtggctcacacctgtaatcccagcactttgggaggctgaggcgggcggatcacctgaggtcgggagttcgagaccagcctgatcaacatgtagaaaccctatctctactaaaaatataaaattagctgggtgtggtggcacatggctgtaatcacagctactcgggaggctgaggcaggagaatcacttgaacgcgggaggcggaggttgcgatgagccgagatcgcaccattgcaccccagcctgggcaacaagagcgaaactccatcacaaaaaaaacaaaaaaaaaaaaaagagaaaaagaaagagtagatgtgagtcagctaagcacttcagtcatcatgtagctgttttcctgtgagtggggggaggggggtggtagcctggtgattgtgtcccactgatagctacacagagaaagaaggacatttatagctttagagcactgctagagaaaagttaaggaactcaaagaactgtcttcacttcatgcaagcaattatctgtgttgcttatatattggcacttgtatagaagaagtcttttcccgcttctcggccttttggctaagatcaagtgaagatgacttttaaaacccttgtctgtgatcctgcaatcaccctccttggtacttacataaatgagttgaaatcatgcatctacatgaaaacctgcaaacgaatgtttagagcagttttattcgtagttgctaaaacttaccaagatgtccttcagtaggtgaagggataaactgtggtgcatccaaataatggaatattatccagtgataaaaagaaatgagccacgaaaagacatgcagggaccttcaatgaatatcactaagtgaaataagccaatctgaaaaggctacataatgtatgactccaactgtatgacattctggaaaaggcaaaactatgcaaaaagacagcaaaaagatcagtgattgccaggggttggaggagtagggaagggaggtggaacatgggatcttttttttttttttcttttgagacagagtttcgctcttgttgcccaggctggagtgcaatggtgcaatctcggctcactgtaacctctgcctcctgggttcagtcaattctcctgcctcagcctcctgagtaattgggattacaagcatgcaccactacgcccggctaattttatatttttagtagagatggggtttcaccatgttggttgggctggtgtcgaactcctgacctcgtgatctgcccaccttggcctcccaaagttctgggattacaggcgttagccactgcacccagcctggaacatgggatttttagggcagtaaagctgttccgtatgatatcatacatttatcaaacctatagaatatacaacacaaagaatgaacttgaatataaactatggactttatgtaataataatatatcaatattagcccatcaattattaacatgacagatgtggctcggcgagctggctcacgcctgtaatcctagcactttggaaggccaagtcaggcagatcttctgaggtcaggagttcaacaccagcctggccaacatggcaaaaccccgtctctactaaaaatacaaaaattagccgggcatggtgatgggtgcctgtaatcccagctgcttgggaggctgaggcaggagaatcgcttaaacgtgggaggtggaggttgcagtgagccgagatcatggcactgaactccagcctgggtgacagagtgcaagaaaaaaataataacaataaataataatgataataatataagagatgtatcacactaatgcaaatgttagtattaggggtgttaagggagtacatgggaactctgtgtactttctgctcaatttttctgtaaacctaaaactgcccacccccaataaatcctattaattaaaaaacaaagcgaaacacttgtttatatgtctctctccatccgcttcaccaccatgagaacttaaagggaggaacatgttttttatctttatgttcccggcctctgggatgaaagagaaagggaacactatttttagtgcattaccctagcatcatcgccgacttagcgcatctaaaataaaagtcttgatttgaccctcaggtctctgtctgctttcctgactgaggtaaatggcaactccagttctccagttgctccagccaaaacctttaggatcattcttgactcctttttttcttttgtgctcaacgtctagaccgccagtaggttgcaccttgaaaatatatttcaaatccaacagcaacccactctatgctcctatccctaccctctgtctaagtttgttcatgctgctataacaaaacaacacaggcaaggcgcagtgcctcacgcccgtaatcccagcaccttgggaggcccaggtgggcggatcacctgaggttaggagtttgagaccagcctgaccaacatggtgaaaccctgtctctactaaaaatacaaaaattagctgggtgtgggtgtggtggcgggtgcctgtagtcccagctactctggaggctgaggcaggagaatcgcttgaacccaggaggcggaggttgcagtgagccgaaatcacgccattgcactccagactaggcgacaagagcgaaattctgtctcaaaaaaacaaaaacaaaaacaaaaacaaaactgagtaatctataaacagtagaaatgtatttctcacagttctgaatgctgggaagttcaaggtacccgcaggtttgatgtttggtgagggcagctctctgcttctaagatggcgactgttgctccgtcctcattagggggacgagtgatgtgtcctcacatggtggaaggcagaagggcaaaaaaaaaaaaaaaaaaaaaaaaaaggagcaaactctctgaagtccccccaccgcactttttttttttttttttgagacagggtctggctctgtctcccaggctggagttcagtggtgcaatcatagctcactgcaggcttgacctcccgggctcaagtgatcctcccacctcagccacccgagtagctgggactacaagtgcaaaccaccatgcctcactaattttttgtatttttttttttttttttttttttttttttgtagagacagggtctccttgtgtcgcccaggctggtccaaaagggggaaataagaactcctggactcaagcgatcctcccgccttgacctccaaaagtgctgagattacaggcatgagccatcgagcctggcctccgaagccccttctgtatgggtattactccctccatggaggcagagccctcatgactcagtcacttcccaaaaggtcctgcctcttaatatcactacaattaggattaagtttctgcattaattttggagggaacacacatttaaaccacagcaccctccttcagcatcttctccattcaacagcacatacttttttaaaaacacgaatcaactgatgtcatgcttctgctcaaaaaactaaaatggcttcgtagcttcctggctgtctgtcacattcggaatataaaccagaacgttcatgactgcttacagcgtcctgcatgagcagactcctagctgtcttcaacatcatttctcctgccactctgcccccgcttcactccactcctgccaaatccgccttttgacaccctgccaagcacgagtcctccttttggtgtctgcgtttgaaatgccttctgtttgaaatgctgttttcagatactcccaaggttgactttctcgtgtgattcaggtttctgtgcaagtatcatctctactgagagaggaaccctaaccactctatcttaatcttccccagccccaaccctttatcgccttaccttgatattttcttcttcaaaatgctcccttattacttgacagtatatatttattgtctgctaaggctgccataacaaaataccacaaacaggtggcttaaacaacaggaatttgttttctcaaagttctagatgctggacatccaagatcaaggtgccagcaggcttagtttctcctgagacctctcccttcagtagcagatggctgtcttctcagtgtcttcacatggccttttctctattcacaggcctaatgcctcttcctcttctcataaggacacctgtcctattggactagagccccaccctagtgacttcatgtaatcttaattacctccttaaaggctccatctccaaatacagttccattctaagttactaggggttagggcttcaacatatgaattttaggacacaatttagtccataacactttgccctctggccccccaaaatgtatgtcctcacatccaaaatacatttatctctatccctgtaggccctaaagtcttaacccattccagcatgagttccaaatccaaaatttcatctgaatatcatctaaatttggtatgggtgagaaaagaggtatgattaatcctgaggcaaatttttttccaaactgagcctgggaaaccagacaagttatgtgctttcataatataattgtgggacaggcataggctagacattcccattgcaaaagggggaaatgggggaaataagaaagaagaaaggggtacctggtcttccaagttcaaaattctagtaaggcaaattccattttttaaaaaaaattgtggaccgggcacgttggctcacacctgtaatcccagcactttgggaggccgaggcaggtggatcgcaaggtcaggagttcaagaccagcctggccaatatggtgaaaccctgtctctactaaaaatgcagaaattaaccaggcatggtggcaggcgcctgtagtcccagctactctggaggctgaggcaggagaatcacttgaacgtgggaggtggaggttgcagtaagccaagatctcggcactgcactcctgcatgggtgacagagcgagattctgtctcgaaaaaaaaaaattgtggtaaaaacacataacaacaacaaaaaaggtaggctgggcatggtggctcacacctataatcccagcactttgggaggccgaggtgggtggatcatctgaggtcaggaattcaagaccagactgaccaatatggtaaaaccccacctctactaaaaacacaacaattaaccaggcgtggtggcgtgcacctgtagtcccagctatttgggaggctgagacaggagaattgcttgaacgcaggaggtggaggttgcagtgagccaagactgtgctactgcactctagcctggacaacagagtgagactccatctcgaaaaaaataaaaataaaaaattagccagtcgtggtggtgtatgccagtaatcccagccagagtgagacttcatctcaaaaaaaaaaaaagaagaaaaatggttaccatgtgaaccatcttttttttttttttttttgagacgaagtttcactcttgttgcccaagttggagtgcaatggtgcaagctcggctgactgcaacctccgcccccaggttcaagagattctcttgcctcagcctccaaagtagctgggattacaggcttgcgccactatggctggctagttttgtatttttagtagagatgttgtttctccatgttggtcaggctggtcttgaactcccaacttcaggtgatcctcctgccttggcctcccaaagattacaagtgtgagccactgcgcctggcccatgttaaccatcttttattactttatcttacatttattttattacagtttttaaaatatcttttcagcttcactgaagtataattgacaaataaaattgtatacatttaaagtatgtgcacatgatgttttgatatacatgtatattgtgaaattattaccacaagttagttaacacgttaacttttttttttttttgagatggagtctcactctgtcacccagggtggagtgcagtggcgtgattttggctcactgtaacctctgcctcccaggttcaagcgattctcttgcctcagcctcccgaatagctgggattacaggcatgtgccaccatgctcggataatttttgtatttttattagagatggggtttcactatattggcccggctggtcttgaactcctgatcttgtgatccacctgcctcagcctcctaaaatgctgggattataggcatgagccacggtgcctggccaatatgtttctttttatttttttaatgtggctactgaaattttcttttttttgtaaaattgaacacttggtcacccaggctggtgtgcagtggcatgatctaggctcactgtaatgtccgcctcccgggttcaagtgattctggtgcctcaggctcccaaatagctgggattacaggcgtgtgccaccacgcctggctaatttttttgtgtctttagtagagatggggattggtgatattggccaggctggtattgaattcctgaactgaagtgatccatccgccctcctcagcctcccaaagtgctgggcttacaggtgtgagccaccatacccagcagaaaaatttttaattacatctgtggttgggctgggctcagtggctcacgcctgtaatcccagcagtttgggaggccgagacaggcagatcacaaggtcaggagttcgagaccagcctggctaacatgatgaaaccctgtctctactaaaaatacaaaaaattagctgggcgtggtggcacacgcttgtagtcccagctactcaggaggctgaggcaggagaactgcttgaaccggggaggcagaggttgcagtgagctgagatcatgccactgcacaccagcctgggtgaccaagtgagactgcgtctcaaaaaaaaaaaaaaagttatatctgtggctcacattatatttgtattggacagtactggccaggctttattcaataatcattgaagatatttgagtaggactctgacacgattcaaattttgatttaggataattcacctagccctgatgtggaacggattcatttttgaagaagggagaggaaagaggaaggaagaccttcgtgaaagtgggacaggcctgagagctgggattaggcccttcaggatcaacgggagtgatggatggatgatttaaacccagtttagacaggaaaatcaacatttctcaaatgttttctttcttaatcctgaggacttattttctacagtgttatcaaattcaaagtgaactctgcctacactaacctaacaaaggaagattaaaaagttgctttaacaaaagtcgttctttatgaggactattacagatgcaagcaaagttttagagcagttactagctttttgtgtgtgtcttgaaatgccatttacattgttttatgaaagagacagttttccctgtctttacctcaatgcgtttaaaggcttgtgttccctgactttagattttatgtttgttttccacctggttatcatactagcaagcacccatcccacaaagctgcatgaaactaggattgagatttacattctgcagatttagattctaggattgagatttacattctgcagatttagattctagaattgaaatttacattctgcagataactgcatctggaactaagcgacctcagacaattattctattcattcctttttttctaggcagacctacattaaagtattaggtgtaaattttgtttgtttgtttgtttgagacagtctcgctggcacccaggctggagtgcagtgacgcaatctcggctgactgcaacctctgcctcccagtttcaagcaattctcctgtctcagtctcctgagtagctgggactacaggcgcacgccatcacggctggctaatttttgtatttttagtagagacgggctttcaccatactggtcaggctgtaggtgtaaattttataacattctcactaacttactctgttttgaaatttacccatcgcacctcacatttcctctttttttttttttttaatagagctacagaaagatttcaaaaggaatcaaatgacacagcataggtgtctgagggcagctagcctcactggcccatcctgacatacttaatccctcatgcctcatcaccagagctgtgactgtgactgagccaggctcctcccaaagtacactgaagacccagctcaaccaaccagtctctcgaagcacatcaacaaacagttatattgagcaactcttctctagtggccagggtgaaggactatctaagcttggacatctctgttgctttgggggccagcccagtgcagaactggtttttgagcatcaggttcctcctaggtgccatttgcccaaggaacacttgtctcaatatgctcaacacactttttttttcttttttgaggcagggtctcactctgttgcccaggctgcatagctcactgcagcttctatctcctgggctcaagtgatcctcccaccccagcctcccaagtagctgggtctataggcacctgccattaccatacccagctaattttttttttttttttgatagagaaggggtctcaaaaaaaaaaaaaaaagagagagagaaggggtctcactgtgttgtccaggctggtctctcaaactgctaggctcaagtgatccttctgcctcgacctcccaaagggctgggattatagatgtgagccactgtgcccaggtcaacacattttttagattctcaagactcagtttaattccaattgtaacctttaaaaataatcccagcatttgggagctaaggcatgaggatcacttgaggctgggagtttgagaccagccttgggcaatacagtgagatcccatctctacaaaaaagaaagaaaatgaaggaaaataagagaagggatggaaagttatgagactaatgaaaaaaaaaaggctctcaaagatagtgaatgatgagaggagaaagaaaggacttttactaaaaagaaaaagatttaacagagagcattgtactggcagggccctccagggtatcgatgcttagttgtgactgagacatctgagaggccgcaggcaaggtcagttctactgaagctttcagcctgtggtctaccctgtctgacctgaaaggaaaggaatttaagataggaaaggttgaagggattggtgggggtgcgggaaaggacatagaagatggcttcaggtatagaaattgagctgccccaaggtggaaatctaaaataatatccacttgcccagctgaattattccaggcaaggtgaagacgactggttctccccactaagaaatgtctctctctctctttttttttttttttgagacagagtcttgctctgttgcccaggttggagtgcagtggcacggtctcggctcactgcaacctccgcctctcagggtcaagcgatcctcctgcttcagcccctcctagtagctgggattacaggcacaccccaccatgccctgctaatttttgtatttttagtagagatggggtttcaccatgttggccaggctggtctcgaactcctgatctcaggtgatccacctgccttggcccacctgccttggcctcccaaagtgctgggatgacaggcatgagccaccgtgcccggccagaaatgtcttatttgttaggtttgtagtgagccgagtgttctttcttcccccacccgggggttaggttagggatagcagaacagtatttaataaaccagaagactgaaatggggccaggatgcagtgagtagatccagtaggttacatggtcctgagagataagagactcaaagagccacccagcagtgaagacacaaactactaccacctccccctaccaccaccactgggcttccgtggagtctggggtacagatcagactgcactgtatttgtttccaaaatgatcaattcttagtaatcctacccaaggctgtgttgtcctctttcctcccagttcgtgagtggaattctatgcctaccttcacctgatgcaggtttttaaatatttccaaactgaccaacccagtttctcttaacttcttccttctccaattttcttttccacttttaccaagttaacttcacattcttatctccagataagttctttagtataatctattactttgtcttcccgattaattacctaaatctcgtttgatgtttgtccttttcataccactcataggtcagattctcctaatacagctccataattaataagaaacagtcatcaattacaagttttaaggactattctctcctccctgtcctctgtctctccaggtcaccccagctctgatctttgccatcacagttgctacaatcggctctttccagtttggctacaacactggggtcatcaatgctcctgagacggtgagtgccaggccacaagaattagaatctggaatagggaaattattcctttaagtagggtttcaagaattcagaatttaaggccaggcatggtggcacctgcctggagtcccagctactccggaggctgaggcttaaagatcacttgagcccaggagttaaacaccatcctgagcaacacagttagtgagggtccctcccccaactaggggaattaaactttgtatctatcctgtccaagactgaagatggagacaatattggtggggaaaattagtggggtcatttaatcaaaggaaaaaggtcatttactccttataccctgggcagtgctgttcttcctcccactctttcaccctatagtaatacacttcctgtattatcccttaggggttagttaccaagctggccaggttcgcttagcagagggctggggtgaacatcagtgctgccacctactgggatattcaggacaaatgaaaaattactattccagggagagttaacattaattccaatatgttatctgcctcttcaattcccgtctatttattcccttgattctctagggaggaaatgatccctaatatttgttttgtttgtttgtttgttttgagatgtagtctcgctctgtcacccaggccggagtgcaatggcgctatctcggctcatcgcaaactccgccccacgggttcaagcgattctcctacctcagcctcccgagtagctgggattacaggcatgcgccaccacaactggctaattttgtatttttagtagagacggggtttcaccatgttggtcaggttggtctgcaactcctgacctcaggtgatccacccgcctcggccttccaaagtgctgggattacaggcgtgagccactgcacccagcatatttgtatcttttgttctcatccaactgtaatagtctgtcctcccaccttttattttgcagatcataaaggaatttatcaataaaactttgacggacaaggcaaatgcccctccctctgaggtgctgctcacgaatctctggtccttgtctgtggccatattttccgtcgggggtatgatcggctccttttccgtcggactctttgttaaccgctttggcaggtattgactagaaactgggcaaggaagtgggctctaccagatgcattggggacaagtgtggagagttagggcagggaggtgatgatgcctttgaataagaacaccttgaattctaatcaagggaaactagcccaactggccccgaatatgactgcccttgcttggagctctactaccctggagagctcccacccagctgtgcaagagatgaactgtgtgagtgattggcctttgcagtccagttagggatagttcagaattattccctagtaagctcaactatggggtttccaggaacatacttaatttacaaggtccaaagttgattacttttctcaaaaaaaaaaaaaacaaaactggggtctcatataaatgtttttgttacctctacacaggattggtaggaattatctttagtctatggcaaatgtggataatggccaaaaaaagaaaactgaatcgtctttttttttttttttgagatggagtcttgctcttgtcacctaggctggagtgcaatggtgcaatctcagctcactgcaacctctgcctcccgggttcaagtaattatcctgcctcagcctcccaagtagctgggattacaggtgcccgccaccacgctcggctaatttttgtatttttagtagagatggggtttcaccatattggccatgctagtctcgaactcctgaccttacgtgatccgcccacctcagcctcctaaagtgctaagcttacaggcatgagccactgtgcctggctgaaaactgaatcttcttattttatactagcttagtaatctattttagaaggtagaatatattttcagttatgactgacaaaggaactgttttaatttgccaattagatattctagaaatgcaagaatgtaattcacatttaaaaattgataaggcaacctattttacttgctaatgttcttccccctctgccctccctctgcccaagaagcagggtcttgctctgtcacccaggctggagtgcagtggcccaatcatagctcactatagcctcgacctcccagtctcaagcaatcctcacacctcagctccctgagtagctgggactaccagtgggcaccatcatgcctggctcccaactagaaacgttctgataatagaaagtaaaaaagggctgggcgtggtggctcacacctgcaatcccaacactttgggaggccgaggtgggtggatcatgaggtcaggagttaaagaccagcctggtcaagatggtgaaaccccatctctactaaaatacaaaaaaattagccaggcatggtggcaggcgcctgttatcccagctactcgggagtatgaggcagagaattgcttgaacctgggagtcagaggttgcagtgagcggagatcgcgccactgcactccagcctgggcaacagagcgagactctgtctcaaaaaaaaaaaaagaaagaaaagaaaagaaagtgaaaaagaaaagttagaccaaaaaaggagttgatataagcctggagaagagcagaataatgagtacagaagaggagaagttaggagcctctcactttgctaattccatgttgtctttgattaaccttacaggcgcaattcaatgctgattgtcaacctgttggctgccactggtggctgccttatgggactgtgtaaaatagctgagtcagttgaaatgctgatcctgggccgcttggttattggcctcttctgcggactctgcacaggttttgtgcccatgtacattggagagatctcgcctactgccctgaggggtgcctttggcactctcaaccagctgggcatagttattggaattctggtggcccaggtactctagaacttctcatacttaatgagtgttagtttcatgggtcattaaaaaagttaacataggtaaagcactgaagaatatctggcacatgttcaattacatatggaagttttagataatagatagtagctgaagaagcaggttgagtagagaaaggaaaagaagcacaatttcttttttccttttttctttttctttttttttttttgagagggagtttcactctgtcacccaggctggagtgcagtggaatgatctcggcccaacctctgcctcctgggttaaagtgattctcatgcctcagcctcccgagtagctgggattacaggtgtgcaccaccacgtccagctaatttttgtatttttagtagagacaggatttcaccatgttggccaggcttttctcaaactcctgacctcaggtgatccacccgcctcggcctcccaaaattctgggttataggtgtgagccactgtgcccggcaatttttaaatttttttcaatggtaaaataatgtatgattttctgaacttttgttttgttttgtttctgagacggagtctcactctgtcgcccagtctggagggcagtggcgcgatctcggctcactgcaacctccgcctcctgggttcaagtaattctctgcctcagcctcctgagtagctgggattgcaggtgcccaccatcacgcctggctaatttttgtatttttagtagagacggggtttcaccatcttggccaggctggtcttcaactcctgatccacctgcctcagccttccaaagtgctggaattacaggcgtaagctactgcgcccagccaactttttgtgtttcaatgaacttgtggcctgtgaagtatggggtttatagcattatctttgtgtggtttctagatctttggtctggaactcatccttgggtctgaagagctatggccggtgctattaggctttaccatccttccagctatcctgcaaagtgcagcccttccatgttgccctgaaagtcccagatttttgctcattaacagaaaaaaagaggagaatgctacgcggagtgagtatctttcactctttagtatacaaagtatatggttgtggtttgttttaagggtgagggtactggatctattttctgtcgtaccctttccctgcccgtcagaatccaagtgaagatggttctgattactctactttgttttttctttttttgagacagaatctcatgctgttgcccatgctggagtgcagtggtgcgatctcggttcactgcaacctccgcctcctgggttctaagcgattctcctgcatcagcctccggagtaggtgggattataggcatgtgccaccaccaccacaccacgcctggctacttttgtactttttttttttttttgagacagagtcttgctctgttgcccaggctgtagtgcagtggcgcaatctcggttcactgcaacctctgcctcccaggttcaagtgattctcctgccttagcctcccgagtagctgggactacaggtgcgcgcgacaccacgccagctaatgtttttgtgtttttattagagatggagtttcaccatgttgaccaggctggtctcaaactcctgaccttgtgattcgcctgccttggcctcccaaagtgatgggattacaggtgtgagccaccgcgcccaacccatctaatttgtattttttttttaagtgaaagcaagtttattaagaaagtaaaggaataaaagaatggctactcgatagacaaagcagcgactaatttgtatttttattagagatgggctttcaccatgttggccaggctggtctcaaactcacctcaggtgatccacaagcctcggcctcacaaaatgctgggattacaggcacgagccaccgcactgggctctgattactcttgagtaaaattttcagcccctaaagaatgaggtgagagggcaggttcaggaatggatgctacccatcacctcacctcgtgcggccctttcctggctgccttacaggaagaatgaatttggggcagcacattctctttatcctttcctctttcttcttttcaccagtcctccagcggttgtggggcacccaggatgtatcccaagacatccaggagatgaaagatgagagtgcaaggatgtcacaagaaaagcaagtcaccgtgctggagctctttagagtgtccagctaccgacagcccatcatcatttccattgtgctccagctctctcagcagctctctgggatcaatgctgtgagtgtgatactttagggtcaaacgtgtcttacaatatttcacttaaaatgccaggcatggtggcggtgtgcctctgtagtcccagctactcaggaggctgaggcaggagaatcgcttgaacccgggaggcgaaggttgcagtgagctgagattgcgccattgcactctagcctgggtgacagagtgagaaacttcgtctaaaaaaaaaaaaaaaaaaaaaagacaaaaattagctggacgtggtggtgcgctactcaggaggctgaggccggagaatttcttggatctgggaggcggaggttgcagtgagtggagattgcgccattgcactccagccggagcaaccagggcagaactccttatagaaagaaataaaaagaaagaaagaaagaaagagaaagaaagaaagaaagaaagagagagagagaaagaaagagagagagagaaaggagagaaagagagagaaaggagagaaagagagagagagaaaggagagaaagagagaaaggagagaaagagagagagaaagagagagaagaaaggaaagaaaggaaaggaaaggaaagaaaaaggaaaaagaaagaaagaaagaaagaaagaaagaaagaaagaaagaaagaaagaaagaaaaaagaaaggaaggaaggaaggaaggaaagaaagaaagaaagaaaaaagagcgagcctggaagtacactggcaacttcagactgagctgactttaccagtctctatgtttttacaagtagaatagggagcatgatagtttaaagagggcggcaaaacagaagctagcatttgacaggtaacccttgtattccatgcaaatatcagcttcctgctattgagtgtggattgtgggaagagagtactcctgtgccttctagtcaattgtggataaaatacggatatgaagagcacccttgtacttcatcccctgagggttttccattagtctttgatcaatgggattaaatcattttgtaacaaagcattttgcaaaacttagtattttgagcattttaatactaagttggttcttggccttttctcctacctaacacaccagatatttgtatttgaagtggcagtgcttcttgtgaggggttagaagctgttttatcagaatgtacaaggagccaggtgtggtggctgctcatgcctgtagtcccagttactactcagaggttgaggtgggaatatcacttaagccaaggagtcaagcctgggcaatatagcatgaccctgtcttaaaaaaaaaaaaaacttgggaggaaatacacagtagttagaaaaagcctcctaggtgattttgatgaatcccagtctcaaatttcctcatttggaaatgataatgtaggccacacgtattactggagaaaaatgtgctcccgagactttccagagcagcagagctgggactaggcaggtgaggcagctacgtgcaagtgtagccctgagaatgagcacctctttaaagaatgtaccttgcgttagttctgtgcctgtttaaaaaaaaaaagaaagaataaaagaatgcacctgaggcaactccctagctgcctcaccacagtctgggccctgcaaaacagggtcagaaaaaaatcacctgtgggaaattacagatgatccatgagcattctgaggaacagactcctcccacttcagagtggtatgtgcatactttctttctttcttttcttttctttctttttttttttttttgtgagacagaggagtctcactttgtcacccaggctagagtgcagtgatgcaatcttggctcactgcaacctctgcctccgggttcaagcgattcttctgcctcagcctcccaagtagctgggactacaggcacgtgccaccatgcccagctaattttttgcatttttagtagagattgggtttctgtgtgttagccaagatagtctcaatctcctgactttgtgatctgcccgcctcggcctcccaaagtgctgggattacaggcatgagccaccgcgcctggcttgctctttctttttttttttttgagaggtagtcttgctctgtcgcccaggctagagtgcagtagcgcaatatcagctcatagcaacctctacctcctgggttcaagtgattctcctgcctcagcctcccaagtagctggaattacaggcggccgacaccacacacagctaattttgtatttttagtagagacgggctttcaccatgttgaccagtctggtcttgaactcctggcttcaagtgatccacccgcctcggcctcccaaagtgctaggattacaggcatgagccaccatgcccagcctataccttaattattgttggactaaagtggctcccaatttagtcaatgagcagattttgctccacatataatcatcacccaaagttagctgcaccggaattatgggggatgggattcctgagtcagctgaatccagagtctccgtgtaagagggctggaaattgcctgtaaaaaaataaatctgggccggggacagtggctcatgcctctaatcccagcactgtgggaggctgaggctggcagatcacctgagatcaggagttcgagaccagcctgaccaacatggcaaaagcctgtctctactaaaaatataaaaattagccgggcgtggtggatgcaccatctaaaaatcaatcaatcaatcaatcagtctgatgcatagcaggcttggaaatcacttttccaacctacttttgtgcaaacaatgtattcttttttttttttttttttgagacagagtctctgtcaccccggctggagtgtagtggcacaatctcggctcactgcaacttccacctcctgggttcaagtgattctcctgcctcagccttctgagtagctgggattacaggcgtgcaccacttcgcctggctaattttgtgtttttagtagagacagggtttttccaggttagtcaggctggtctcgaactcctgacctcaagtgatctgcccgcctatgcctcccagagtgctgggattacaggtgtgagccacctcacctggcccaagaagttttattgagatgtgtacatgtacattaggtttttgatgtgtagacattgtgataaggtagataattgtgataactatttattgcttgtttaaactgctcaagtaattacttttgtaccaacctaatatctttccccacaagcttgacgtcatcatataatatgttgaggttttgttttgttttgttttgagacagagtcttactccgttgcccaggctggagtgcagtggctcgatctcggctcactgcaacctctgcctcccaggttcaagcaattctcctgtctcagcctcctgagtagctgggactacaggcacctgccaccacacccggctgatttttgtatttttaatagagacagggtttcaccttgttggtcagcctggccttgaactcctgacctcagatgatccactcacctcagcctcccaatgtgctgggattacagtcgtgagcaactgcgcctggccaattataatcttattttagaaaatataagtatacatagtttacatcttacatcttagggatttaaatagttatttcttgagaaggtaaatcccaatgtagaggtccatattatcaaaaagactaataaatattgctatggaggcaactactctgggtgaaataaactgaagtgaacctgggtaacctagataatgttcccttgttaacttgaggtctgagtccaatatttcaatatttcttttctttttttttgagacggagtttcgctcttattgcccaggctggggtgcactggtgcgatctcggctcaccgcaacctccacctcccgggttcaattgattctcctgcctcagcttcccgagtagctgggattacaggcatgcgccaccatgccctactaattttgtatttttaatagagacggggtttctccatgttgtcagggtggtcttgaactccaacctaaggtgatctgcccgccttggcctcccaaattgctgggattagaggcgtgagccactgcgcatggccagtttctcatagctgtgatagttgtagcaaccttactttttttttcttttttttttttgatatggagtctcgctctgttgcccaggctagagtgcagtggcacaatctcagttcactgcaacctccacctcccaggctcaagcgattctcctgcctcagcctcccaagcagctgggattataggtacccaccaccacacccagctaatttttttatttttattacagacagggtttcaccatgttggctaggctggtcttgaactcctgacctcaggttatccaccagccttgggctcccaaattgctgggattacaggaatgaaccactgtgctcggccagcaaccttacattttagcgcagtgcctagtaaataacaaacatagtaatttatttaatatatattaaattgcaatagtagctggtattatttcataaaacacttcaaaagggcctaggcctaggaaatacagcccaatctctgcttattcaaggagcaggataaggttattcaattagttcactatcaaattgagacatcaatgtgcctatcagtgttttgagggtttggggaagagtcaattaaaaaagcatttagctgggcctgatggcacatgcctataatcccagcaacttgggaggctgagaggcaggaggatcacttggagaccaagagtttaggaccagcctgggcaacatagtgagttgctgtctcaacttataaaaaagaaaccagttagtaggaattacactttcttttttttttttttttgagatggagtctcgctctgttgcccaggctggagtgcagtggcaccatctcggctcactgcaagctctgcctcccaggttcacgccattctcctgcctcagcctccccagtagctgggactacaggcgcccgccaccacgcctggctaattttgtttttgtatttttagtagagacggtttcaccacgttagccaggatggtctcgatctcctgacctcgtgatctgcccgcctcggcctcccaaagtgctgggattgcaggcgtgagccactgcacccagcctacaccttcatataagttggtgaagtagacataagcaagaggaaatggaacagtgggaataagcatagttagaagcaacaatggacattagtagctaaaattgagaacatttaaaaagagaaaggagggcgaggtgcagtggctcacgcctgtaatcctagcgctttgggaggctgaggtgggtggatcacaaggtcaggagttcaagaccaacctggccaacatggcgaaaccatgtctctactaaaaaaatacaaaaattggccaggcgtggtggctcacgcctgtaatcccagcactttgggaggccgaggcgggcggatcatgaggtcaggagatcaagaacatcctggctaacatggtgaaaccctgcctctactaaaaatacaaaaaattagccaggcctggtggcacatgcctgtaatcccagctacttgggaggctgaggcaggagaatcgcttgaacccgggaggtagaggttgcagtgagccgagatcgtgccactgcattccagcctgggcaacagagagagactccatctcaaaaaaaaaaaaaaaaagaaagaaatacaaaaattagctgggcgcggtggcaggagcctgtaatcgtgccactgcactccagcctgggtgacagattgagactccgtcaaaaaagaaaaagagaaaggagataagattcagaagataattcagggatattaggattgaacaaaaattgtagtaaaaggacttcttacctcctgggacttttaagtattttttaaattttattttatggtgacagagtcttgttctgtctggcctcccaagtagctgggactacaggtgtgtgccaccatgcctagctaatttttatatttttagtagaaacagggtttcaccatattggccaggctggtctcaaactcctgacctcaggcgatctgcttgccttggcctcccaaagtgctgggattacaggcctgtgcaaccacgctcagccttaagtattttttgagggttctgtgtaagtggtgtgcagaattttatcaaagctgcatgttttcttttctcctaggtgttctattactcaacaggaatcttcaaggatgcaggtgttcaacagcccatctatgccaccatcagcgcgggtgtggttaatactatcttcactttactttctgtaagttggatggtttgataattttggggggagaaatgaatccttgctacagatgttcaaagatggattgcatggctccaccgttatttagttacaccttttttgttatttatttttatttttttaaattttttgagacagagtcttgctctgttgcccaggctggagtgcagtggtgcaatctcggctcactgcaacctcagcctcctgggttcaagtgattctcctgcctcagccttccgaagtagctcggatacaggtgtgcgccaccacgcccaactcatttttgtatttttagtagagacggggtttcgccatgttggccaggctggtcttgaactcctgacctctggtgatccacctgcctaggcctcccaaagtactgggattacaggtgtgagccagcgtgcccggactgttgtttaattttcctttggaaaaaagagatacattcaatgctgaatgtagtcttcattcttcaagcaaatatggatggatgggaaaagaggaagtatagaagggactatacagtatgttttgaacttggaattggaggagaggtgtttggaaaaactttcaaactgttattcctctgtttttacactaaaacaacaataataacagaagatttctgtgacccccaaaatatataaggatttgtccccatcaagtaagcaatcagttccgtagtggacactatctaggtgtcctgtgatttaattctgacactacctggagatagcatcagagctcacaggttggtggccgatttcccaagactgcccccaactcctgatgccagtcacaagctccaggttgttttacctgtgcttctgactcaccagctgtagatcaggattcccacgacatcctctttgggtttgattaatttgctacagtggctcacagtactcaggaaaattgtttcctagtttgatttaaaggatattttaaagcacagaaatacacaaccagatgaagagattcacagggcgaggtctggagggatcctgagcatgggagcttctgtctctgtggggttggggtgcactcctagcacatagatgagttgttgctgaccttcctgtcagcttccacgggttcagatatctggaagctccccataccctaccttttgggccttttatgcagacttaattggttctccatgattgaagcatggacaactgttctgacctgtgattggacaaaaagggaatgatctgaacccagctgggcctgtctgcttagatgatttgttggcctctctgtagcgtttcttcctctagggtgtggggcaggaccctctctgaaatgagggttttatgacccacagtcagattagcgtcctgccaagtgggagggcaggagaaagtcagagaagaattctgttatctgaggcctgctcctgaggcctgaagcatcccaacattatgacaaaagactctaccaagggctatggggattttgagccaggacctgtgaatggcacacaatatgtatgtatataaaatcataaatcacaggaggggtatccataacaagtgtcctgctgttggtaaggcagatttcaagtagctcagatgctgttttcatggaaaggaaaactgaagtttcatgtcatattcttcttccagctatttctggtggaaagggcaggaagaaggactctgcatatgataggccttggagggatggctttttgttccacgctcatgactgtttctttgttattaaaggtaagtgctctttgggtgaaaaaaaagggagggggaaagaagagaggttacagttgacttctgtgacacaaggggtgggttgttaaggttgcagtttgtcaataaagtcagaggagagaagcaagatgcccagagtttttaagaaacatgggtcatcagagaactggaggtaaactgttagaatctttacatttagagaacattattatggtttataaaataagttatctaatttaattcttttgtttgtttgtttgtttgtttgagacggagttttgctcttgttgcccaggctggagtgcagtggtgcaatctcagctcaccacaacctctacctcctgggttcaagtgattctcctgcatcagcctcccgagtagctgtgattacaggcatgcacctccacgcccagctaattttttatttttagtagagacagggtttctccatgttggtcagactggtctcgaactcccaacctcaggtgatccacctgcctcagcctcccaaagtgctgggattacaggcatgagccactgtgccctgcctaatttaattcttaaaataatatcaaggtaatcacactttatggatgatgacggggtctcagtacaaagtgacatatatgagatcacatagatgggattcaaaaatccaagcctggctgggtgcagtgcttcattcctgtcatcttaacactttgggaggccaaggtgagaggattgcttgagcccagaagttcaagaccagcctaggcaacatggcaagaaactgtctctaaaaaaaaaaaaagtatttttttgtttttgttttttgttttttgagacagggtcttgctgtgtcacccagttgggagtgcaatgtcgccatcttggctcactgcaatctctgcctcccaggcttcattgattctcctgcctcagcctccctggtagctgggattacaggcatgcgccaccacacccagctaatttttgtgttttttagtagagacagggtttcaccatgttggccaggctggtctccaactcctgacctcaaataatccactcacttcaccctcccaaagtgctgggactataggcgtgagccacagtgcccagccaaaaaaacaacgaaaaccttttgtttaattagccaggtgtggtggcacatgcctcaagtcccagctatttgagaggctgaggtgggaggattgcttaagcccaggaggtcgatgatgcagtgagctgttatagcaccactgcactctagcctgggcaacagagtaagaccccgtctcaaaaaataaatataaaaataaaaataaatccaagccttttgattccacagccactctttgtattgtacgtcaggacaggaggagcttgccattagttgcctctgggaacctagatcctgggttacactgtctttaaatttaatcttctgtgttccttcctcttacagaatcactataatgggatgagctttgtctgtattggggctatcttggtctttgtggcctgttttgaaattggaccaggccccattccctggtttattgtggccgaactcttcagccagggcccccgcccagctgcgatggcagtggccggctgctccaactggacctccaacttcctagtcggattgctcttcccctctgctgctgtaagtaaactcaccttatctatgtatctatgtatctatctatgtatctgtctatctatctatctatctatctatctatatatatatatatttttgagactgagtctcgccctggtgtgcagttgcccgatctcagctcactgacaagcgattcttctgcctcagcctcctgagtagctgggactacaggcacccgccaccgtgcccagctaatttttgtatgtttagtagagatggggtttccccatgttggccaggatggtcatgatctcttgacctggtaatctgcccgccttggcctcccaaagtgctgggattacaggcgtgagccaccatgcccggccaactcaccttatcttaaaaccagcctacgtaggctgacatattgaagatacaccttaataatacagtagtcaggctgggcgaggtggctcactcctgtaatcccagcactttgggcggctgaggcaggcagatcacctgaggtcgggaggtagagaccactctgaccaacatggagaaaccctgtctctactaaaaatgcaaaattagccgggcatggtggcgcatgcctgtaatccaaactacttgggaggctgaggcaggagaatcgcttgagcccaggaggcagaggttgcggtgagctgagatcgggccattgcactccagcctgggcaacaagacagaaactccgtctcaaaaaatatatataataataatagtaatacagtagtccctcctcatctgcagtttcagttacctgcagtctaaaaatattaaatggaaaattccagaaataaacaaatcataagttttaaattgcacccgggagcagtggctcaaagccggtaatcctaggactttgggaggtggaggtgggcggatcacttgcagtcaagagttcgagattagcctgaccatctggtgaaacaccatctctgctaaacatacaaaaattagccaggcgtggtggcacaaacctgtagtcctagctactcgggaggctgaggcaggagaatcgcttgaaaccaggaggtggagttcgtggtgagccaagatcttgccatgacactccagcctgggtgacagagctagactccatctcaaaaacaaaacaaaacaatttacgaatagagacaggggcttgctatgttggccaggctggtctcaaactcctgggttcaagtgatcctcccacctcagcctcccaaagtgctgggattacaggcaggcaccatggtgcccagtttaagaatatatcttttgtccataaaattgtgaagaagaaaaaagaagatgggtgagatggctcacgcctgtaatcccagcactttgggaggctgaggtgggaggatcatgaggtcaggagttcgagaccagcctggccaatatcgagaaaccccgtctctactaaaaattcaagaaatggccgggcgcggtggctcacgcctgtaatcccagcactttgggaggccgaggcgggtggatcatgaggtcaggagatcgagaccatcctggctaacaaggtgaaaccccgtctctactaaaaatacaaaaaattagccgggagcggtggcgggcgcctgtagtcccagctactcgggaggctgaggcaggagaatggcgtgaacccgggaagcggagcttgcagtgagccgagattgcgccactgcagtccgcagtccggcctgggcgacagagcgagactccgtctcaaaaaaaataaaaaaaataaaaaaaataaaaaataaaaattcaagaaattagctgggtgtggtggcaggcgcctgtaatctcaggtacttgggaggctgaggcaggagaattgcttgaacatgggaggcagaggttgcagtgagccaagcttgcaccattgcactcaagcctgggcaataagagcaaaactccatctcaaaaacaaaaacaaaaacaaaaaaacaaaaaaaaacaaaactggccaggcacggtggctcacacctgtaatcccagcactttgggagaccaaggcgagaggatcacctgaggttgggagtgcaagaccagcctgaccaacatggaaaatccccacctctactaaaaatacaaaatttgccaggtttggtggtgcatacctgtaatcccagctactcaggaggctgaggcaggagaatcgcttgaacctgggaggcggaggatgctgtgagcggagctcatgccattgcactccagcctgggcaacaagagcgaaactccgtctcaaaaaaaacaaaacaaaacaaaactggataactggggactactgtaattactgacgctatgaaagattagacatcaaaggctataaaccagattttcaacaatacatagaaaaaaaatgacggcagaaaagattgaaatgggatggcaaaactgggaaccattcattttttattatttgagacggagtctcactttgttgcccacggtggaatgcagtggctcactctcggctcactgcaacctctgcctcctgggatcaagtggttctcttgcctcagcctcctgagtagctaggattacaggcacgtgccaccactcccagcaatttttttttttgtatttttagtagagacggggttttgccatgttggccaggctggtctcaaactcctggcctcaagggatccacctgcctcagcctctaaaagtgctgggattacaggcatgagccaccacacccagctcagcaacacagattttaaaaataatactcaaggccaggtgcagtggctcacgcctgtaatcccagcactttgggaggccaaggcaggcagattacaaggtcaggagtttgagaccagcctggccaatatggtgaaaccccatctctgctaaaaatacaaaaattagccaggcgtgctggtgggcacctgtagtcccagctactcaggaggctgagacaggagaatcgcttgaacccaagaggaggaggttgcagtgagccgagatcctgccattgcgctccagcctgggtgacagagtgagactccatctccaaataataataataataataatactcaaaagtccaaaaatactcagtagacatttggaagcatctaactttaatgaaaaaaaatgacagaaagaaaaatacagagaaatatagtaagttagcaatagaatcataagtaaatctctgaagaaacctttatgttttcattaaatatggaagggttatagcttgaagcctattggaaatatgaatgtgaaggaaattgtatttgtcaatgaccagatttttatatcaaccttccttttttctgtcctttcactagtactatttaggagcctacgtttttattatcttcaccggcttcctcattaccttcttggcctttaccttcttcaaagtccctgagacccgtggcaggacttttgaggatatcacacgggcctttgaagggcaggcacacggtgcagatagatctgggaaggacggcgtcatggggatgaacagcatcgagcctgctaaggagaccaccaccaatgtctaagtcatgcctccttccacctccctcccggcatgggaaagccacctctccctcaacaagggagagactttatcaggatgaacccaggactgcttctgaatgctgctacttgatttctttctcatcccacgcactccatgagcaccccaaggctgcagtttgttggatcttcaatggctttttaaattttatttcctggacatcctcttctgcttaggagagaccgagtgaacctaccttcatttcaggagggattggccgcttggcacatgacaactttgccagcttttcctcccttgggttctgatattgccgcactagaggatataggagaggaaaagtaaggtgcagttgccccaacctcagacttaccaggaagcagatacatatgagtgtggaagccggagggtgtttatgtaagagcaccttcctcacttccatacagctctacgcggcaaattaacttgagttttatttatcttatcctctggtttaattacataaatatttattttttaagtgtaattttgccaaataataaaaacagaaggaaattgagattagagggaggtgtttaaagagaggttatagagtaaaagatttgatgctggagaggttaaggtgcaataagaattcagggagaaatgttgttcattattggagggtaaatgatgtggtgcctgaggtctgtacattacctcttaacaatttctgtccttcagatggaaactctttgatttctcagaaaagttgtatgcctatttaataaagctactcatttcctttggaactttatctttaagataatagtttacatgtagtagtacttgaaatctaggattattaactaatatgggcattgtagttaatggcggttgatgggttctaattttggatggagtccagggaagagaaagtgatttctagaaagcctgttcccctcactggacgaaataactccttgtagtagtctcattacttttgaagtaatcccgccacctatctagtgggagagccatccaaatgagaaacctaaaataattggttcttggtagagattcattatttctccactttgttctttaggagattttaggtgttgattttctgttttattttaactcatacctttaaaggaattccccaaagaatgtttacagcaaacttggaatttgtaacctcagctctgggagaggatttttttctgagcgattattatctaaagtgtgttgttgctttaggctcacggcacgcttgcgtatgtctgttaccatgtcactgtggtcctatgccgaatgccctcaggggacttgaatctttccaataaaccaggtttagacagtatgagtcaatgtgcagtgcagcccacacttgagaggatgaatgtatgtgcactgtcactttgctctgggtggaagtatgttattgttgacttattttctctgtgtttgttcctacagcccctttttcatatgttgctcagtctccctttcccttcttggtgcttacacatctcagaccctttagccaaacccttgccagtgacagtattttggttctcagttctcactgttccctctgctcctggagcctttgaataaaaatgcacgtagctatggagtggggtttagctggaaaggtggccttccaacttcacgtcaacttctggctcctcagtttggcagtaaggcagggaagttgttttcctatttctcactgagaagattgtgaatatttccatatggattttccattattgtttgtttgattctttgttttaaaataaaaattctgaatgtacatgaca

SEQ ID NO: 56 - DNA, 32769 bp, Homo sapiens
tgaatatattctttattaatttatgccgtctgcttaataaacagaaatgttggaaggtgaaccagttgggagtcaccatctgatcaacccctgcctgctttttataaataatgtaactgaaccatcatttactggaagtggcaatcaacctgtgaggaacggcaaaccaaaaagtccaccttgggtgtcatggtgatggaattggaggcggagaccagggagagcagcgggctaggatctctgagagtctccgcaacatggcggccctggaaccacctgaccggcaggaggcggagctccgccccagctcgctcggccccaccccgctcggccctgcccagcgcactcctagaccggggcgcaagggttgtgaggtgtttgagcgaagcgcctgcgcagggcagcggcgcgcggggcggaggctttataatcacttcgtcgttgccgctcggcttctatcgccgggagggcggttgaggcggtggtggcggcgtcggcggcggccgggcgctggctgaggggcgctgaggcgggagctgtggcggcgctgggcgcccctggctcctcggcctctgccggccatgggctccgagaaggactccgagtcgccgcgctccacatcgctacatgcggccgcacccgaccctaagtgccgcagcggcggccggcgccggcgcctcaccttgcacagcgtcttctctgcctcggcccgcggccgccgcgcccgggccaagccgcaggccgagccgccgcccccggctgcgcagccgccgcccgccccggcccctgccgcggcccagggcccgccgcccgaggcgctgcccgccgagccggccgccgaggccgaggcggaggccgcggcggcggcggcggagcctgggttcgacgatgaggaggcggcggagggcggtggcccgggcgcggaggaggtggagtgtccgctgtgcctggtgcggctgccgcctgagcgggccccgcgcctcctcagctgtccgcaccgctcgtgccgggactgcctccgccactacctgcgcctggagataagcgagagcagggtgcccatcagctgccccgagtgcagcgagcgactcaacccgcacgacatccgcttgctgctcgccgacccgccgcttatgcacaagtacgaggagttcatgctgcgccgctacctagcctcggaccccgactgccgctggtgcccggccccggactgcgggtgagcgcgggggcgtggcgcgggtggcggcgggctgcagccgaggggcgtggctgggggcagcagggaccccgcgtgggtgtcccaagcagggaaacccgcaaggcggcagcttcggcggggtggtaaccatcaggcaagcccagactagtggtgtgaacgcacccgacaccccgccccctgccccagggctcgaggtggctgctaagcattcggtgaggggaagggagctgtccaagttaggagacagggagaggcggtttttttgttgggggaatgccctctgtccggaggtgaggacagtatctttttttttttttctttttttttttggagacggagtctcgccctgccgcccaggctggagtgcaatggcgcgatctcggctcactgcaacctccgcctctcaggttcaagcgattctcctgcctcagcctcccgagtagctgggattacaggcgcccgccaccacacccggctaatttctttgtatttttagtagagatggggtttcaccatgttggctaggctggtctcgaactcctgacctcaggtgatcctcctgcctcggcctcccaaagtgctgggattacaggcgtgagccaccgctcccggccaaggtggggagtatctcttaatgagagtggggaggggatatttggccaaggagggaatgagaatattctgagggggcagcgcgtcggaggggtgtgtccacttggctagggacagacttagcattgcagaagaaggcgtgttctccctgacaaccaccgctgaaagttgggatggaggtgactggggaataggctctcgggtaccctgagcactatgtgttctgtgccacgctatcgggaggcactctgtcgttcttaccttgctgccttgggtagggtgaggggtagacagatatgttctttgtccagagtctcaatgggggcactgagaagaatgcccagaggttggtgtgataggagaaattgtgtttctgaacccctttgatcttgagttcttgatgacagtctttttaatgcaccatgtaggctgaattttaaagggcagtaaattaaaatatgcaatatctgcagagacataatacaccagattttgctatctgaagcattcagtggagaccttcctcgccctccccgcctttagaagtctaattgttactgtcagtatatcccatgaaggggttgcacgcaggaagaggggctcatttaagtagttgggagtcagacagccattacctgttctgtgaccttgggcagataattttattcttgtgtgtcatgttttggcgacaaaaagatgctggggagtccttgcagtgtgtaaacgtaatgctagtaaaaagttgtgtgatctttagcttcaaaggagttaaggacttttaattgtagcctatatatcaaggtggttttgaaatctccatgatgctgctggttgtctcctttcaaaaggagctgtcttagagtgtctaggagagtaagaagagttaacttctgtttttaattctgccaaacttgtttagaaatgggtgtgctatttaacctcactgagatggggtttctaaattactttgaagtgttgtggtcaaaggaatggtgtttatggtggctcactttcactttcagttaataagtatcaggaaggaccttttaggttcatggaactgtctatgtctagtgatcttactggccctctgaggttaatttatattaaagttttacagatactgttgatctgttttcttaaccaaacgaatattaagagaacacaggccaggctcggtggctcacgcctatagtcctagcattctgggagaccaaggtgggtggatcacctgaggtcgggagctcaagaccagcctggccaacatagtggtatcctgtctctgctaaaaatagaaaaattagccgggcatggtggtgcacacctgtagtcccagctacccaggaggctgaggcagaatcgcttgaacctgtgaggcagaggtgcagtgagccgagatcaggccactatactccagcctgggtgacagagcgagattctgtctcaagaaaaaaaaaaaacaaaacactgcatagttaattttggaatagtacattaactcctttctgagatgtttccttgagttctaagaaatgtggcagatcatctttctggaaaaggtccctgtttgtttttttatttttctaaagtcagtttctgtctttgctcacatcaataaaaatgcacagaaaataattttcaagcttggtgacaactctcaactatttggaagttattaaaaaattaggccatttcttattttagccaagtattatgttagtatcctccagattttatttttttaattagttagaagaatgataatcatatatatagttatatatataaacaatgtatttttttatatgtgtcatctacggacttaaggtggagtttggggaaagaagaaagctggcctctcaatacctgtgtgccaggtatatataatttaattcgatacaaccttgtgagataggtttaggtttgatatagttttataaatgaggaaactaaagtttaaggaaattgaatgacttgttcagggtcatataactagtaagtggtggaaccaggcttagaacaggggtcttaattccaaccaatgccaatattccttccattcagcccctgttttaaaaagcatttgcttgtcaacatagccgcattattgaggatgctgctgcttgggtgcatttcattaagtgtagcctgaggacaacatggagaaagccaaagatactagagtctagtttcctttctgattcctgttgttaacagcctcctacctacgttatttttcttatctgaaataggtctaattctttcctgacttgagaggtttaattaatgtttacacggtgttttgagatcttcagttgaaagtggttatagggagtaactttaaaattctgttagttgccaaatagatgcctgagttctcccttgggatgtgcctagtggctttgcatctctttttttttgagacagcgtctcgctctgtcacccaagctggagtgcagcagtggtgcaatcacggctcactgcagcctcaatctcctgggctcaggcgatcctcctgcctcagcatctcaagtagctgggaacacgggtgcatgccaccaagcccagctaattattattattaatattattattattatttgtagagatagggtctccctgtgttgcccaggctggtctcgaactcctgggctcaagctgttttcccgccttggcctcccaaagtgctgggattattgctgcctctttttaatgccaggaaaaaaaatagcttctgtgttcttactggatgtcatggttcccttgttttgttttgaacagtgttgttttgttttgttttagagacagagtctcactctgtgcccaggctggagtgcagtggcatgatcatggcttactacaaccttgaactccttgactaaagcagtactcccacctcagcctcctgagtaactgggattataggcacgaaccactgcacactgctcctttgttttatttttttaaacaaatcgttctattcttctggggctggtagaggtcattgataaacactagaagagaagtccaagtcccagttacctcctattcccatacctgaccatctttactgcccacagataaagttcttgccagccaaattgatcaggtctcccctctgccttgtttgtatgtgcatttggtagggtgaggggggcatgtgagcaatcttacaggttctgatcattagttttactataattactcataataacaagaacaccatacattcagagattcatgatttgtttacagaatatttgtaggatagagcaaagagttttggatttttcttctcttacactcaaatatggttttattttattcataaataagggaaccaatttcagtgggaaaacattcacattataatttttttttttttgagacggagtctcgctctgtcacccaggctggagtgcagtggcaccatctctgctcagtgcaagctctgcctgccgggttcacgccattctcctgcctcagcctcctgagtagctgggaccacaggcgcccaccaccacgcctggttaattttttttttttttttttttgtatttttagtagagacggggtttcaccgtgttagctaggatggtctcgatctcctgacctcgtgatctgcccacctcggcctcccaaagtgctgggattacaggcgtgagccactgtgcccggcctcacattattatttaatatactaagaacaatatggcctagtataatcttaaaacaagctgtcaaatgagataaaattagttcaaaatacaaataactgattttttatagttctttatagtcttcagactataatctcattcagacataatttcattttagtctcatccaggtggatattggcgtgcattttataaaggagaaaccagttcagagaagtttaaacatggggcctagtgtttcattgctaataattggtacaattgatcttttacgcttttgagtctctgcccaagtatgtcttttcagaaaccccgaagtcaggtaactgtaatgttttcctctcaagtatcctgttgctaatcttaaaaccctttcagaatctctaggagactgacgggtgagcaaagtaggcaacagaaaatttcctggtgtacaggggcagatcttctgtacagatgaataagaagggataaggctgtcttgacctaaattctttgtgcaggtccaccactccagcctttcattgctgcctctgtcctctgcagaatccttcctcccacctgatcccaggaaacagtatcagctattggccttcccagacaactagactggaccatcccataaacaggaagcttttttcatccctagcacatttatgagggaagatcaagcaagctctttgagcaagacaaatttcagtcagtgaaggaggatttttgctttctgaagcctccctgaacctcttctcttgatttggctccatacctcctgttccacaacttttccctgcattccccaactccacaccaccccctcctcttgtgcacgtacaccaacctccatcccaatacatctgtctcagatttgccaaagtacttgtactaaaggagaacatctgtatcactcccctgcctaagactattcattgactacctaacctataagatgagttcttattatgtctttgagaacttatttgatctacccttatcatttaagctcctttacagtttccaaccatcttttttttttttttagatggagtctcgctctgttgcccaggcaggctggagtgcagtggtgcaatctcggctcactgcaagctccacctcccgggttcatgctattctcctgcctcagcctcctgagtagctgggactacaggcacctgcaaccatgcctggctaattttttgtatttttagcagagacggggttttaccgtgttagccaggatggtctcgatctcctgacctcgtgatccacccatctcagcctcccaaagtgctgggattacaggcgtgagccaccacgcccggccatctccaaccatcttttgattttattttctatttttcactcacatcactatttcctaaggtatgttataggcattacttgaaagaaaaatgttttgtgaggaaataagcttggaaaatactgagttaaacaaaataaaacaagtttatgagtttcttaaatctttaaacatgctaatatgctaatatgtagtataaatcttcaatataatgtaatttccccaatttagatcaccaggaaacaggtttttgttttttctgtagcatctttaaggcttaactcaaactttccctaaactcctttaatagttaccatgctggcctgcctttggttagtgtccttatttaaccataaaccttatgctctgaatagattgagagctcatgtctctagactaggatatctatattccaaccatttctacaactctgtgtacaaagtctttcaattaggctctagaagagtgtggtacatagatgaattttgatgaaaaagataagaaatatgagcagcatagttctcagaggaagaatagagatgaaagagataagcaagaatagtatagacaggtgatcattcaattcaacagacaacttttttttgagatggagtctcgctttgtcgcccaggctggagtgcagttgtgccatctcagctcactgcaacctctgcctctcgggttcaagcgattcttctgcctcagcctcccaagtatctgggattacaggcatgtgccacaatgtccagctaatgtttgtatttttagtagaaacagggtttcaccatgttggccaggctgggcttgaattcctgacttcaagcgagccacccgcctcaccctcccaaagtgctgggattacaggtgtgagccaccacacctggcttcaacagatactttcagaatgatacactgttgaaccctgggtgagtactgggtatttcaaaaagaacttagacatggttttcttgataggaagtttcacctggtagaggagacagataattgatacatagatagatagaaaattattcaaatgtcatatgataaatactaaagaaaatacgggtgctcttagatagatgaaagaacaatagaatttgcatgatggtttcaagaaagacttcacagaggagcaggcatggtggtgtgcacctgtggtcccagctgcttaggaggctgaggtgggaggattagttgagcccaggagttcgagaccagcctgggtaatagcaagaccccatacctgggaaatgactagagatcaacctgaaaacgtggactggattcaggttgataggcctgtgtaagccatggaaataagttttgggttgaagcactttttttcttttttctttttctttgaaggattttaagcaaaagagtaaccttccagaatggaatttggatggagtggggaatagggagagcagataaggaggctcttggagttgtctagcctagagatgggtcttaaatagggcaggaaaaatgaagatgttaagggtacagttcattgtgacaagttggcgcatgtctaccaccctgatgcctactaggggtctatttgtaaatgggtagcctagttatgttacatgacttggggatggaaagtacagacataatataggaacacatttctttaaccactgaagtctattggagcataatcaaatttatactaatggaaatctctttccagggctgaagctaagtaatgctgtggtctagcttgtcactttatgaagtttctgaagatttaggaaattaataaaatgagtaaaagttgtatgaacttaagcagcaggggctggggtgggcggtctgtagtctttttcttttttattattttttatttttttgagatagggtttaactctgtaactctgttgcccgtgctggagtgcagtggtgcaatttcagctcactagaacctcaacctcccaggctcaggtgatcctcccacctcagcctcctaagtagctgggactgcaggcatgtgccaccacacgccaccgcgccccaccacactcggctaatttttgttgttgttgttatttgaagagagagtctcactctgtcacccaggctggagtgcagtggtgcaatctcggctcacagcaacctctgcctcctggattcaagtgattctcctgcctcagcctcccgagtagctgggagtagctgggactacaagtgcacgccaccatgcccagctaatttttttgtatttttagtagagaggggttttgtcaggttggccaggctggtctcgaactcctgacctcaggtgatccacccacctcagcctcccaaagtgctgggattacaggcatgagccaccatgcccggcctaatttttgtgtctttcgtagagatgggatttcaccatgttgccctggctggtcttgaactcttgggttcaagtgatcctcctgcctttgcctgacaaagttctggggttatgggcatgagccactgcacccagctgtgtctgtattcttcacagcatgtaattttctacacctttcttttagcttctgattagcaagcctgactgattggttaagctaaaagagcagagtaggagagatgcaccagcatgggacgtggaagagaaggaacaaagtggacagggcagattgggtttcaaggatgaggtattttcttttcttttttttttttttttgagacagggtttagctctgtctcccaggctggagtgcagtggcacgatcttggctcactgcagcctccacctcccgggctgtagccgtcctcccacctcagcctcctgagtagctgggactacaggcatgcactacaggcatgcaccaccacgcctagctaatttttgtattttttttttttgtagagatggggttttgccatgttgcccagactggtctcgaactcctgagctcaagcaatccacccaccttggcttcccaaagtgctgggattacaggtgtgatccaccatgcccaggcgaggttttttttttccaactattcgggaagaagattaccgtattcagaacttaggggtttaccactaaagtgggtttatatgaaattttaggattaggttatagtacctggcatataataagccaatagatacatggatacattgaaaagattgctttagagcagagtgatggcctaggagaagacctagaatgtcctagggaaggtcaaacaaccaaaacaagagagggtctctgtcattcatgcaacacaggtattttgagcatgaaccagtatactagactgagattaaaaagtggatgatatgtctccttaagtccagtgtggtttggaaggcaagcatataaacagttagttacattataatgtaagtgttataaaataattgtgcacacccacgaagtaggcaacgagctgcctagagaggttaagtatattttacagagaaaatgacacctgagttggttcttaaatgggtacttgtcagggcaagaagtaaggacaagacatttctaggtagaaggaatagagtatgtaaaagccagaaagtaggacagagtgtacgatgtttttacgccatatatctttgaggacaaggtctcacatgcagttttagaacgtgtttagctacgtttgaatgtgacaagtacctatacctccatttggtggaatagaagctaaggtttggagattgtttttttttttttttgagatggaattcctcttttgttgcccaggctggagtgcagtggtgtggtcttggctcactgcaacctccgcctcccagtttcaagcaattctcctgcctcagcctcccgagtagctggattacaggcatgcgccaccatgcctggctaatttttgtatttttagttgagacgggatttcaccatgttggccaggctggtcttgaactcctgacctcaggtgatccacctgcctcggcctcccagagtgctgggattacaggcgtgagtgactgcaccaggccggtttggagattttaatagcttcatgtcatgcagcatgagtcagaggcaagagctcagaccaggtacccaaaaacaggaatgccaaatctcgtgccctgagtaattctgtgtcgtagtaatagattgctgtggattcatgagtaatttggggttattttacttccttggcaccaaattacacactcaaaattgacattgttgatcctatccaatgttcttctttttcaagaaaaaaaaaaaagtgggctgggcacggtggctcacacttgtaatcccagcactttgggaggctgaggcaggaggatcacttgaaggccaggagttcgagaccagcctggccaacatggtgaaaccccatctctactaaaaatacaaaaaatgtagctgggcatggtggcgggcgcctgtaagcccagctacttgggaggctgaggcaggagaatcgcttgaacccaggaggcagaggttgcagtaagccgagagcacgccattgcactccagcctgggcaacaagagtgaaactccgtctcaaaaaaaaaaaaaaaaaaaaaaaagaagtgggggctgggggaatgttaataaacatttacttctgccatgtgaggtaggaatggatgatgaagtgttcaaggctccctactggatgtccacttaatttgtatctttagaagttgacttagtgcttttctgaggtcatccagtaactttcccatttaatgcaaaataacaagctagtcactgtcttgaggagacacgttgtttatctttagtagttattttgcagctaggtggggtaaatttgcccagaactcctacaggatatgaatcatttgcattcatagactgacctgttctcactttgttctttctgaaaagagttttaatacagcctgtattatataacataggggatacattgtcatttatattttcagcatcattctcaagtcaatttgcagactctatgataaacctgagaacttgagttgctatgattaacatctcatgtacattcaaataaacaagcaaactgtagaataaatcccagaaaatgttattagctttttgtacacgttatttgaggtctttgaatattgcgggagagtattggaatagaggacagagtgcagatggcaacacggaaacctgcaattactgatgtttttaaaaatgtgtgtcatagaccaagcttggtggctcacgcctgtaatcccaatgctttgggaggctaaggcgggagggttgcttgaagacagaagttccagaccagcctgggcaacatagcaagaccaaccctgtctctacaaaaaaaaaataaaaagaaaaaagaaaaagttagctgggcatggtggtatgcactggtacttggaggcctgaggtgggatcacttgagcccaggagtttcaggttgcaatgagctatcatcacaccactgtccagaagctgggcaacagagtgggaccttgtcttcaaaaaaaaaaaaaaaaaaaaaattgtgtgattaactttcataactttccatttatttatttattattttttttagacagaatctcactctgtcacccaggctggagtgcagtggcgcaaacgtggctcactggagcctcaacctcccagcctcaagcagtcctcccacctcagcctcccaagtagctgtgactgcaggcctgtgtcaccatacctggctgatttttttttttttttgagatggagtctcacactgtcacccaggctggagtgacacccatggtggcgcaatctctgctcactgcaacctccacctcccgggttcaagcgattctcctccctcagcctcctgagtagctgggattacaggcgcccgccaccatgcccagctaattttttgtatttttagtagagacagcgtttcaccatgttggccaggctggtctcgaactcctgaccttgtgacttgcctgcctcagtgtcccaaagtgctgggattacaggtgtgagccaccacgccaggctgttttttttttttttttttttttttttttttaagagaaaaggtcttgctgtgttgcccaggctggtctaaaaatgctggcctcaagcgatcttcctgcctcagcctcccaaagtgctgagattacaggcatgagccatctcacctggctaaaatgttattttatacaagtattatatttcttgttagagtaatctgagcgcttaattgacatatttggaattaatcagaaaggctaatagttatataaatatattggattgtttgtgtgagactaattcttggtaaatgaacatgaactacaagaaatggtcgacattagtgctgataaattctgaatctttacatgaagaatatgtgtcacagctgagtgcagtggctcacacctgtaatcccaacactttgagaagccaagacaggcaaatcaccagaggtcaggagttgaagaccagtcttgccaacatggtgaagccctgtctctactaaaaaaaaaaaaaaaaaaaagccgggcgtggtggcgggcgcctgtaatcccagctactcgggaggctgaggcaggagaatcacttgaatttgggagaagattgcagtgagccgagatcacgccactgcgctccatcctgggcgatatagtgagactctgtctcaaaaaaaaaaaaagaatatgtgtcagaagagagaaagggaggtatggccttaatgctattttaatttataagatagaggcctggtattcttggattctggagcctatcaagacatttcaaggtataggtttgaattgaaaaagtatggaaagataagatgagctttcaagagggatgctgatcataagtctttagggtttattgtctctgtgactatggtcagaccagcttcactgtggaactggaacttaagaatgaaaaaggcagcatgctttccaactgcctgactgcttgttggcctcaccggtgggagctccagcatctcctttgctcgaaatggaccccaactgctcctgtgccactggtggctcctgcatgtgcgccggctcctgcaagtgcaaagagtgcaaatgcacctcctgcaagaagagctgctgctcctgctgccccgtgggctgtgccaagtgtgcccagggctgcatctgcaaaggggcgttggagaagtgcaactgctatgcctgacgtggggacagctctgctcccagatgtaaatagagtaacctgcacaaacctggattttttaaaaaatacaacactgagccatttgcttcatttctttttatattaaatatgttaatgacaataaaacaatttttacttgaagaaaaaaaatgaaaaaggctgagtgcagtggctcacgcctgtaatcccagcactttgggaggccgaggagggcggatcataaggtcaagagatcgagaccatcctggccaacatggtgaaaccctatctctacaaaaatacaaaaattagctgcgcatggtgatgcatgcctatagtcccagctactaaggaggctgaggcaggagaatcgcttgaacccgggaggcggaggttgcagtgagccgagtcgcgccactgcactccagcctggcgacagagcgagactccatctcaaaaaaaaaaaaaaaagaatgaaaaggtagcatggtggctcatgcctgtaattccagcactttgggaggctgaggcaggctgattgattgagcccggaagtttgcgaccagcctgggcaatggggcgaaaccccatctctatgcaaattacaaaaattagccaagtgtggtggtgcgcacctgtagtcccagctactctagaggctgaggcaagaggattgcttgagcctggtatgcggaggttgcagtgagccactgcattccaccctgggtgacagtgagaccccatctcaaaaaaaaaaaagaaggaattaaaaaataaactttagtttttgccatagctctttatttcactaatgtcctcttccttcgtataaacaaatactaatctctctaaatatagcaaactatcaaaaggaaatagttttgtaccctgttatttatgaaacttattatgacaaactactcctaaagcagcttcagctatgattgaataaatgctggaaatccaggataaataagatactccacctccactttttaaagtaaataaatgatttgtgtttttggaatctcaagaaatttatagccaggcatggtggctcacgcctgtaatcccagcactttgggaggccgaggcgggtggatcacctgaggtcaggagtttgagaccagcctggccaacatggtgaaaccccatctctactaaaaatacaaaaaaaattagccaggcgtggtggcttgcacctgtaatcccagctactagggagtctgtggcaggagaattgcttgaacctgggaggtggaggttgtagtaagccgagattacaccactgcactccacaatccagcctgggtgacagagcaagactgtctcaaaaaaaaaaagtttactttctcacatgggatatattttacagttggtcaaatgtgcttgtgtgtgtatatgtgtgtatgtgtattcttttctctgtatcatatgtgatagtggggtagtgccaaacattgttaactctgatgaataatgtctcttttggttagatcattcttaccttactggtatctcttactgtttccttacctagttatgctgttattgcctatggctgtgccagctgcccgaagctaacttgtgagagggaaggttgccagactgagttctgctaccactgcaagcagatatggcatccaaatcagacatgcgatatggcccgtcaacagagggcccagactttacgagttcggaccaaacacacttcaggtctcagttatgggcaagaatctggaccaggtataagttggcattatctcattgtctctttatttggtatttcatgatgtgagcccatagctgaaagaaattatcttattgtataacccaagtactccaaaggatcagagagcagaaaatatcatttgataatactttcaatattataataaagatagcacttccctctctgaccattataggttatccaactatataaaattgaaatgcaacaaaattgaattatgtagttcctactttcttagtaatatgtctcagattggagagcaattagttcattttgttttgctaggggctttttcaaaactttcattgtgaacagaaagacatttaattagtattaaacctgtgctgtttgccttcaagctgacttaagtgcctcactgcctttggaagtagagtacagattgaagaaaaggaaacagtattagtatagattaatgattaaccttaaaaggaggaatgtcacacattcagctccaaccttggcgagtcagaggaaacctattttaaaatgtcagtggatttattgctttgtacttttattttgctgatgtcatttgggagaggctagtaggaaagattttgccattcactttttcctggcacagcataatttcctaaattgtcattttattaggatagttcataacttgctctgaaaattaccaagtatatggtagatagcatacccagttgtttttaggttttgaatttgaaagtatcatgggaagggattgtgggctatgttaacagcaaatcacaatgatacatgttgaacctgaaaaataaatttcccaaactaaagtttttaaaaatgtaaagctaattccaggctgcaggctattctttctgtaggattcttcttttaaatctaccagcctatcgactggtagaaatttcatttttcttggaaacatctttctccctaaggaaatctccttgctagaatgtggttcaagtgctgtgtaagatgccagttgttgggataggcagctcaataagagacaggattcattttatgaaaattcctgaggtctagacatagccaaccttccagtaaagtgggttgtacaatttggagtgttcagtgaagagttcttgactgctgcctcatttcttatatatactcctaggaacaattaaatcaaactggatttaactaggggtattttttctacccattcttcccccactcatagcagatgacatcaagccatgcccacgatgcagtgcatacattatcaagatgaatgatggaagctgtaatcacatgacctgtgcagtgtgtggctgtgaattctgttggctttgtatgaaagagatctcagacttgcattacctcaggtaagatgggaaatgcatccattcctttcgtagtctcattctcttactgatttagggaaaaggatgtcaaaaagacacatccgttctctcattacaggtttaaggaagctgtgaaaacttcttctgacatgctcctctaatcatgttttcaccagctactattctgtttctacctttctttgcttgccatattacaggtagtctggacttgctttttcccttttgctgtcttgcctccatacttgttcatgttctttcctttgcctagaatgctttctgcctaccttccagtatcctccttttatctcaacttgttcagttcttatcttttaagagccacttaaatgcctttcatccatgttgcctctcctttttccgcctcattctttgactttcttttatcttttgtcataaatatcgtcagtactttacacttcacgtacctatcttatcttactaaactgtaagtatcttgaggctagagttgtgacctttttacagttttttgcatttagtgagttcccaaggaattcattaagtgaattctttttttttttttttttaagacagagtttctctctgtcgcccaggctggagtgcagtggctcgatctcgactcactgcaacctccacctcccaggttcaagtgattgtcctgcctcagcctcctaagtagctgggattacaggcacctgccaccatgcccagctaatttttgtatttttagtggaggcggggtttcaccatgttagccagcctggtctcgaactcgaacctcaggtggtccgcctgcctcggcctcccaaagttctgggattacaagcgcgagccaccgcgcccagcctcattgagtgaatattaaaatgttgtggaggagttaatatttacaaacaaaatgtttgctaatatttacaaataaacaaaatgtgttaatatttacaaacaaacattcattgtgtaaatgaaacacaacaccttcattgccaatttgtcgaacatttgagtacttactgtgtgctagtcattggggacataggggtgagtaagacatgatccctattttcaaaattgtttatcccttctagtggagaagatagcacaaagagaatgggcaaaaatggttgggcacagaagggctgactgtaaaagtagccaaactcagaataccaaactgatagaaaggttatgatgaggtctttttatatcctctcccacgaacatggtttgcagtatctattaggtatggtaggacatatgccaagaaaactacacaaatcagagtgttcattagtgcagggtgcagtgtgtctggatgggatgtcaagtgcataaggctatgcagcatcccaagtattgtcagtcatggaagctagatcagttttggtgggttagggaagacagaattcagcagagaagaatggaaaaggaatttcaagtctggaagcctgtctttacaacaacaaccaaaaaagttaaagagcccagagctctaatagtctggccttgtcctttgctctcccttgtgtaatgtattcatttcccataaactcttctgttaatccttactgaaaagaaggctgttgctgttatcaagccctatgataatactagctgtatttgtaatgttgacattaacttcagtctgtttcccctgcagcccctctggctgtacattctggggcaagaagccatggagccgtaagaagaaaattctttggcagctgggcacgttgattggtgctccagtggggatttctctcattgctggcattgccattcctgccatggtcattggcattcctgtttatgttggaaggaaggtaagaaagacatgctggtttctgtgcttgtttcaactttaggttcgttagtaaaggtttgagggaaatgggaaggagctatgtttcagagctgcctgaaaaccagctggttcttagataaaaataaccttactttcttaaatggattttcataaacccccatgagatctgaaagttcttattaacatcctgggcctggcttgtctcagtgacttaaaggtagaatgctgggccaggcatgatggttcacatttgtaatacgtggcctagcactttgggaagccaaggcaggtagatcagttgagcccaggtgtttgagaccagcctgggcaacatgacaaaacccatctgtacccaaaaaaatagaaaaattagctgggtatggtggcatgtgcctacagtcccagctactagggaggctgaggtgggaggattgcttgagcccagggacgtagaggttgcagtgagccaagatcgcaccactgcactccagcctgcatgacagactccaaaaaaaaaaataaaagaagaaggtaaaatgcttacttcattctgctggagttattttgtctctttttggattaactttgcctgtattactttatatcttccaggtctgagttaggttaaaatttgataaagatgcctatttggggtagaggatatgttttaatatagataacttacaagtgaatattcacctgtcctttttttctctggcaaaagattgatgtcctaacctgctgacctggattttctttttttattcttagattcacagcaggtatgagggaaggaaaacctccaaacacaagaggaatttggctatcactggaggagtgactttgtcggtcattgcatccccagttattgctgcagttagtgttggtaagctagtcaggaccacacctcttctctctcagctttctgaccatagcagtttagccagatggccagatgtttctcaaagactcctacattttatgcgaacccaccttgatagtaaattctgttaggcaccatgattatgattatttttaagtttttcaagcacaccaaattatcagagtgtgcaatcttttgttcttaagttagtgcctagaactccatttggcacatagaaaaggttgaattacagaaacttattttaagccctagttttcacctttcatcttccttctctacttgccatgaaatccacaaaacaaaattacttttgttttgatttgtttaatgcttcacattactttgggaggcataagagtttgttttagaataataatagtgtaactaacatttaatgtggctcttcatgtgccaggagtggttctgagacttttgcatatattaatttatttaatcctcacaatccttacaaaaggaagcacaattttaatagaaaggtgcagtaattggctgggcgcagtggctcacgcctgtaattccagtgttttgggaggccgaggcgggcggatcacgaggtcaggagatcgagaccatcctggctaacacggtgaaaccccatctctactaaaaatacagaaaatcagccgggtgtggtagcgggtgcctgtagtcccagctacttgggaggctgaggcaggagaatggcgtgaacctgggaggcggagcttgcagtgagccgagatcgtgccactgcactccagcctgggcaacagagtgagactccgtctcaaaaaaaaaaaagaaaggtgcagtaattttcccaaggtcacttagctgggacatgaatcaagttaatctgccttcagatcctgttctcttaacagctaagccattctacctcacacagcagtaagattttggaattaacatcctgaggagatcctaaactccaagcagtagtcacttatttaatatttgattcttgattggctcttgattgggttagcatttcagcagtgattagaagaggggaaaatgaaagcaacatatatttactgtgcaaaacacagtacatagcattctcatttgattattgacaaccctgggaagataggtccaaggttatacagctagtaaatggagccaagaatctaatccagacctttctgatttctagcctggtcatcattctgttacaccaggccacctttttgggatagccactttctgtcttcctttctttataaagtggtttgtccatgcccagactgggaagaagaattcagggcacttgcaacctaatagccagctgacatgtttccttctcttcccccaggtattggtgtccccattatgctggcatatgtttatggggttgtgcccatttctctttgtcgtggaggcggctgtggagttagcacagccaacggaaaaggagtgaaaattgaatttgatgaagatgatggtccaatcacaggtaaaaagcaggatgtttatttccatttgaatttatgatatacaagataaaaatcagtaaaattcagcgcattttacagggagattgtcattggattactttggataatgagctttgtagggggtaaagtatttttagcttttcatttctttgttccaaagttattaggttaattcccctggtacttgcctctgtgtggcaggtacaaactagtaggaatccaagtaactccaagtatgctggtagtagtagtgattataataacatctttatatctgcacagtacttgataattttcagagtattttacacaattatctcacttgctttttacaacaaacagctctctgacgagggaggatggagctgttatccccatttaaatgggaatttctttttttttttttgagacggagtctctgtcacccaggctggagtacgatgtcgcgatctcggttcactgcaacctccgcctcccaggttcaagtgattctcctgcctcagcctcctgagtagctgggactacagcaacgtgccaccacgcctggctaattttttttttttagtatagacggggtttggtgtttcaccgtgttagccaggaagatctcgatctcctcaccccatgatccgcccaccttggcctcccaaagtgctgggattacaggtgtgagccaccacatctggcctaaatgggaatttctttaagctttcatcttactatctattaagagcttcacagagctgagactagggcaagtcttctgacttttactttaatgtggtttctactcgtagtaagtaacgtagggcacaagtaacgtagaaaaccccaaaggtttttctagcttccttttttcttttctttttttttttttgagacggagtcttgctctgttgcccaggctggagtgcagtggcatggtcctggctcactgcaggctccggctcctgggttcgcgtcattctcctgcctcagcctcccgagtagctgggactacaggcacccgccaccacgcccggctaaattttttgtatttttagtagagatggggtttcaccgtgttagccaggatggtctccatctcctgacctcgtgatccgcccgcctcggcctcccaaagtgctggaagtacaggcgtgagccaccgcgcccggccggtttttctagctttctactagaagcttcctattaaaatcagcacatgacccaaacatattttttaaatcttcacgtttggttacatggaagcaacagtgtagtggaaagaatagtggccttggaatcagagttatagtttcatgtaactaccatggccttggacaagtcatttagttttaaattttagttttctcatctaaaattgaggctattaatgcctagttatttggaggattaaatatgaacatatgttaaaacacctgatatgtggcgactgcacacagtacctgttcattaagtaaatacattagttctctgaaaagtcattgcaggaaaatgcctactgactgttttgatgctctgctgtcttgaattggatgtttggttctatccccagtggcagatgcctggagagccctcaagaatcccagcattggggaaagcagcattgaaggcctgactagtgtattgagcactagtggaagccctacagatggacttagtgttatgcaaggtccttacagcgaaacggccagctttgcagccctctcagggggcacgctgagtggcggcattctctccagtggcaagggaaaatatagcaggtaaacaaatagataatttctgacagaaatggttagaattataagaagtaacacattgagccatttctctgtgccaggcttgtgccacgtatcatcttattttgatttaattgtcaatggttttgttttgttttgtttttacttttttatttttaaagacagagtctcactctgtggctcaggctggagtgccatggcgtgatctcggctcactgcaagctccgcctcctgggttcaagcgattctcctgcctcagcctactgagtagctgggattacaggcacccgccaccacgcccagctaattttttgtatttttagtagagatggagtttcaccatgttagctaggatggtctcaatctcctgacctcgtgatccgcccgccttggcctcccaaaccgttgggattacaggcatgagtcactgcgacaggcctttttttttttacttttacaaataggaaacaagcttagaaaaaaaggttacgtcagttatgcaaagttcattgttctttccattgcaccatagctgcctctatataaagaataatcctgacttgagattcccccttgactgcctgaggctgcctgcttcaggaagggagagtaggcatttttatagaattcgtaaaatgctctccgttaggcttgtcattggctttcagtagcatttatgctgtatcatggcttatttattttattttatttttttgagacggagtcttgctctgtcgcccaggctggagtgcaatggtgcaatcttggctcgctgcagcctccacctcctgggttctagtgattgtcctgcctcagcctcccaagaggctgggactacaggcgtgcaccaccatgcctggctaatttttgtattttcagtagagacagggtttcatgttggccaggctggtctcaagctcctgaccttgtgatccacccgcctcagcctcccaaagtgctgggattacaagcatgaaccaccacacccagcccatcatggtttattgatagtgggctttggggatttttttttgttttttttctcactgtgtcatccaggctggaatgcagtggcacaatcatggctcactgcagcctcaacttcctggactcaggcaatcctaccacctcagcctcctgagtagctaggactacaagtgcacacaccacacccagctaacattttaaattttttgtagagatggggtcttgctcggttacccaggctggtcttaaactcctggcctgaagccatcctcccaacttggctcccaacgtgctaggattataggcatgaaccattgcccccagctggtttagtgatactgcaatccttattacctttctatttccatttgctagataaggaaaatcaattctatgtacttgtgttgaaaatatgtaaagctttgtaactaaaaagattgtgacttgcttggtcatttcactagttaggcagaccagagtgtatattttcagaggagcataacatgttgcctgagaagcagttgaatgcaacggagaagaaaggcctagggaggggtaaaggtagaacaaagcaggataggaaggtagaggagatggttgccttcagctatccaaaggaccttcaactgtgaaaaggattagacttctatgcctcataccaaaaggtagattaagatgacttggcagaagctaaagggaaactaattttggttcagtatagagaatatagggaaaagcaacatgaaagcccaaagaggaaaaaggctactttagtagatactgagctgcctatccctggaaatgtttacaatgagaccagatggctatttggctataagaaggattcaagcaacagatggcaggtggactggatctcccacctgagtgcctgtcaatcacttgggagcctcttaaaaatagacttcagggacccatcccagaatgagtagcttagaatttcctggagtggcacctagggggtgatccgtgttttgcaaaagctccccaggtaattctagcacagccgttgcatgaaccagcatctgacaaccacctaagtaggagccctttctgaaagactcttccaactcagagtgattctgtggcagacctgaaactagaagccaggtctctgacactgtgcactttccattgcattccctcatttccctgggccttggcacatttttgaagggcacctgaagctggagcagcaaagcaaaggctcaggcagtaggatggaagctgcttgaatgtgcagctgcaggctgctactgacccgtctgtgcatctcatgactctggttgtctcttatcaggggatcccgcccccacatgctggcatattcactgctgtgctttcttaaaaccaacacccctgtaaataagcagacagacataattggagactgacttgctgaaactgcagcttagccagtccagctgttctagttctgtgaaagcctttattttataggaagtgaatgagtcagatgggtttgactgtgaaacccattataaggaaatacttaactgtgcaacaaagtgatgttggagccaagaaaggcaatagttatgggctctgagacactattgggaaagtttgctgctccaagaggagggaagaggttggctcctgtatgtccttcagtctcattccctggaggtaatttgattgttaaatgtttgatttcctattatgtgcaaggcagggaaggtaaagtgtgtatgagttgtggtctctccttttgtggagttaacagacaagtgagagatgcataataataagtaggcagggcctgcgcacgcctgtaatcccagcaccttttttaggtgggtgatcacctgaggtttagagttcaagaccagcctggccaacatggtaaaaccccatctctactaaaaatacaaaaattagctgggtgtggtggtgggaacccataatcccagctacttgggaggctgaggcaggagaatcgcttgaacctgggaggcagaagttgcagtgagccaagatcgtgccactgcactccagcctgggtgacagagtgagactccctctaaaaacaaataataataaataagtaggcaggtgctgtgggagtacttagcaagaagtgaatggtttgctgggataatgaggggaagtgatagttcctttgttgttaaggactgagtataagtttgtctggtagagaaaggaaatttctagagagacagaatagcatgtgcaaagtcatggaagtataaaatgtataggtatttaaagaaagaaagaattcagagtgactatgatttcggatctatagggagtgatagaactggacagagagcttcctggcagatcaggaagaccttaatgcctgttggcagtagggagccaagagttagagaattgttagagtgattgggtctttattcacactggcactgttctagaggttgtttgacttggacttaagggctactggagagggagcccagttttagtcatccaggcaggagatgatgaaaacctgaagttcagcagtagctgtggggatagaaaggaggggacgatttcaatagatatttaagagaaaaaatgtatgggcatctatttgcgctgtttgacagttggagaagatcagacagacaaccacaatttgcaagagagtaatggaagagatgtgtgccaggaagcagactgtcttggaatacccaggtctcatattaacttgaacgtcccctctttacacaggttagaagttcaagccgatgtccaaaaggaaattttccccaaagacacagccagtcttggtgcaattagtgacaacgcaagcactcgtgctatggccggttccataatcagttcctacaacccacaggacaggtatgtgaacagtcagatgtccaggagaggttgcattttttcgttgggtactaggtcttcagaagttcaatgcctcatgttagggctgtatgtaccatctcctgggatatatagtgtaacctgtgaattcatttgagcaagttcttggtacttgagtgtttggcatctcttgattcttcttgttagcgcttgatttttagagatttcttttctttcttccttttatgtattttttcttttttttttttttttttttgtctttcttggctattgcaacagtgtataattacatggaacttaaagagctagattgatgttcattgatgtcttcaagtctagggtttctgcttgccctttgcttgataggattcccatagcttctttctctttcattttgagaaactggtgtatctgggatggtgtgattgtggtactcccactagtaggtattctggcttcttctacttgtggcatggtagtaaaaagcttttacttttctattttgagtaagctagcatggggctctgacccttagttgaattttggaagctctttctgtatgtttaaagagattggctgagatacacgtgtgtgtgcatctgagcacacgtgtgcatgtatagttaaatcagcaaaaaggatctaattactcttctccatctcatttatttttatttttgtttttttagagacagggtcttgctctgtcaaccaggctggagtgcagtgacacaatcataactcactgcagccttgaactcctgggttcaagtgatcttcccatctcagcctcccgagtagctgggactacaggcacgtgcctccatgcccagctaattttttttattttagaaacagggtctgactttgttgccctggctggtctcaaactcctggactcaggcagtcctcacacctcgacctcccaaagcgctggggttataggcatgagccaccacgtccagcctccatctcatttgagtgttagattaaaatgttatttttgttaaaagtgagctctagttaactgttcacctatctttttgaaattcctaatcctgaacccatgaactgcttttaccaacaggtttagcatgatccatgcatgactcagcaaagtggattttgtctccacagagaatgcaacaatatggaaatccaagtggacattgaagccaaaccaagccactatcagctggtgagtggaagcagcacggaggactcgctccatgttcatgctcagatggcagagaatgaagaagaaggtagtggtggcggaggcagtgaagaggatcccccctgcagacaccaaagctgtgaacagaaagactgcctggccagcaaaccttgggacatcagcctggcccagcctgaaagcatccgcagtgacctagagagttctgatgcacagtcagacgatgtgccagacatcacctcagatgagtgtggctccccccgctcccatactgcagcctgcccctcgacccccagagcccaaggtgcaccgagcccaagtgcccatatgaacctctctgccctagccgagggacaaactgtcttgaagccagaaggtggagaagccagagtatgaagtggaatgaatgctcctgttctgagaagcacacttgtaactgcatcttttggaatttttttttttttttttccaaggggtagagatttatgtattttatttcacagattctctggtcacaggtttttgcccagggaaattctgagaaattcacaatttcttaccagataaaacatgaaaagtttgccgttagttcccctcccctcccctccctctttttagttttaatttattggttaaactgatggcagcaatccatgaggtgtgtcaaagagtgtacatatgtatgtgtgtatattgaatgctaaacatattactgaaagacacattttaataaagatttctgtcataattcaacttacctcattttccttggcttggatagtcccacagagccaagtgtttgaaacaaagcaccatctttgacagtctctagacctgaatttttctaatccaagggaagaaggattgtattcaaatccaaccgcagtagtcatctataaacctatgactcctagcatgacaggaagcaaagctaggcttgttttggactttgtagtcaggctgaagaattattagctgagtcagctgaatagggaagcagtagattaaaactaactttgtttgccctctagaagcaactgtgcaatttactcttaaaactttgcccttttctgcattatagtcactagtagtcatatgcttcagaggagagaaggagtggcagtcccaggtagctcttaagagaattctcagtggtcaggcatggtggctcacgcctgtaatcccagcactttgggaggccgaggcaggtggatcatttgaggccagctgtttgagacccacctggccaacatggtgaaaccacgcctctattaaaagtacaaaaattagccaggcggtagttgcgcacgcctgtaatcccagctactcagggggctgtggcaggagaagcgcttgagcctggggaggcagaggttgcagggagccgacatcactgcaactccagactgggtggcagagaccctgtctcaaaaaaaaaagagttctcagtgaatgttgcatggttacaagttggagaacagaatattctgttattggaggaagaaatacactgatgcgcataatcacaaagcaatgacataggtgtttgctgtgttctcaggtataccactccgtgttctgataaactttctcagttttgctaatctggtttaaataaaagggactaaaatctgagatttgtaatgaaaggagggggtatgccctcaaaatctctgaacatatttatctgatcttacaaatttgtcaaaattgagctaagtttgtactacttggagttttgcctctgtgtaaaataatgtcctggccgggcacagtggctcacgcctgtaatcccagcactttgggaggctgaggcaggtggatcacctgaggtcaggagttcgagaccagcctggccaacatggtgaaacccccgtttctactaaaaatacagaagttagccaggcctggtggcatgtgtctgtaattccagctactcgggaggctgaggcaggagaatcgcttgaacctgggaggtgctggttgcagtgagctgacatcacccactgcactgcagcctgggaggcagagggagactccatctcaaaaataaaataaaaaataaaataatgggctgggcgcagtggttcacacctgcaatcccagcactttgggaggccaaggcgggtgaatcacgaggtcaggagatcaagaccatcctggccaacatggtgaaaccccgtctctactaaaaatacaaaaattagctgggcgtggtggcgcacacctgtagtccagctactcgggaggctgaggcaggagaatcacttgaactcgggaggcggatgttgcagtgagccgagatcgcgcctttgcactccagcctgggtgacagagtgagactccgtctgacaaaataaaataatgtccttagaagtgaaagcttatatacagtatagcaagaaaattagaagactcgtgaaacctgatgtcagattccaaatcttagagtgacttactttgtatgagtcagtttcatgcccctaacttccccaactttcagatcttatttatgtatttagagacggagtctggctctgtcccccagactggagtgcagtggcatgattttggcacactgcaacctcagcctcccgggttcaagtgattctcaagtctcagactcccaagtagctgggattacaggtgcatgccaccacacccggctaatttttgtatttttagtagagatggggttttgccattttggccaggctggtctagaactcctgactcaagtgattccccccacctcagcctcctaaagtgctgggattacaggcatgagccacctcgcccggccctcagattgcatttaaagagcttccagtgtcagacctctctcaccttagtcctgggcccagaggaaaaattgaaatcctcctttccctgaagaccagatgactttctgtttcctttcacagatgcacttttgtcttcctggccagtgttttactacaatgaggatggcaagtctggacaacagccagcttagaagattcttatctcttgggcactgcagccagacttcacacatttccctgcacctaggacaggaaatgctgttagtggactttggatttctggaagaatgttccctgaagggggcgtgtacttgtgtgaaaaagagaacttgttggaaaaagaggcagacagcctggagatctctgaaacgcaaattatcaactcaaaacttggaattctcttgaagcctcgagagaacaattcacttctttgataaaatcaaagaagtctgttggaggggcagtagtttatggctaaacctatatttcttatctgggttccacttactacagctgtgagatttgggcagtttactctgagtctgttttcacttagccaaaatggagatgatgatcctagttaaggggttgtgaagactgagatggtatactgaaaatgtttttggtaaaggcccatgttttttcctcctgcaggaagaagaagaaatgagttaaaggagattttagatatcatataagaaaggaagcctagacctctaggccagaggctatgaaaaatttaaatttattctaatccttagcgacactttagtagatgaaaaggcccatcatcaccacctagaggcgaacacaaataatgcattagaaaagttacaatagcttggccgggcgtggtggctcatgcctgtaatcccagcactttgggaggctgaggcgggcggctcacaaggtcgggagatcgagaccatcctggctaacacgggtgaaaccccgtctctactaaaaatacacaaaattagccgggcgtagtggtgggcgcctgtagtcccagcaactcgagaggctgaggcaggagaatggcgtgaacccgggaggcaaagcttgcagtgagctgagattgcgccactgcactccagcctgggcaacagagcgagactccgtctcacaaaaaaaaaaaaataataataatagcttagaaaatggagaaagtttaatttcctcttcatacagccttcattcattctgaaatacctaccgcatttcaggtataagatgtagcaatgactaaaatacaaagttcctgtccccatggaacttagactcttaacgggggaaggcaatcagatatataacctggagtgaggataagtaatctgtgaagaaaaacagggaagacagagtggtagatagtgctacttgacatgaccaggttggtcctccttgataaggttccattttattagagactttaatggagcaaggaagagaactatgtgaatatctaggggaagcacataccagacatgaggaataaactacaaaggccctttggtagagcatccttagtctgtttccaaaaaagcatagtatagaggcctatatggctggaacaaagtggaccaaggtggggagagtagtggattaggtcaaagacagctggagcaagattgtgtagattagccaaacaactctgaagacaaggaaattttagatttctttgggccaggaggaggtaatcttcagcgccagacagatgcagtgcttgcggccagctttcaaaaaggttgaaactgggaggggcatgtctgatcactagtactacttggacaggccaatgtgaagaagcttgtggatatggtaaatgaatactcatttatgctcacctaatgtaccttcgtatgctgcagaggctggaaaactaaaaacttcatgtcttaga

SEQ ID NO: 57 - DNA, 2342 bp, Homo sapiens
ggagacgcgggggcgccggcggccgttgggccgcgcaagtactgtcaaggacagttttcgggacgggggacgcggctccaggcacccaacagcactgacggcgaacacttcacgggcgcgcgatgcctcgacaaggcggccgccaccaccacctcagctgccctcgcgggcagcacggcgcggcaaaagcgcacgtcgcctagcgatggcgcggggcggggacacgggctgtaccggcccgtcggagacttccgcttccggggccgccgccatcgctctcccgggcttagaaggcccggctactgacgcgcagtgccagaccttacccctcacggtccttaagtctcggtcgccctcgcctcgcagcctgccacccgcgctcagctgcccgcctcctcagccagccatgctggagcatctgagctcgctgcccacgcagatggtgagggcgcaacccggggacctctgcacgccgttcttgtgcctggcagcttcgaagcccatgttggagcaccgacccggtgctgcgctgttccgggcccggatggttaccgtccaccctctttcccgaattgcctcctgggtccccttctcttctactccgcgagaatctcctgtccattctccgtgagggtgtttcagttcctcccgggaagcccagaatttaatatcttgcccaggcccttaggagagcgggagaccctgatgttggggttaccctgtgccagagttgtgaggtcagggcaggaattgtatgttctcggcggtggaaccaattctttttttcctctgcttcaccccaggattacaagggccagaagctagctgaacagatgtttcagggaattattcttttttctgcagtaagtattggttttacatttaatctccgcccccgcctccctcccaaccctcagtttgagtgtgtttaatatacttcatttgtctctagatagttggatttatctacgggtacgtggctgaacagttcgggtggactgtctatatagttatggccggatttgctttttcatgtttggtaagaaatttgtgggtattagtggcagcttgggttttgtgagtcgggttggtttggttagacctactcagtagtgagacccaaagccaacgtttccctcatccttccaaacagcgtttccctttgctatcattggaaaagtagaatgccaaaatagtgtcagatggtgcgaactatataaaaggacacagcttatttcctttggcggctactctggctaataatcttaaggtcaaagccagcaggagttttcatggtgctcacgttgtcccttcaccttttatttatttatttatttaaattttttgagacggagtttcactcttgttgcccaggctgcagtgcactggggcgatttcggctcactgcaccttctgcctcccgggtttaatagattttcctgcctcagcctcccgagtagctgtgactacaggagcccaccaccacacccagctaatttttgtatttttagtaaagacagggcttcactgtgttggccaggctggtctcaagcaatccgcccaccttggcctcccagagtgcttggattacaggcgagagccaccacgcctggcccccacctttcttttaggtcttaaagccatttgtataggcagtgagcctgttcccatcatcatacagtattttgcatggatggtggcacagagcctttataggaatatggatttttttttttgtttttttgttccctcagcataggagtcatttgggaacctggcattatacgtaatgattttttaaacttttaatagctataatttatgcatttcctcttttctggcccagctgacacttcctccatggcccatctatcgccggcatcctctcaagtggttacctgttcaagaatcaagcacagacgacaagaaaccaggggaaagaaaaattaagaggcatgctaaaaataattgaggttttcatgattcagcacctgcttttgtttctgtgagatgagctaaattgctttcataccccagataagagctaaaaccacctaatgctcttatggcacagctgtgtatagatttagttctctttatacttcatttctagcccagttgggttttgatttatataagtagtttagaccttctcttcataatcttgctctgagatggggaacagaacacacaagtatgaagtttctttcaggtgtaaataatgaaaaataaatgcctcataaatgatagtacaatgtaactatcaaagttttataattcattatgagttaaccattttaatgtttccaattaaacctcatagtgcaagttctttgtctaaa

SEQ ID NO: 58 - DNA, 16958 bp, Homo sapiens
ggaagcgctcgcgcaggagaccccgggtgacggggcccggcgccgctaactggagcgaaccccagcgtccgccgacatggcctggaccaagtaccagctgttcctggccgggctcatgcttgttaccggctccatcaacacgctctcggcaaagtgagtctgggccctgccgggcgtgcgggccctggcgaccccggcgctcgttctacgccttcccccttcttggccctgccctcctggcttcccctgctttcccacttgctccggtcagttcgcgcgcgttatgaccacccaagggatgcgaggcccggggaaatgcggagcggggctgcgccccggacggggggatccgagccccggctttgatttgctgtacagcctccgctcctgtttccacgtcttttaacaggagggttggccgattcctttccacggcccttccagtgctggcgtccaagcctgagcacctccctccacgagctgggagagacccctggacttgtgcacatgagccgcagtagtggctgtgcaggccgagtgacccagtgagcgtggaggcctcaagcggcagacagggaggtgccccacggcccctcaaggatgaggggttagagctgtgctttgaagcttaggtgggatttcggaatgtgtctgagactgtaagtcaaggaaagtctacggaaaggccagatcaaagtcgattgtaaccagcatcaaatgcccaggttagattttctctcataatcagaaaagtgcttttgagctggggaatgacatgttgaaagtgatatgattgactcaatgacatgaggagtggtttggtgcaggaaaaaccactccaaggctgctgcatagcagatgaggggaactaggaggtggcagtgagaagagaaaggaagggacaactggtggcagagaccaggtgtgaatggccacaggcctgacccacatgagcaagaaacaaggatcactccagggtttctgcctgggagaagaaaagtgccattaactcagacagagagggcaagtggccagttcagctctgatgtatgggggtgagaggggggacagttcccaggaggttagggactaaggacccaggcagtcatgagactgagggacagggcctagcctcccctctgttgtgggcaggatggcatttctttgtctctctctgtctccatctcagggcagggccttcctgcccctccttttcttgttgcccaggctggagtgcaatggcacgatcccatgtataaggtacctacggtgtgtaagggaaggggacagaagtgaccaagaggcgatctctgcctttgagatgcttggaatctgaggtggaggagacagacgtgtacgcacacgacagtcacagtgttctcccttccccaaacggtgggcacagtcagtggagtcctgggtgggccccacctgttcctctggttcacctctggccaactgtgccttgtggagaactactagcttcccaggccctgcatcctcctgaggatcactcctcatgctgaatccttagctgttcagaggccccagcctgagggctcccatctcaggatctgaacacagcaaagcaagtcttctgttctgtcatgccagccagggcctctgtcaagtgcttagagagcggttgtaagtccaccagggctgctgcccacaaggagaatccagattgccagttactgctggggtaaactgtgctgattcacctccttccttagaaaactccaaaccagtcaggtaggaagcttagagatcctcaatcccagaaggcgtcgcctttaaaggctgcctgagagtcaggaaagaggctcccaggtgacagacccaacttttggtcctgtcccctgcctgacagctggtgtggggcctctcaggatcctcccaccccaagatgggcccccaaattggaccctaaacagtgttctaaggtcaaaccacaagaagggatactcttagggagaaagaacatgtgggagcagctgcatgcaccccgatgtgaagtatggatttgaaatcacatttctggcccggcgcggtggcttacgcctgtcatcccagcactttgggaggcagaagcggctggatcacttgaggtcaggagtttgaaaccagcctgaccaatatggtgaaactgcatctctactaaaaatacaaaaattagctgggcgtggtagtgcgcacctgtagtcccagctacttgggaggctgagacaggagaattgcttgaacccgggaggcggaggttgcaatgagccaagattgcaccactgccctccaacctgggtgacagagtgagactcggtctcaaaaaaaaaaataaaaggaaatcacatttttgacccacgatttccagcaggcacagacagacaagcatgtgctgacaactagcagaagcatctcatgcacaaagagcacctcgcatgccccaggccctgctctgccctttcatgtgtgaactcagggaattctcataaccaccctatcaggcaaagacaggggctgatattcctgtataaggaaactgaggtaggaaatgattaaattccttgcccaagttcaacttagctactaagtggcagagtttatagttgagccagcatggtctggctctagcatccatgctcttaaccaccactggagggtgtggctggggacttctccagtcattttggggtcatttagagttgttaaaagcatagaaatcatccagtctaatccccacaatttacaaaggaggcctcaggagaagtttctttctgtgattcaactgtttggtgtctgaatgaaggctggaacccaggcctcaggactttaagtcctgttcttttatgactgtgataccccagagtccctccttcctgggagtttcctctcacagctccccaggccaggacagagaagcctgtgcttgtggaagttgtaaacctgtaagtggcatctgcgctcccagcctttgatgtgcctctctccaggactgggctgccagcctctcagccagcccagagacactgctgacagggtcctcccgctggagtccaggccactcaaggttcagactgacagcctgtggttgtctctggcagtttcttggcctgtgacaagagtgatgtttcccttcccaggttcttgggaggatgaaaggcagtggatgaggaagcacatctgagcacgtgctgcctgctgtgctggggcggcaggtcagctttcctctctgcggccccatccctgggtcctggcagggggcccctccctgtgaagtggcttcttctttccctggctgttttctcaaaacctcctcactagcaccttctgtcgatcatcttctttaggccaagccatttctgtctacgtgagccagtgccccatccacaggtactcatttcagaaccccagtctcctgaatccaactgaggttctacatatgaagagccggggtcagctgggcactgtggctccagcttgtaatcccagactggaggctgaggtgggatgatcatttgagcccaggagttcaagatcagcctggacaacatagggagacctcgttctctacaaataataataataaataattaattaatagagccagggtcaagtagatgctcactaagtaaggctcagctcccctcctaagttctgcaggctgtagggccctcccagccaggcagggatatgagcctgacttcctttcatgcccaggccagggaccctgccaagaaggtggcaggaagcctggaaaccactaggcctctactagagaagaggtgtttgctcttcttctgtgtcctttctgtgccagctccaatgtttgcccttggcagctgccccaccacccttgggttccatgaactggcatgggataattgcttcaaaggggttgttgggccagcttgtggaagccttaactcaggaggacagtgtagtagagtgggaagttcatgaggcttgggacctgaggaatagatgagccactggacctctgtgagcctcagttttctcatctgtaaaatggacttggtgatccctgccgtaccttcttcctggacactgaagatctactgaggaaggtttccttttttttttttttttgagacggagtctggctctgtcatccaggctggagtgcagtggtgtgatctcagctcactgcaagctccgcctcccgggtgaacgcattctcatgcctcagcctcctgagtaactgggactacaggtgcctgccaccatgcccggataatttttttgtatttttttagtagagacagggtttcattgtgttagccaggatggtctcgatctcctgacctcgcccatctcggcctcccaaagtgctgggattacaggcatgagccactgtgcccagccttttttttttttttttttaagacacggtctctctctgttgcccaggctggagtgcaatggtgccatctaggctcactgcaaccttgagccatcctcccacctcagcctcccaagtagatgggaccacagacacccgccaccgtgcccacctaatttttgtattttttgtagagacagcgtcttgccatgtttcctaggctggtctcaaactcctgggctcaagcaatccacctgcctcagcctcccaaagtgttgggattacaggcatgcaccaccacacccagcttaaggaaagttttccattccatggagatgagagggctcaccattgtcacctcaggagccagggccacctgctgtggcaccccagagagtggagaagccttggcccttctgtaggtcccaggcaggagaaagaaggggactcactgggcttgacaagctggggacacaagaggaagtggcagagattctgtgggaatggccacagctaatctgcccaagccagccccatcgccacttcctcagtctgttttcgccacccccgttcacgtggacgtgcacacctcccagaatgctgagctttgagtttgggcctggccatgctagggagtgactcaccacccagcacggagagcctactccccagcctgcccgccaaaaggagcggcctcagcttgtccccgctaggacccttcgggcctcctgccctggaggtcatctcccctagaatacagtgtctgtggagaagacaggcccacctactgggctgcccctctcctcccaccagctaggggagcaagaactcagaggagagcttcagagcatcagggagggggcgcatgactgcctgctgagcttccagtgtactggccctgtttcaacatctgaggagccgtgagcccctcgagccctctctggcccctgggttcctgtctgtcaaataaggagttcagctgatggctgagtttcttctgtttcagcattttggctctgtgaactgcagggacaatagcctgaggtccctccagccacctctgcctcagccagcaggacaggttccagacgtttttccagtagctttcaggctgaaggggagctggggccacgctgaacccaagggggagatggcttctgctcagtgaagggaaaggagaaggggcagaaaatgagttttgctgaatacctgccatgtgccaggtcatgtatatatccttatatcatgtattgcttctgacagtttgtcagtgttggtatgattaccctgtaacttgtccagcctgtgggactcaaaactctgggttttctctgtattctgccttttctgagtataaattcaagcaaggtttaaccctggatctgccttaagcctcagagtccccatctaaaatgaggatccttgttgtaaggcttaacgggacagtccccatgaagtgtcctatgaattgtgcatttaaggaaacatgggctgggtgcagtggctcacacctgtaatcccagcacttcgggaggctgaggcaggtcaatctcttgaggccaggagttcgagactagcctgggcagcataaacaaggctgcatctttgcaaaaaatacaaaaattagccgggcatggtggcccatgcctgtagtcccagctactcaggaggctgaggtgagaggatcatatgagccttgggaggctgaggctgtagtgagccgtgattgtgccactgcactccagcctcagtgacagagtaataccctgtctgaaaaacaaaacaaaaaaacaaacgttgttggccggacgcagaggcttatacctgtaatccgatcactttgggagattgatacgggtggatcacttgaggtcaggagttcgagaccatcctggccaacatggtgaaactccgtctctacaaaaaatataaaaattagctgggcatggtggtgggtgcccgtaatcccagctacttgggaggttaaggcaggagaatcacttgaacctggaaagcagaggttgcagtgagccaagatcgcgctgctacactccagcctgggtgacagagggaggctccgtttcaaaaaaaaaaacaagaacaaaaacaaaagacaacaaacaacaaacgttgtgaagaactgacagcaaagtgctgcccaccttaggggtcactgctgtcatccccaggcaaactggggctggatttttgttctagcctgtgaggctggggtcttttctgattctgcgccaggagtcgaaacctgtctccaatccaggatgagaagcctggctttctgccccaaggtacctgcaggcctgagcatctcaggctgggcaaggcagcccatgctgctgacacccaatcccttgggctgtcagcctgccccaggccctcagatacaaagagataccatttccccagccgggagcgctgccagccaggcctgtctaggcagacctacccgtggagaaagcgaagacaacccctgtgggaggtggggagctcagcaccagccctacagtcagctccccaagaagcgccccagccttggggaaggacaggccccgaggggtttcccctatggaccaacttgttctaccagcagggggccctcagactcaggtgggaagtaggactcatggaaatgtggcctcagcttccatacctgccccctacagacaaaaataataataaaataaataataatccttgcctgaagcttctgatcaaccttcatggcctggcaatagctcccttgtccctcctagaggaaacttggctcctggcctggggattcccatctctctgacttcacttgctctgggcagttggctctgtgcccttggtaaggcttgacctcttctctcttccttgctttgcctctgtttcactcagttgcctcatgcaggccttctcagggggctctttctgcaaaagcaagactgggttcgagagcagccctgctgggtctgtggcccttacccatgttccatgtcctgtcctggccagggatccaagagccaacagcatatcaggcagaaattaggcaccatgggtgcagtggctcatgcctataatctcagcaactcaggaggctgaggcgggaggattgcttgagcccaggagttcaagaccagccatggcaacatagtgagaccctctctctaaaaaaaaaaagagaaagaagtgagactccagcccatgaggtcaggtgtttcctgacctggggtggaggcttccccagctcccagactccctgttccatagcaggcgctttctttgccccactggtactggttacagcctggtccccaagccatgccaggctccaggtttctctctgccttctaaacagttctgtccgaacttctcccttcaactctcctttgcccctgccattcccaagaaccacaaggaatcttaactacccctctttctccacatctccaggagctggtggggtctctcactatggaataggtttgccatagccctgttttcttccgcaaactcagaggcatatagagaagccaaagctggacagggactttgtcaaacctagaccctaactgcggcacaaccagtggcacatgctctgggtgctgcgggggaggtacaggaaccagaggactcccccgccctttgggagctgaggctcgctacagagatgagccaatggcagtgcagggctgtgcactgcaatctgactgccctggaaagacatttcaaggaaaggcatttaataaaaagaagtcccgagtcttgcactttaaagacatccactgcctatgcaggatatgctgcagtgggagcaggtcggtggcccacaggaaacggctctgggactgtgttgacttcagtcagcacatgatgttactgatgcatttggagctgtgtcaacgaacccagggtgtcaacatgagggagggccacgccttgctagcctcagtctgggccagatcacatgctcttggctctgggcctgggtacaccagagtacttccagaagtcagtggccaggggtgaaaggttaggagaggctggagctgtttagccaggagatgagaagattcagaagaaggtcaacaagtccccaggtacctaaagggctttcaaatgaaagattagacaagattccacagacctaaccaagcccagcaaagacgaaattcaagacagagaattttcatgcacagatggcagacagttcagagtgattggtggttaagctgcccaaagcactatgccacaaaggattctgggcttgtgtctaggctcatcggggaagtatgtcataatcagtcatcaccatctgccgggtgctgactgggaggtcatgccatgagtgtgatgtctttgccacctgcttgaaagtcagcattagaaagatcttccaaaccattcaggctttttgaaggtgagcaggtggtctgtattaagtcatttcccaggacccaaatactcctgtagaccagaggttcttgatatttttcatgccatgggactctttgacagtctggcacagcctatggacctcttcttacagtaatgttttaaaacgtgtaaataagaccaaggattgggccaggcacggtggctcacgcctgtaattccagcacgttgggaggctgaggagggtggttcacaaggtcaggagattgagaccatcctggctaacacggtgaaacaccgtctctactaaaaatacaaaaaaaaattagccaggcgtggtgtcgggcgcctgtagtcccagctgctcaggaggctgaggcaggagaatggcgtgaacccgggagacggagcttgcagtgagccgagatcttgccactgcactccagcctgggcgacagagcgagactccattaagaaaaaaaaaaaaaaaagaccaaggattacaaaagaagtcaattaaattgaaatacagttatcaaacacttaaaaaagcaaattcgtgatatagaatatatatagatatgctttttttttttttttctgagacaggatcttgctccatcacctaggctggagtgcagtggtgcaatatcggctcactgcagcctctgtcccccaggttcaagtgagtctcatgcctcagcctcctgagtagctgggattacaggcttgtaccaccacgcccggctaatttttgtatttttagtagagacggggtttcaccatgttggccaggcggtctcgaactccagacgtcaagtgatccacccacctcagcctcccaaagtgtcgggattacaggcgtgagccactgcgcccagctatatagaaatgctttctactacattgttataagtgggtctgactactgtaatgttcatgagtgatgagtgtaaatgatacctcacgatatatacaatgactgtaatgtgatcatgagagtatctgtgatttctgtgcattacagaggcacagacacagtgacttgaggaaatgccaagttaaaactccttgaggtgaagactgacccctttgagagggagccccactctggggccgggtcacccaggtctgggcctcttgacattgagaggtgtgagcctcttcactagcaccagggtaggatgctgacagggtctgaccttccctctctctcctacagatgggcggacaatttcatggccgagggctgtggagggagcaaggagcacagcttccagcatcccttcctccaggtatctggccctgtccctcctacctcctgtctcccgggcctcagaccaggcgccacccccggccatgaggccaggctgtttcctgacttaggagtggaggtgtctcctgctcccagaagagccatccacttctctctttccctccccagagcagaatccaaggtttagaatagggcaaagagcaccatcctctgcgaaagtcctggcaagtggtcatgtcctcaccacatccaagtcaggacacgtggaaaacatcagccctagtgacaaaagtcagctctctatccactgggagcccagaccccaattgggacagggcagacaccataaatggaagacactgttcgttgaactgagaatcaggagactcaaatgtcagccccagctctaccagcaacttgctttgtggccttacataagtctttgagcctctcttgggtctaggcttctccacctgcgatttgactaggggttggcctagatggatggttttcagacagggctctgcacagccttagggttcatcaggatgtatgggggctttggggcagacctaggaggctgtctctagcctccatggcagctctgcatttgtctattttacatattggggttctgggtaagctcttgtttgacaaaagtttgcattaaaaaaaatagttaaagatgatccccgagatcccttccagctctgaagtcctcgggttttcatccctgcaggcagtgggcatgttcctgggagaattctcctgcctggctgccttctacctcctccgatgcagagctgcagggcaatcagactccagcgtagacccccagcagcccttcaaccctcttcttttcctgcccccagcgctctgtgacatgacagggaccagcctcatgtatgtgggtgagtaaccaggccaggctgagaagggctcaggggaagctgtggctgaaggggctactggtgaaacagccctatcccacccacctccacttcatcccaccattcccccagacttcacacgcacaggcacacaggcaggactgatcgagcgcttactatgagcttggcatgtctatcaccaaagaccccttagtgacagatggccttcgccttgggaagctaactgtaatttgtttctcctttcctagctctgaacatgaccagtgcctccagcttccagatgctgcggggtgcagtgatcatattcactggcctgttctcggtggccttcctgggccggaggctggtgctgagccagtggctgggcatcctagccaccatcgcggggctggtggtcgtgggcctggctgacctcctgagcaagcacgacagtcagcacaagctcagcgaagtgatcacaggtgcggccaggggcagggacacggggctgccctatcctgccctgtcctccttgggagcccagcacagactcatacaagctctgccatgtgccatataccaagccctgggtgaggtgggtagctctggaggtgatggatagaatgtagggaagactgcaaagggatgtggctccaccaaggatgagtggcaggccgggcagggcgaggggctggcttgtcctttgatacagatgcagacatgcaaactactggatttgggagtggaaaggaacaggtgcttaccaagtgcccagcctggtgctgagcactgtgtgttcatcatcacagtgactcccacaggccccaaacggatgcatcacagcccattttacaatgaaatgactgtcctgggtcacttagggtcaggatcaaccaagaaatgtctatctcaaagcctgttgcttcttgaaagacctgcgtcataccccgtggggcagctcttagacacaggcaggcctctggggccttagcctggcactgctggcatgcccctcaggaaccagggaatcagggacaggcagtggtgactgtgcctatgaactatagggggccctgcagaggtcaggggctggcatgtttggtcgctgtggccatgctctcctggcccccagccccagtgcagccctgttctcatctgggtccctccttccccacaggggacctgttgatcatcatggcccagatcatcgttgccatccagatggtgctagaggagaagttcgtctacaaacacaatgtgcacccactgcgggcagttggcactgagggtgtgtgtgggcacaggggcctggaaggagtggggtagaagggagcctggggagctgagcacaggacaaggtgccagggttcacttgtggggggtgaacttcctgccccgccttgccttccagatgtgttttgacaagtcttctgacacctgctgtgtcaggaactagaggagaccaaggacagagatgaatgagatgcaagcccttcagaggaggtgaccagcaggaagaaagggcagtcagtgaattcaagtttggaccacttgtgctcaactgatgtctcattggccatgcctatctgagtctctcagggcagggagggtggcattcgagctgcaaatttcaacaggcagtagtaggagcagctccaaacagagcaaaggcacaggggactggatgtgaatttgaaaaccagtgaggaataattttgagtgtggccaggtgcggtggctcatacctgtaatcccagcacttttgagagaccaaagcgggtggatcacttgaggtcaggagtttgaaaccagcctgcccaacatggcaaaaccgtctctacaaaaaatacaaaaattagctgggcgtggtggcgcatgcctgtagtcccagctactcaggagactgagacaggagaatcgcctgaactgggggagcagaggctgcagcaagccgagattgcgccaccgcactccagcctgggcaacagaacgagactccatctcaaaaaataataatttgagtgcagtataggtttgatgttggggaaataatcaggaattaagtaggtcagggtcatgtcattagagaactttaccatcaggcaagtagatttagactttaaatgacggaggaatcactgaaagtttttgagcagggaagtaagtatcaaaattatgagattagcaagatacagctgcgctttcaaagaatgtcctgggggctagtgcctgttggggagcagctcttgtctggcccccggtgagctaagggacttaggcagaatgtgaattagctatatcactgagcatgcagtctatttccactcatttctgttttctagcaagaccttaatgagtgaagcagtgcatggacttaccttctggcgcaagctccttgtcacagaccagtaacacactgaactagaaagctgtgtttttccaaacttgtgaaaataatgtagtcagttgcagctggcagttctttttttaaatgaatagaatttttaaatatcagagcattgtatactgtaagggtaatgtttttatgagtgtgtgtgtgtgtgtgtgtccatgaacctgtgcacacgtgtactgggtcacaatataaaatgtatttcttactcttgatccagtcaaaaaaaccctgagtaaaagtggagaagggacagctagaacccatctaataggccacaagctcctgatgagagactgagggacgtgaaaggagggagctggcatgaggaccactgggagggaatgacccgagatcagaggaggctaagccggtgggctgtgctgggggtctgggggaaggtggagagtgtaactgtttcctctactccccaggcctctttggctttgtgatcctctccctgctgctggtgcccatgtactacatccccgccggctccttcagcggaaaccctcgtgggacactggaggatgcattggacgccttctgccaggtgggccagcagccgctcattgccgtggcactgctgggcaacatcagcagcattgccttcttcaacttcgcaggcatcagcgtcaccaaggaactgagcgccaccacccgcatggtgttggacagcttgcgcaccgttgtcatctgggcactgagcctggcactgggctgggaggccttccatgcactgcagatccttggcttcctcatactccttataggcactgccctctacaatgggctacaccgtccgctgctgggccgcctgtccaggggccggcccctggcagaggagagcgagcaggagagactgctgggtggcacccgcactcccatcaatgatgccagctgaggttccctggaggcttctactgccacccgggtgctccttctccctgagactgaggccacacaggctggtgggccccgaatgccctatccccaaggcctcaccctgtcccctccctgcagaacccccagggcagctgctgccacagaagataacaacacccaagtcctctttttctcactaccacctgcagggtggtgttacccagcccccacaagcctgagtgcagtggcagacctcagctctctggacccctcctacagcactagagctaaatcatgaagttgaattgtaggaatttaccaccgtagtgtatctgaatcataaactagattatcatagttatctagtttatgagtcataagctagatttgattcttcaaagaagaaaagtcagtgagcaaatttaaaccagaactaagcattatattttctttttttttttttgagacagagtctcgctctgtcgcccaggctggagtgcagtggcacgatctcggcggctcactacaacctctgcctcccaggttcaaatgattctcctgcctcagcctcccgagtagctgggattacaggtgcataacacacctgggtaacttttatagagatggggtttcaccatgttggccaggctggtctcaaactcctgacctcaggtgatctgcctgcctcggcctcccaaagtgctgggattacaggcgtgagacaccacacccagccataactaagcattatgttttctaaaacttctaagatcctccctaaacccgtctggagacatgggttttagcccagactctgcctcaaactcattgtagctcccagcacattacccagttgctctgggccttggtgttatgctctgggaagtagatgttgatgctgtggccttagtgccttctggccccagcattccatgggcctgtgatcttgaccaacctgagaaaacagtaacagcccatccactggaaatacccctctgcccacagcaccacccttctgtgctgttttttttgttgtttgtttgtttcttctttttgagacagagtcttgctctgttgccacgctggagtgcagtggtgtgatctcggctcactgcaacctcccgctcccaggttcaagcaagtcccctgagtagctgggactacaggcgtgtgccaccacatccggctaattttttgcattctttaatagagacggggttttgccatgttggccaggatggtctcaatctcctgacctcatgatccacctgcctcagcctcccaaagtgctggggttacaggcatgagccaccacgcccagccttttttttttttttttttttttcttgagagacagggtcttgctctgtcacccaggcacagcttactgcagccttgaactcctgggatcaatcagtcctcctgcctcagcctcccgagtagctaagactaacaggtatgtaccaccatgcctggtttattgttttatttttttggcagagatgggtctcactgtgttgcccaggctgatctcaaactcctggcctcaagcgatcctcccatctcagcctcccaaagtgctgggattacagacctgagccaccacacctgggcaacagagtgaaacctgtccctgttttcctgctcttactctcacctctgaggcctcctctgcctggaagagattacagggaaattccaggcagcccttgtcaattgtttttatgaattctttacctgttccttttaaagacaaggaaactgaggcccaaagttctaagttgtttggcaaatggagtctcctaccctcagctcctgcaaggacctgggggacccccaggtccagcagccacatgattctgcagcagacagggacctagagcacatctggatctcagccccacccctggcaacctgcctgcctagagaactcccaagatgacagactaagtaggattctgccatttagaataattctggtatcctgggcgttgcgttaagttgcttaactttcattctgtcttacgatagtcttcagaggtgggaacagatgaagaaaccatgccccagagaaggttaagtgacttcctctttatggagccagtgttccaacctaggtttgcctgataccagacctgtggccccacctcccatgcaggtctctgtggggtctttgggatggatctcctagggctgggctggaagcctcatgtactgttgtcttctaggtaaccaccctgaagagaaggggtggcatcaggaaccgcagggaaccaagcagcctttggtccagtgctgctccttggaacagttgagtgtggcctcaaaccattctcctgggtagctcagtcataaaacaccgaatgcctgcctcaaaatagcctctgagggaagggagctgttgacaagtgaagccctcaggttgtgtgggattccagcaggttattacagcttgtggggggagggagggtccattccaccagctttgaatcccagggtcccctcagcttcactgggccacagtgtctgtcccaggaagaagcaaatggacagtgaggatgatggagagactacagctgccttgtctaaaacctgggatcttaaaagtgttattttggcttttattttttaaaaaaagaaaaggaaaattggcaattgtattaatccattctcgaattgctgtaaagaaatacctgagactgggtaatttaatttataaagaaaagaggtttaattggc

SEQ ID NO: 59 - DNA, 77090 bp, Homo sapiens
gaggatgtcaatggctttcagatgtcaggataaccttaaggatagatgaagggttgagagcctgtgcctcatttctgagttctcagctgctatgccgtggaaatcctgtttactttctgcatctgctcctgcaagactctggagccagtcttgaggtcctacatctccgaaagcaagctcttctagaagttggtgagcagaatgctttttgtttagaagtgtggctataaatgtctttgtagttgatgcactctcatctagtaagtaactattatttttgggctctctagaaaggtaattattatctgatataatagtttagtctgtgatgcttcttttaacatatttgtaagttttaaccaaatggttaaagaaatttgctttttaacccttaaacctcacatatccacaagtctctaaattccataggatgctatggatttctagttgcctagttcatgtcttttacttagaaaacgtcagaaaacccaaacttctcgtgacttcaaaaagtgtaattgtacctgaaacttcttttccttcagatttcttatttatgttttctgataggtttttaagattaatcttttcagaaggatgctctaaaaatctggccaatttgattatcctcttccaacttggaaaaaatatgtatttaaaatgagactagaatttgaatgaccttctttcatggaactctgaaaatgttttttggcttgctgtcacaactgacaaatatatttaagaaataacctaaaagaccaatcttaacaatttgactcctagacagaagaaaacaaaaatctttttatacataaaacttactaatcattagtgatcatagaaattttcttgagtgtgggtgccacatgtcttatttgtggggtgggggcagattttgttacatagcagaatttttattatatggtgtgtttcataatatggctacataagatcagacaacaccgccaggaatgacagagtcgttacttatacagaaagtcaacttaagttatgcatatttcgagacacaattaaggttgatacaaaaaaagaaaagcagttccttctgtttctccatgctattctgctattctacaagccctggaaaagaattagataggcttctttgcctttacaaaaaaggtcactttcttttattatttggggaatggttggttggtgctagactgaattctggggaaccatttaaggctaatacttccaaaggggtaaacttgttgacactccttgagagaactcacaattcagatgggatctctatctcaaagagaaataggcaacctatcttgttttcaggtgtaactgactaaataataaaagtggatttgtggggcaatatatgagacttctgtaatcctgacaagaggaaaggaaaaatattttcaaatgatgtactatgcaaatactaattatttggaatctgatacttttgtaaaggataatgataactgtgtaattaactgttctaagagttcaagaaagctaacacctgaggataataaaacagttttcacctggggaaaagataagctctggaactcaagaattacagtcaggcaaaaaaaaaaaaaaaaagagttttaaactgctgagaaatgattgaaaaagactgcttaaggttgtagagtgggatgattaaatggaaggaaatgtttcagagcaaagaaatataaagttcttgatgtgactgcggctcattttgcttttggcacaaattactgattaagatgactacttaaggaatttaatctgatattcttagtatttacaaacaaagcttcaggttaaattgttttgaaaaataaagaaatgctataaaatgagtgaagtgcacttcagataaaaattgtgaagtgtgtgcaacgcgcttcacaacaggttactttattgccacctgtgaggagcaagaggaggtactagaggaggggaatgaggttgggtttccatatcatgtgactagaatcctcagtcatgtctaatccacagtggttcaatcacaaacaataaatgctcatcaggaaaagtaaatgattgcaaacagatataagtgtgcaatgaatataaaaagaatatagttgagtaaatagttttagtgttctgttgtatatagaagtacagtaattggctaagccactggaattttttttttttttttttttttttttttttttttttttttagcaaagtatgccattggttccacaataagctttcaagtcatttctttatggaaaagggtaaagtgaattctgatttgtatcttctgacaaaccacgtggagaagtaacacttttagatacgtgcttgttggtaccctgctaaatagctaaagatgttttgaaacatactcagagacctttgtcacacaaacactatagtacaaagaaggaaatgacagaaaattggcaagcattagaggggacataggagacagcttggctcattcaccaaggactccagactgtgctcaaatggaaaaccattgtttgcccttcagtgcttgtgatgtttaaaggtgaaatgaggatagtttttaaaaataaattattattagtttcatctcttcattaatgttgttccttctcattaagtcttataaatattacttttctcatttaaatttttagaaaattaaaaaaatatatattagtcatgtcatgttttacgaccatgacttaataagaacacttcagtctaattgaaattcatttggaggttcctttggtcccatgttggaacttcactgtaactttatgtaaaatgtagcaaatgccattgcaagatctacttcttgtatctcattctggtcagttttagaagtgaagtaataaaaattagtgtgttcaatacaatggtctcagaaaatagaacccaaagcatcctgtctttccagagaagatacaaaattttaagtaaactggatatctactttaagactgagccctcaaacatgaaatacctattttgtttgaatacatgatggagttgctatctttcacatacctttattcattgacatactctttcaaaaatatttaatgaacacctacactgctttaggaaatgctattagaagcaacattgtgctaaacatttataagaatctaggatcattttacaggtggttttctgaaccttgttcatatagaatgaaacttttgatgaaggttaacaaacaaaaactgttagttaatggtgaaagcatattcatcattttatggacacttttccccatgaccccacaacaacagctcccttaaagtgttatcagtctctgggggaaaaaaaatggaccaaatgagtgacagttatatttccagaaggactagaaggaagatactgtcagagttgtttccattgcttgctctaagcttctcgtttttgcatcatttactcttaaaatgctaagtaacttcacacaacataggaagcctctccagaataaaatatctgtagtatggactctaagctttaggattgataacttcctaaaattatttcttcttgaactatttcatctgaaatggggaataaatactagtcttgattttatcttggtctcctgggaagacctttaatttctattagccccatccttttaagagctgtttgggcaataggtacatctaagcagatgcatagacaaagaattacagtgcagaaaggtatgagctgtgataagcttaatatacagggataagagcattccttacagacctttgctattgcctagagttggagcatcttgccggcatataaactccataaaggtaatggagctattccatttgtaactacttgtgttagtaacagcaatgtcccagtacctgactcatacataataagcactcaatagagagattttattcatttatttaaaatattgtctaaatatttcctaaatcaaaatattcatcttctactaaggactatgactaaaattttaagaattttgaatcacgtaaataacttagatacatttctttcttatgtttagcactttttctaaaaatatccaaattgatgtagagctctactgtaacataatacgtagatctgtgcaacttttttttttgtattaaattctcaggtaggtagtttaatggaatgttactactgctgttcttcccagcatgtctggctgggtttgtttatttttacaatataggacagatcctctactcacaaaatgaattatgggatttaatagagaaatattctataatttacaagacgctaaatatataaactcacagatgctgagaatgtctcagtgaatcaattcatgaagctcattcatttcacctaatgcctctcaatgatgtcctagtccttttccccagtctgcatgcaaaacttagatgtgcttgctactgtgctcagtctcttagatgtctttgccgcatgtactgagttttggatgaagccagagagaaacatttagctcagtccatttcactctgggtccgagggtcatcttggagatttgctaatctttcctccaggaaagggttgtgatttctccacttttcacttcatgaacaaccacagcatgcacagtactgttctttgctagcctagtcacgtatcccctcaaaaccctctctgaaattgggggatggttaccagctggtggtaaaagtacaggcatcacccattttctttctccatcccttagttcctttctgacctagacagctgcttgaatgttccttccccttcagtcttccaatctttgtgtattttatccttgtactgcagctctgttataatcattcaacaaaattctatatggtttaccagctgaagttgggaaacacaggattaaacaaagtgaaaaataaatcctattattaagaggcaaacaggatgcttactataattcctcccattatcttctccactccattaatattcctcttgagtattaaaggtagcattttgttctgtcaactctcccatgcaaaacttctgtacatagtaacagcaagagagtttctgaagctgaaatcctgtagaataaataaaagcaactgaaacaatctgaatggtcctttgaaaaaaagaagaaaaagaaaagcacttaattatttaccatggcaaagcaacagctatgaagcttgccttttctttttttctgaggcttagggctggacgtctactttcagctgctctgccaaagtttacatttttttcatagcaaaagctacaaataggagaagtggggatagtttttagcacactctaaaactaagatctactgattttttacaaataaggacatggaggcttgtagaagttagtgaccttttatgcctttgtctagccatattgctttcctcagtttccatttctgcagattttctaggttcccattccccatcccccactttctaagtgatattatcaattttcatgacttcacctgtaatctgaatgttgaggagaccccaatctacatcttagggctccaatcactcttctcaacttcagacccatgtatctccatgccagtaggtcaagttctcaagctgaaagtatctaaactctttttgttgttgttgttgttgtcattgttgagactgagtctcactctgtcgcccaggctggagtacggtggtgcaatttcggctcactgcaacctcctcctcccaggttcaagcgattctcctgcctcatcctcccgagtgctgggactacaggtgcctgctgcctcgcccagctaattttctgtatttttggtagacatggggtttcactgtgttagcccggatggtctgcatctcctgacctcgtgatccgcccgcctcggcctctcaaagtgctgggattacaggcgtgagccatataaccttgttaatgtgttctgattcaagatgtacatttttatgttcaaaattaaattataatccccaaatgagtgtcttttactaggcttgaatttatcccagcattcaataatatatatgcatataacatatcccctgcaaattattttaaaataaaatggttaaattttaatagctatttattatctatgtggtacctgcaaagcactctaaaaataattatgcaaagtgcctagtatttaatgagaagtaaattactggttgaggcatactctctagtgttagactgcatatgtttgaaacttagatctctaactttccagctctgtgacctctggcaagttagtaaacttctttgtacctctgcttccctatctgtaacacatggataataaacatgcctacctcatagggtaactgttcaagataagcaacttaatgcatataaaatactcatacaagtgtcttgcatatggtaagttccatagaagggttaaatattatttaagttttacaataattttaaagtagatagtgttatctccattttacaaatgagtaaacagacttggggagattaaaaaattggctcaggatcttgcagccagttagtgaaaatgtcaatattaaaccctgacaggactaacttcacaccacccctaaaactggtcctatgtttcccctccaggttaatagtacctccttttgtcttgttactcaagcgtaaaacctgagacttacgattttttcctctctacctaactaattagtcaccaagccgtagctattcatgctaacttctaaatatcttccatatccactaagtatttctgaaatctttcccacatttcccacccccacccccatagccagtttttaagttcaactacataatttcctttctagattattttgataggcgtcctctggccttccctccaatccattcttcatgctgatgccaaggccatctcctaaacccaaattttgtcatgcgctccttctctaaaaatccttgagtagtcctatgttgctttcaagataaacccacgagagaatgaattccaggtaatcaaggcacacatacaatataaagtttggtatagtatgtgttacattagggcttcacgtttgtggtcatttgtggccacttttctggtgtcttgttcttccaaaactcatacactgtaccgaatccttactgaaacatgtttccccagttgtatgtttattattttgtatgtttctttatgtatctgtatttggggaaatgcttgtgatccactataccctctcccactctgtacccggagctgtacaatgcagtcctggcataaggaaccacttcctccaccactgtcctttaacaccttctctccctcaccattcactcttcctacctgagtgtagatgtcacggcctattagaattgtctgtttatgaatctgccttcctagacctgctgggagctacctaagcggggtgtcaggtttttgttttgttgattctcacgttttctcccaatcagaagtccaaactaagaatactttaggaatgtatttaagtttactcttgcaagggctactgattgataaaatatttgccaatgtaattggggggaataaaagcatgtataaataaaacaaagttgatgattcaaactatgatagcagaataatttcacacgtaatctgaagatttcaacaacaagagcttgataggagacataatacagtattagagtcagaaaaaatagttacaaaaagcctgagttagtatttgcctgtcttttggcttgtgatctgttggtgaagggagccagatgagaatttggttcaggttacaagtatgatcacccagcaggtgcttgctatgtaggcaaagggttgaggacaagataagattaggaaaggacatgcgctgtgaggggtgagccaagctgtgggtctgatctaggtttaaagccttccttggaaaacaaggactggcaagtgaatactggaaactgaagagtgagaagtattatccaaaagcacacagctcacttttaacagctgattaaatgagactagatttatcacagtagttctcaaaaattggcatgagaatgataaaaaatgtttaacttggtattcacaatgcctttttaaaaattgttactatattgtcattgtaattatcatcatcattactcttattttgagttttcctgatctatatttgtgctctgtatgtctcacctcagactacctaagatttttagtcccttctaggaagttatttaaaatctacccacaattattttggtagccatttactgagagggtaatttagcttcctaatattatggtatttttatgtcatcttttgtaaatacaagaatagtaatatcttcagtgtagtcgctgaggcttctttcctttagtgaagttttagcgaaacagaattttcctctatcttcttttgaacatattttaaacagttattttaattttatttatttatttattttttatcttttatcttttttgagacggagtcttgctctgtctcgcccaggctgcagggcggtggcgtgatctcggctcactgcaacctctggctcctgagttcaagcgattctcctgcctcagcctccccagtagctgggactacaggcgcccgccaccacgcctggctaattttttggatttttactagagactggtttcactgtgttagccaggctggtctctatctcctgacctcgtgatctgcctgcttcagcctcccaaagtgttgggattacaggcctgagccacggcacccagccagatttttttattttttagagacagggtctgctctctctgtcagtcaggctggagtgcagtggcacaatcatagctcactgtaatctcaaactcctggctttaagtaatcttccccactcagccacccaagaagctgggactacaggtacacaccaccatgcccagctaatttttgtggttgtttctttctgtagaggcagagtctctctatgttgcccaggctggtctcaaactcatggcctcaagcaatcctccctcttgggccccacaaaccactgggattataggcctgagccactgcgccctgccttgaacaaaattataataaagctcttgagtgttttgtggcctttcagcagatgctctgcccccctgttgtgacctggccatgtttcttgtctcagcctgcttttttctcccatacatgacacagaggccctaacctcaaaatcgtcgtcccgtgtcattttgcacacccataataatctctcctatttcttatcactgtggcatcttctaatttttcttctttgagtttctctttagtcatcttgaaaattctgagagattgtgctagcatatacatgagagcctcctgatagcactggagttaggagccaagtttcttagatgctttattactgccaatgtcctttctttaaccaaagaccaacaggaacacacctgtagtgaaacaagttcattactcattgaaaagagaggaaagtgtaccatagggaactgacagtgacccggtaagaagatgttaggaaaaatctattctagaatttggacttcggttggttggttggggagggtcgaggaggtgatactgaaggaaatagagatttgctctgaattagatgttgtcaggaggcaggataattttatgattgggtgtcttaatcttggaggagggaagactagactgaagctaaagctgtaattgataaagaagcagagtcactcatagtaagtgagaagggaatgtgtagtatctgtggcttggacagtgttgataatcgttttgggttcagacataaaaggtctcattttgtcttgactcatcatgatcacagaatgattttatctaaagtaaatgctctatgaattgtttgtgttcagcagaacaaacaccaaggccaagcagtgagtgctgggcctgtgcccagaaacagcaagacctagctaataatatcagcccagctcctgggtgatgggctgttttctctttacagtacaaagttctttgttacttcagtaattaaacgtgcacacctgaaatccaatttccactactttgatgattgttgaaatgagattcttttgaatgtccttcttaagttctataatatgctcaatacactgagtcctgtaatataaaatatcattcctgttatgctagcaacctgaaaaatcacaggagatcagtccctgtataaaaatgataatgtgcacaaattgtttgggggcatttattcttttctttgcacatataccataaaaactaatttgttatataaatgaaaaaattatgcctttggcatatataaaatacaatgaaatgaaattttaataactcaaagcttcttatgaagaaattaaggggtctttctacttactatgtagatgaacagcatgctaatcagattgtagaatcctgcagttgggaattatcttaaaaagtatttctgaaaatatgcacctctgtggaacttatataaatgtggttaaatatatatactcaactttctatttagatattccagataccacctgaaatagaagagataatctgactttttctattattcaaccatatactttcttttgttgtttttatttctttaattttccacattgacagatataattgtatgtattcactgtgtcttaaatgtataagcattgtggaatgggctcaatctagctatttaacatgtgtgttatatcacatagttattatttttgtggtgagaacactttatatccactaagcattttttaagaattcagataaactttcatcataagctttgcttaaataaaaaatctagtaagtgattcaagtctgtgattgaataatattccatatatttaggtagtatatggattcaaaatgagtagaaatattgacaaacatcccatgctaataatctactttgtaacttctcataaatctgtagaggaagtagtagtagagagaggaggggagataaggctataaataaacttgattccatgagtcacacaaagaaaaagtatcttttctttatggtaatgtaatatttaagacatttgtaatattcataattgtattactttctttacattatacatatatgctttttaaacatgagctgcatgataaattcaaagtttcagtgccatatgtaaacttaagtttctctattttttctttttgcagggaggtgagggttgctcttaaaatatgataaaggcaatacaagagaaatagtgtgttttaaccactgctgtatttatcatagtatcttgttaataagctactttgattctactttatggagatttttcctttagttactcttgaagatatcatctaaaccaagaaagatattcattcttctctttctccttaaggtctatcttttcacaagatcctacttcatctttcctattttggaataaaacatgcagctctgttttatgtgagccagaaataatttactgaacaggaaactgtagttaagaagtaaaaatcacagtgaaaaattttaacttttaatgggacaaagaggcttgaatcttttacggatgagagatgcttgtcaggggcctaagagatggggtttatttaagtctagtcagcagttttgattcttaaatttgaatagttcaaaagtcaaattagagtaggatcctgataactgagttgattccttgttaacagtaataaaaggtaaatattatcaataaatataaaatatctaccagttacttgggaagttaatatagtacttttggagtatattttatacagaaccaaatgcatataattagctaatgtgcttttgggtgtctatattttgtaataatactatctgaaaagttgttacagataaacatttattatttttctgaaagtcaaagggatattttgtatgcccggcttagcagcagttgtctatttgaaatgaaaataaaagagcattaatgccaatcagctttcttactagaaatattcctgtacttgatgtttttccacaaactcttaacacatcacagatattcttaaactacttgtataaattataccagaataaaatgggcatcattctcttttttgtttacatcgaatgtttgtttctccagagcacatccgtattgtggagaaacaatggtgactgtttttaattgcaaaaactacccagattctttcttggagagcctccttgttttccactgggtttagacataggttctctttcactctttatcctacatttttagaccatcataatgtatttatattttatacacccactggccaacaagagaatctatatatatgttcactaaaaagcaggtttatacaattagtttactcattccttcttcctagtaaggttcttctttacttgagtccagttcctgactccagaataaaaatgaaattatcaatgtctcttgtacattagtctgtgatttttttgcaggggtgccctctgtatcttaatctttgcttcttcttcgcggctccatctttccctcaaattccccaccatgacactgaagtacttccccgattctgcccttccttggaaaccacatctgagttcctgaccccaattccaataccccagtttataatgtgaagtgggaaattgggggattaaatatttcctgatatcagttgaaaactgtgggtgcccttgttatttgctctgctacttgttagctttatactgtatttgtcgcttcaacgaatgccaatataaaagaaatgctaagtcctttgttcctttgaccttttgtgtttttttcccctctgcttgcataggggcgtatccagttttcattacttctcttctgtctacccctgctgttatgttccagaatgccaccaagatgaaagctaaccaaaagtatttctcccacttgtgataatgactcttagggcttgctttccagttttacagccctctttgccatggctgccactacaaactgcaagcacattcccgttaatccaaactctgcctagaatgagaccacattcccttcatcaggctgaatacaagttttagttcagggccttgtgtctttcccgcattcatttattagtcatcgagctgaatttctcaacccaatttattgcttttcatgtgaccttttaaaagtacaaactcgtatcctgtcactcctccaacttataattatttaattgttctattctgcttacagaataaagttcaatctccttagaatatcatgcagggggcttcaaggtctggtatccacctgttttcctcactttttgcaacttccctgaaaaccatttttgtacatttgcaagcatatcacttcctttttgcctctgaatttatgcatgttgttctttctgcttctattgccctttttccatcttctgtgattagaaaatatctattcatccattgaagcccttctgttattttacaatctatctcctatcaacaaaatcacaatctattcaagaccatattttattcatctttgcatgccagcgccatgctcaaagcctggagtatgattaaaggtcagttagtgtttgaatgaataagttagttctttagtacgtttcctttctcttaactcacaacttgaagttgtattatttctttactcttcagaatttctcccaaaatattctaaggcgggaagcttcatgaaaactcttggagttttctctaatagtcttaccaaaacaaatggaagagtctttcttggtttccatgatagctttctttgtttcagattggttaattttatagttcacttttcatttgtcaggataattctgtttttaggaaggatagaagcttggacttaattttattttgaattttgatttaattttgatttgattttatagccttaacagataacactttcttcctttaaagaaatctatctttccaggcaataggagatcttgttgtatttctttgttctttagagttgattctatagatattccttgactttttgttagggttatatcccaataaagctagtgtaagttaaaaatatgaaaatatcattgtaaaaatgcatttaatacatctaatctactggatatcatagctcagcctagcttatcttatatgtgctcagaacacttacattagcccacatttgggcaaaatcatctaatacagagcatattttagaataaaatgtggactatgtcatgtaattaatcaaatctagcattgaactatggtttctactgaatgtatattgcttttacaccattgtgatgttgaagggttgtaagttgaatcattgtaagttggggaccatctgtgtgtgtgtgtgtgtgtgtgtgtgtgcctgcacgcacacacacacacacacgcaatttgagcagataattgtgttatcaagatggtatgacagtccagtattttaaagtgatttctctagaggaaagttattatttgacaaatactatgaaaataaatctcaaacattttcttaagtctccagttgttatcagttgggatgattttgcctgcaagtaacaaagtccaaaagaagcagtttcttgggtactttttattttgttcatataataaggagtcaacagactgaattaaccagcttggaatcatccttaggctcactgatattacttaattcatagggctctaggttggtttttcttactgttaccctacaagtgcaaagtggctacggcgattgtaaggatcatgtctttatataacaatgcctaacaacagtaagaaacaagtttctgtcttgtttcagtcttttaaaacagaaaactatcactacagctctgtagctgacttgtttttatgcctcagtgtcagcattttgttatatgcttgctatacatctcattatcaaggagaattgtggctaaaactaatcaatattcaacctctgtagcttgggagaggttttataatcacatagacatgaaatatctaacacaaaatcagagctcagtgaggagagatgaggtggaaagagtggaagtaaattctgtcatagtaggtcctattctaatttacatgagttcaatttttgaaaattaaaatatatgtgtcctcacacacaggggaacaacacacatgggggcctttcagagggtagacagtggagggagagaatcaggaaaaatcactaatgcgtactaggcttaatacttgggtgacgaaataatctatagaacaaacctccatgacacagtttacctatgtaacaaacctgcatgtgtacccctgaacttaaaagttaaaaaaaaaataaaatatatgtatcctcaaaataatttttaaaaagtaaaattgctgtgaagggccaggcacggtggctcacacctgtaatcccagcactttgggagcctgaggtgggtggattatctgaggtcaggagtttgaaaccagcctggccaacatggcaaaaccccatcactaataaaaataaataaattagccgggcatggtggcaggtgcttgtagtcccagctacttgggagactgaagctagagaattgcttaaacccataaggcaaagcttgcagtgagctgagattgtgccactgcactccagtctgaacgacagagcgagactgtgtctccaaaaaaaaaaaaaaaaaaattgttgtgagaaaaacaagctcttcaaacgtacattggatgctgaagtttctatttctcacttgactatgatattcttttcaattacatctgtgctgcggtcttctaggggtttgtcattagagaaaggtcagactgataagatagtaaagtgccaaaagttggtcatgcctaaattcattggaaaaattacttagtttaggacagaattttattccatttatgtaaagatgattactattttctgtcatgcacagtacagttctttcatgaatattgttaggagaaattttataaatttcataaatgcttttggttttttttacactgtttcatatggatagtaatagattatagtgtgatatatatatttagaccctgcattcagggtctgagtgcagcagccagcatttaactcttagctcagcactgtttgactttgagcaatttagctaacctcacagagcatcatttttgccatttgtaatactgtgaaaatagtgacacttaaagagtgttgtgtattgtttgtgttctgactgctacactgttcccctttcttgttccctttcctggagccaccgtagtccctgagacatgactatattgaaactaggtcaatttataaccctacaatggcctctaatgttcaagtgaatggaagtgtcacacatctctttaaataaaaaaactagaagtgattaaacttagtgaggaaggcatattgaaagctaagataggatgaaacctaggcctctgacaccaaacagttagctaagttgtgaatgcaaagaagaagttcttgaaggaaattaaaagtgctaccccagtgaacacacaaaggataagaaagtcaaactgccttattgctgatatagagaaagtttgagtggtctggatagattaaatcagctacaatattcctgtaagacagagcccaatccagaggaaggtctttactcacttcgattctgtgaaagtaaaagaggtgaggaagctgcagaagaagagtgtgaagctcacagaggttgattcatgaggtttaaggaaagaagctgtctccataaaataaaagtgcaagataaaacatcaagtgaagaagctgcagcaagttatctggaagatctagctaagatcattagtgaaggtggctacactaaacaatagattttcaatgcagacaaaacagccttccattggaaaaaggtgccatttaggacttccatagctggagaggagaagtcaatgcctggtttcaaaccttcaaaggacaggctgactctctagttaagggctaatgcagctggtgactttaaattgaaatcaatgcttacaaccattataaaaatcctagggcccttcagaatgattcaaagtctactttgcttgagctctataaatggaacaacaaagcctggatgccagcacatccatttacagcatagtttactgaataatttaagcccactgttgagacctgctgctcaggataaaaggatttctttcaaaatacaactgatgattaacaatgcagctggtcatctgagagctttgatgggtatgtccaataaaattaatgttgttttcatgcctgctaacacaacatcagttttatagcccagagatcagagtcattttgactttcaagacttattacttaagaaataggaggtgggtggtcacttaaggtcaggagtttaagactagcctggccaacattgcaaaactctgtctctactaaaaacacaaaaattagccaggcatgatggtacatacctgtagtcccagctactcgagaggctgaggcaggagaatcgcttgaacccaggaggcagagattgcagtgagcctattttgcaccagtgcactccagcctgggtgacagagtaagactctgtctcaaaacagaaaaaaaaaaaaaaaaaggctataatttccatggatagtaattcatgtgatggatctggacaaagtaaattgaaaaccaactgaaagtaattcaccattccagatgccattgataatatttgtgattcataggaaaggttgaaatagcaacatcaacaggagtttggaagaagttgattgcaaccatcatggatgactgagggttacaagacttcagagaaggaaataactatagatgtggtgaaaatagcaagaaaactagaattagaagtgaagcctgaagatgtgactgcattggtgcaatctcatgatgaaacttcagtgaaggagaagtagcttttctaattgagcaaagaaagtgtttttgtttttgtttttttttagatgaaatctcctggtgaagatgctatgaacactgttgacatgatgtgtagggaaaaactttctaaaccatgtttttcctctgcctcatgccacaacaatcatcacaaaagcagagttcgatgacaagaagtgtgggggttttccacacacacaccaagcagcaaacaccagctggatgtcatccaactcagttccgacactatctacatggaaatagttagatcccacaggttgcgagcttagtccccaagattgcccccttctttcaacactagtcacaagtccaagtctccaggactaccgacaagcttcaagttggggttctcattaccccctctttgggtttgattaatttgcttgaagcagctcacagaagtcagggaaatgcttatttatgtttaccagtttattataaaggatacaaatgaagagatggatcaggtaaggtatgggggaaggtgtgtggagcttccatgccttccctggcatgtcaccctctaggaacctccaagcattcagctatcaagaagctcaccaaacccagtcctcttgagtttttatggaagcttcctgacttcagcattccttcccccaggatgtagggtgggatcctgtctggggagagtcttgagactaacaatcagaagggaggggaaagattagggtcctgccttggggcaagtgaaaggagggctagagggagattctgttttctgaggcctgatatacatgataacaaaaagtctgtaactagggttaagggaaataagaaccagaaaaggtggacaaaaaccaatatatatcataacaccacacgtgacaacaaagaatttataatattacataaagttggttgatgaagcagtggcagggtttgagaggattgtcccagttttaaaagaagttctactttgggtaaaatgttatcaaacagcattgcatgctatagaaaaggcaaacaatttttccaagtgatgtggcaaactttattgtctcattttaagaaactgccacagcaaccctgaccttcagcaaccaccacctagatcagtcagtagccatcaatatccaggcaagattctctaccagcaaaaagattattataattgttagcttttttttagcaataaggtattttaaagtatgtacattttttaatggtatggcacacttaatagactatagtatagggtaaacatacttttctatgcagtgggaaacaaaatttgtgtgactcagtttattgtgatattcactatattacagcagtctgaaaccaaacttccagtatctgcagaggatgcctatattctgggcatgtttacatttatctaattttcttaacattttctagtgttatctcatctgtaaacatgtgactagcaataatttatagaatgctttgggacaaataatacatggaagcatttaacatgatagctgactcgtggtaataggtgaataaatatttgtccccttctgtatcatttgatagaatttttcaagttgtctcacatgtgagggacaaaataaataaatgttttagaacaaaaataaggtattatgtctaataattcaaataatttaaaggtcatttatatttttttaaaaaaatccaaagaacactagagaatcaaaatcattttaaaaattaacttcatactagtaacaggccactagtaacagtgtatggaaatgaaaaagaggtattattctagttatccaagagcttaatattaagttaactagcgagagtggcaagaggcagccaaatgcctaggcagatagtggcaggtccccactgaaatcccacctctagccgaagacagtttaaagcctgaaagccacactacgagttaaaccctcagactgcattgagaacttgtcttcctgtttggcgtgctttcctctgattgatccccacccttcacctattttatatataccttccctttccaaattggtttttcacactgtcgtgcccacctttgagtggtgtctttgctttaaccttttttacaaccagcatacactccccattctgagtccgtaaaaggccccatacccagccacatgggggactttcccaccttcaggtggggggaccacccctgcatctcctctctgctgaaagctgttccatcactcaataaaattattttctgtcttcctcacccttcaatattcaccatatcctcattcttctggggcacgagacaagagcttgggaaacgctgaatgctggtataagctgggacatgccagtgtggccaagagaggcccaggtggggcatggcttgccgagggtccccggcttgcaaagagaccatgaagaaaaatcttaccttactagcattgctgaaggagaacaaagaagaataatggcatccaccaaaaatcaaagcaatactgtctcaaacattacagcagaacttggagaaaggtgttaaaaagagataaaaagtggacacagaaaaaagagcaaaacaaagcaatattctagttacatttttaaaaataatcattaggatgatttagaacaagtgtttgtaactctgggggtctctgaaccctcatttgtaggactagatgtctgcagtgagaaaataagaaaggaaagagaagaaatgtattctacacagaagtaggggaaagttccttaaactatgagtcacagctatttatatccgaacaaatgtgcatttcctattagtccaggagattctgtggtcttctacccatgcatttgtataaagaattgtcctctgtgtataagctgcatctctagaatatgaactccttgaaactacctagcaacacttaagtacctagaccaatttggacagacagcattattgggttgtcttggtaaatattggtaacttcaataaccaagaatgctctaaaatctatagctagacaacaggctatctctgaactaaactttagacaacagtccttggtagactttttttttttttttactctattatgtaaaagtagagacttatctagtaataattctagctggttcataaatctctgataccattaatttctctattgaagatctcattgttagtatttattataccaatcttctgttctaaagagataaaaaataactaaattttggacttctattaaaggctagggaccagctctagaatgaatgttctcgaccagggtgactgtccacttcatgaaagtagactaaaaataccaaactctcatatatacacaataatatatatcaaagtatttgaagtacattatagaaatcctcacagtaggggtcacattttcttccactttgtggcagagttctgagcacatagtgaccatgtgataaatattaattcagtatgtgagtgtatgaggatgtatgtcatcaatattctttgactgccttaagtgttctgggaaaaagccatatttttggtctcatttagcatatactgtaattcttatttttagggtgtatttatttttgttttaatttatttgatttgtgttgcatatacaatattgtacccatcaaatattgcttaattctttcatattgcaaaataaacagctattataagcctgaacttgttagtcttgctgggccctgcccaaggttgccctcatctccagctttccacaaactggaatattcactgatgctttgtttcttctcccagaccaggatacatgttgttatgtggttcctaggaggactgtaaagtcctctaacaaagacaaaggatggaatgaatcaagggaattactatgagaaagtagggatatccctggagaggggactgtttctgtgtgcttttagacatcacagagtaattgtttctttttttaaaggaaggaaccagggtgaagagcagctcatttttaagctggagaggttaacaaacactggctgcaagatttactttggtttaggaataccactgtctcacaggagtgtcaatcaaaattccacagccattcttcgacactaggaggtgggactgactgatgtacagcagtgatttgacccagcacttggggcaaacacaaccagagtcttcggtgttaattccctggtcttcccaactagcattctgaaagtgcattaacatttgtggccttgtgctctttcatcggacttctaatggtaattatgcctgtgtaatcacagtaaagttacctaatctaaatatgtaagatttcacactttgcttgcaatacttaaaatttcctactttgatctgacttttgctttgttcttgtccagtttaatatatatttgcatttctctctcttctctcagggcgtagaatttatggagtattgtaggcatttaggcagcctgtttcaaacttttaaataagaagttgtatctaaaagaaagtagagggataagtcaaatgatttttactatgagttctcagtaattgttatgttaataagtggtaagaaggcattcaaaaatatttgaaataatctaagtgctccaatatacacatgcttatatgcatgcaacagtggaggaatatcttaatagggcaaattcgtgtgtagccatcttttattcttaggaatatatatatcctgccagacatggtcatcccagcactttgaggccaggagttcaagaccagcctggaaaacacagcaaaaccctgtctcctgtctctaccaaaaatacagtaatacaatagtaggatatacttcctagtataccctaggaagactgttaagttatagatagtcattttttagccaaagatgtattataatgaatatgattataaaaatttagattctcttatattaatattgtaagacagagtggttgacttctcaatgttggagcaagcagaatctatcctcccctgcttttgatgttcaatagtgacaagtagaggtcacacgcagtctctgctgctggcattcctggcatggtcacagtgactactgtgacttgtttgagaggtgactttgaacatttattttactttcaggttagataatttagtcattgtattggcttgggctagtgaatctttgttacaacagccaataggatatatgaagtagtgttttaaaaaattagccattaaagacagttttcaatttgcaaaccatttctaacatgttttccatggtaagaattagctacacggaatgatactgggaaatatagaaaaatggggggtactggaactagctaaaattttacagattacaggtataattgttttgctggtcacacatgattatttctattggttacattttatttggacttgtattgtgatacattgttctatagaaacaaactatgccttaactttgttgtgatgatctaaaacagttggaaactgagcctgatgtattaaaagagagtacaggaggccatggtttgccgcagtgggcattgtgtgaagataagggactgaagaaggtgtttatagatatgaaatgctaatgcatgctcattcaaaaaatcataaccttgcttgtatttcagatctgtgcaattctatttgtcatttggatggctagtattgtgactcaagtattctagacaagctgtgattaaatatttcaacagaagacctcaaagaattactgatttataattacccacgttacctatgctacaataattagaaataaagaaattgaagtgatgtactgtatagtaatgctactaaacagatatatgtttatatgaaaaggcaaggaatttatgaaggctagtattatgtaaatgactgtctctaaagaattggatgatatattgcattttgttcattgattcaacaaatatttgtctgcccaatacataccaggcactgaccattttctgtaactaacttcatccacttagcactgcgaataatccaataattccccaggacaaatattattattcaataaattaaatgagtatcaatacaggggggtattttacagaaatcactgttctcctgggtaatcaggggatctgccattgagtttggtagcacaaatttttgtatttttccttaagggatgatgaaagatcagtggactcctaactatctgcagtctgtggagtctcaggttgcttagaaactcagcgactatgggcttgctatggcaacccaatttattagtgactgcaaaactaacttagctggcattgtggcaaatctccatattttgctggtaagaatattcagataagttcttctatcatactagtatttatattatttacactattgagctaaatatttatcaaattttgaaaataataaattatgatttataatggtcgagaactacatgaaaatgaagcttaaattctgaatgtatttttagatttccaatttacactgtctgccggttaccaggccattgccttagcttaaatctacagaatgtgatttatgatttgtactatatttaaagcatgagaaaacaaaactagtacagtctattatctatgtgccaataaaaatggtctgcaaatttagctttaatacttctatccaattaatagataaatttatgtatgtatagtataatttaataattttgttttacattacaaacttcatatataattgtaagattttacagtattatgtatttttaaaatcttatgtcttaatataccatgtaatctgatacacaaatgtattagaaaaccactttacttgaaaagtacatttttgcaattgtgggaaagacattagggaacatattctcaacctttgtttgagtatttgttccctgtagtacatttacaaaaattttgccctttctgattttagtcatgcttttaggttctgttgttttacatgctaacgagttctattgttttacactgtatataaactacaatcttctctgtacctcttcatatgtaagtattgcattcatcttatctccctattgattccaactttttgtttttatcacagtcaatagcagaagcagagccagcattctctcctgagacagactattacaaggttctatttactgtccttttctcctgggttttggcatttatgcattttgttttgatacttaagacttcatcatattaaaggttctcttgagattgaaagaatcagtctgactcaggtttttacaggacaatgctacatttgattatattttaaattttttctttatattttatccattgccttgtaattctgcaaatgatgaagttatttttgaatcctctagtacatcagttcaactaggctatgcccctgtggttgacgatatgtctcatctcacagacggaaacaagtacaaagagagaacttaggttattttcttggaattaattctcattggaacagaaaagccaattcccaggggtccttgcttaagcctccaattagtacaccatattgaccccctcccttaaaagaggggctttttttttttcacttagactacagacccactgctctttaacagaataaatgagcagtccagaacactaaacaacccaaaggaatcaaactcttatcaagggatcatgtgtgttagcctttaaggagatagtagattggcatgtaaaaaaaaattaggtggtagagtacaaatattcagaagacttggagaggattttcaacaggcaaaagcaaaacaatacaactatttcatgatacacatttagtgtttaatcatgctttttggtgtgactgaattattttaatacattttacaaaactttattttaatcaatatgtctgtttctgccaatggatacataaacacaactggtacattgcatcatttaaaatatttgggaaaagctcattgtgtagaagcatgtcattcattcttgtattatagttaataaatacctgtgaaagggaagaattaaatccctttataagaatattttctaatgtggaataatcaaactatttacctgtttgctacttgagatttttgcttaaaaaagagtacatctgttctttattccattacatgcatgatgtctattaaacataaaaaaacgcacatctggaaaatcatcagtgcatttaaacttgatcagatactggaataaacaaaggtacttcctctcctacaaaagtatttaacatatacatgcatttcttttaaaaatctatgctgtgatacatagagttactgtttattcagcatcaaataaaaaaaatttgagcacctattaggtatcaggcactatttaaaactctggaatataatgctaaacactaccagcatgattcctggtaatatgttatagggagtttcattgtgacctactctcttgctacttatgaatgaacagatgatgaattgagctattttggaatcctttctataagtggaacactaaaatattctaaagctatataaatgagtaaaatacagtcacatggtatatgtgcttcatgttatattaatatctatatttgttacatagagtgtagaaaaccatattgcagaaacactttttttctcctcctttaagagacctggttaagccatgtttcttgactgcactcatgagctagaagtttgattaagtgttttagtttattaaaaatacctgtgatctaatgcctatgttttaaatagaatcacaaggtatcagcttgggtgctttcaacctgtgaaccccaaatacctaagacagatcccagttaatttaatcccatctacccacggtagtcagagcacagtttggttttatgcattttaggaagacctgagacatcaatcaacatatgtaagatgaacatggattcagtctggaaaggtgagacaacacaaagcaaacacaggacaactcaaagttggcagggggtcccaggtcataggtagataagatacaaatggttgcactcttttgagtttctgactagcttctccaaagaaggcaatcagataagcttttatctcagcgagcagaggaatgactttgaatagaatgggaggcaggtttgccctaagcagttcctagattgactttttcttttagcttagtgattttggggtcccaagatttattctcccttcacaaacctaaattagctgaatcaataggaggacaggtttgcccacagaattgaaaactccagtgttagcactcttccggcacaggtggatcagattgctggctcttcttaactttctctgctctctccttatttggatggtaggtttgacacaggctggctttccttgaggttgtaagagggcctccagcagcatggctgtaggcttcctccttatacataagcagtggggattggaatagagaatagatgatgatagaaaaatcattcccactgctgttcaacaaaggagcacattttcatgagttctgggcaaatgtatgtcctataacactctctatttaattaaatgagaatattaaatagtaccttgacatttttagaggcaataccacattaatagctccacatcaacatatggagaaactttcgaatctttccctctgaacttagtgttaaagggcatctctggaaactaaccagccaagcaagactttctggaaaacaaggtactcctcactacacaagatgaattatagatgtggagttgtgaagtcttgaaatgttgctttctttcctctggaaaatacttaagcatattgaattagcccttagaggttataattcagttaactgagatggctcaattttgtcagatttattcattgttcttcatgtgtagaaatagaagcaaatccctcaacatacaccttaacactcatgtattggattattctaaaataaaaattgcctatttttagtttaaatcttattcacctagattgtctggagactgataaattcaatagtagcctttttttttttttggtatcatgaaaaaaagtattctaggtaattaatttgcatcaaaagacttagaaagaaaaccactgctatatttcttttatttttcacctaacctagatgacatggcagataagccagggaaaaattagtaaatagcacaagtttcatcttcattttttgaattttaatagtttgaagaattaaaatatttaatacttagggtgctaaatgtgaggttaagagactaagtagcagaataaggtttagttttggctgaaatattttttgatgatatttgcagacccatcattgtgtgtcaaactgtcatcggggtggtatgcccatcaaaacaaggatctgttaagtggataaagtgagcacatccttaaaaggagtagaagagctaatgaacttacagtttcttctaatttagagatatttgtgtttttctttgtggaattgtatgaagttgatttggagacagttacaaatttacatacctaaaaccaggtaccattttgaaagaaaattaagataaaaatgagatgtcaaatagccaaaaatcaacagaacagacaaatgtaggataatcaaagaagaaaaaattaagagaaaagtctatactgaaagcttattataaaaatcaatcttttgggatgtgcttctctatagcatgggaagtacttgatgcttttaatttgggattccagaaatggtgtggtttccatgtttttatggatttatttcacctcaaatttttgttcactgcaggctcctttcctcctgcctattttgattacccaattttcccggaggggttgttgaaaatgagaggaaaacaggcctagcaatgatcttggatcaagtccagaaaatgttcttagtccttggaatacattacatggaggatgccactccaagccttgtaaatgcagcttgggaaaataaatacgcttagagtattcactctgaacacgaaagcacagtgtggttaacaacaggagaattgcagagtatgccgaaacatagaaaacataaacatttcagtttagatttattatcttcacccatgaactggggcactgtagaatagaacagtttgcatacctacataacacagctgagagaccttgggctccaaaaaccaacaaaacatcgtgtccgagaagtctctgaggatctaagtgcaaattgagcagtgcaaaagtagcagggctagtggtgtcttttgagagtgacattctgtagcaattaagattccatacctactattgtttacttaattcacaaccccagaatacaaaagaaaagtgacattcagaatctgaaatgggatgatcacagtaaatatgtttgagtccttcgttgtttgctggagaacaatgaggatgatagacactttcataaaggcagggctcatgataactaaacctacataggagagttagaaggatgaaagatttctttctgcataaccacaaggtaaagtattttatcaagtccattgtaactgctccataatgtgaagcaaattttaaatgctgctacttaagtttcagggctaaaatgaagtttaataggtaagttagacttctctattattcaaagtttaaatgtggaaattccaaagtgaaggttttactctactgctgataagtttgcaatttttttttttttatttcaagaagataaccagctatcacaaagacacatacaggacagttgaagggtttcagtgttttagaatgattctgaagttctaagatatttgtcttatgtattatagaatagtagtctgccacttttcattatctgaattctaatattttctagaatatactcatgtaaacatgatataaacaaagtgatttaaataattcataacatttccagaaaaacatttctggaagttttatatatattttatatatatacataaatgatataaataatgtacaaaacacacatatttgtatttgttttttacaaagtattgtataatgctttgttaaaaccaaaaatgcatttagtgtaagatgttcccactgttaattctatagatgcttagaaatcttaagaatatgtgtcaagttattgcaaggtattcatttgagaagtagcactccaaactaaacctgttggtctcttggaagagcttcagaaaactgaagcttgtccgagagcaaaaccttcccttaaggtttttgagaaccaacctggaaaatgatgttatgatttcactataggatttgatagattgttttatattcctttgaaattattagcagaagctgctgtgccactcaagtgcagggtttgtgccaaataattctgtgaagtctcagggcagaatgatcacttctccatttaaaaaaaaaaaaaaacagaacaagaatggtatcacagatgtattatttcctgtgtttcttttaaattatttttgtatgcttcttagaaacttcaccccacaagctttaaaaaaatgtaatcaggcatgcttctgtgttcctggaaaacgtttgtgtgtgtatacacatgcatatctgcatatgtatttcagtcttttaggaagctaatgcccaagtgttctgtatctttaaacttgaggtaacagatgatcagctggtgcagatgtcaatataattttttaaaagatagatttgccagcgtggtttagtgtgtttatttattaaatggaacaaaaaatcattttatgtcatccttcatctgatttctttatatttttctgttttaagatattcatcatgctgatcaattttttatggtttaaacaaaataagaaaaacctaatattttagcattttaaaacacatcattatggccaagcctagagccaatgcaaagttaaattatttctctgaaccttctcaaaattatttattttattttaaagactccactttagggaccacctttttaatccagggctattataatatttctcagaactaaaatttgtggtacccttaatgacaatgaattttttctttctgcccggtaaaaattcaaaattcattaattgctatttttttctcaacgtttaaaaaactaggtgctcatcaactaaatgcttgttttggctatgaattattgatttttttcctgctatttcatcacaccatgctttgagacctagttattcttttgcctaaatgtttctgttttttcctcgaataatttcctatctactctatgaacacagtttacctaactatgctgatcatggcatttccttatgtttcttaccatcatttaaatgttgactaattttttttcctacttagagaattgtttttgcaagctgttcaagtaagaattaggtctgccaacatttttagatggcctgtaaaatttacataatgatttggccatgcccacatgagaactacctacatatacagaagtgctctctttaatctgttacaagcatgacttctattaaacctataggtaagattattttctacttttaatgcagtatgtttgtttttatcctgacttttgattcattaggccatgtggtttaagtctaaactaagttactctgatattcggaatttcacctttaataattttctggaaattttcttttaaaggtgatattagaaatctccatttcagtctcagcatttcactagcattacatgatgctcttgtcttttgcaatttaatattcaaattacatagatattttttattactgcatgtgaagtccttcctcaacttataaagcagttagaacatactaatactttaatacttctataagtgacgagctggcaactgaaaaatgttcatctattatacatatataagcataagtgtgtgtatgcctaaatgtatgtatgtatacatttccatgattagtattccctaaagattaaagtgataaaataaatgttgcctggttttacattggtaactaatgttatgagatagttcataggtcaatagaatgaaattttatgttttatttaatctaaaataattctgttgattgccacctacatatgttcactgttcattttctattgtgtctagacattattttgctcttaatgtaatatcaggttaaaattattcaacttgtgcaaagattttgagaaaaatatgtaaaattagattttgatcaaggataaatgtatctttttttttctttgaagaaaagagtataggcccttcagtcagtcagtttgggttccagcccttgttctgccaagtactagctgtgtgaactcagctagtcatctaaagagcctagtaaggagagatgattattcagcaaggtaatacatgtgaaatacttagctccacacctggcaggtagtaagctcctactatgtgttgactatgttattgtatgatcatcttcattgttctttgctcttcaagtctttgttcacccattcaatctagaattacaatgcaagttatactaaaatgcttcttttcatttgctgaactgttaaaaaaaatcgcttagttttcttttaaatggtatctactactataagatattcttgtatctgcatatagccttacattttaaagtttaaatctactatctgatcttcagcttaaaggtaggtagactttataggttatcccatttaacaagaaaggacaacaggaatacaatgattattacgtcttgcctagttcacaaatcctattgctaataaaggaatcacacgggccatgtgattcctcttccagaactcttgttacccatctgtcatttgcttctcaaatatgttgcaatatttgttactcaacttactgtactcttcctcttttatttcacaagtgttacattccatgaatcagcttgtccaaaagtactgttaaaaggattttttttaactatacaaatgctaaaagaaagtttattttttttttagtatgctcaaagtggataaaggctttcaaagcatgatacaatcctcaaaaggaaatgactcaaagtttatggaataaaaatgtaaacatttctgtaagttacacatacaaacagaaaagtaaaaattgtcaaattaaaaaaaaattgtcaaatgtccaaagactattttcctactaattattaagaaagggacaaagcaatttatggaaaaaaaggtgaaaaggatattgttacaaatgttttaaaataaaaatggctaatatactttagaaaattataaaattactgggggaaggttaacacacacttaacatttgttacttctgaggaatacaattggggattgaggcctctcattgtacacttttctataattttcaatattgctttctctccatacttaatacattttctaaaataaaattgtgcgtgatagccagtgatggccatgcaattatttgttgttgtttttgttttttgagacagagtctcactctattgcccaggctggagtatagtggcacaatcttagctcactgcaaacctccgcctcccaggttcaagcgattttcctgtctcagcctcctgagtagttgggattacaggcatgcaccaccacacctggctaatttttgtatttttagtagagaggaggtttcaccatgttggtcaagctactctcgaactcctgacctcaagtgatccgcccacctcagcctcccaaagtgctgggattacaggtgtgagccaccaagcccagccacaattatttgttaaacaaaaactatgtcaggctctgtgctaaatccttcatattatcacttttaatcttgacagcaattctgtgagggagatatttctaccatgtttaagagaggtaaagtagttagcaataagtcatacacttaggaagtgatgaattccaaattcagactcggattccattcattttcctagcagatgttcttaatctgaatcaaaccattacatatccatggtatgaagaagcagcataatagtctctcatttccactcattctcactacttgtaaagcattatgatggttataatagtcttgtgtgtgtctgtttattcaacttattaccaactatgagcttattctgtactataggggttcagtggtgaattaaacagacaagcatccccctcctcaaaaacgcaacattctagcaagtgcaaaggcaggtgcaaagttcagtggtgaattaaacagacaagcatccccctctgcaaaaacccaacattctagcaggtgcaaagacagggcaaaaacaaaagtcaattggcagaatttcttcgatggtgataagtgacctgtggaaaataaagcagagaacggagaggggaggaggcttgtaggaagtgggggtgatgaaatggggagtgttgagtgcctagaaattttcaggctcctgtcaagtattgtacactactcatctcttagctcttattattactcttttatttagttttctctattctttgattatgaaaatgagagcaatgaatgttaattaacttgattatggcaatcattttacagtgtatacacatgtcaaaatgattcataccttgataaatctggaaaaagaagaacaagcagttaacttccaattacaagtcaatataactagggcccggtagcctgaggatttaaacttacatccttccaatttctaaccctatgtgatctcttgcaaaaaaaaaaaaaaaagaatttccaaagaattgtctaaactgactgaagtagattgaaaattatatcctgtcattctaataaattaatccagtgttatagtggatttacataaagcaaggtatatgctcacataaaacacatcccttcaaaatatggtgggtgcatagtctttaaaaaaatgaaaaccccaacactctttactttaaaatgggtacagcattttgctatgttattgtttaaggtctatatttttctaaaaatccacagttgcagatttgactcagctgtgtgctttcagatcttgtatgctaagctactcaggaactgttgtctatgggattgaacacttaacagctgtctctgggaatgtaaatttgattctttggactgctcatgggactctgtgacattttcctctccagtgacagcagatttgaatggcattaggctactgattaaataatacccaagtaagtttaatgtcaacttaggcatctattttgcatgtattttttctgaaataatctttctctaattgcgatcatattttcattatactttagtcttttaatatctttaaaatatgctcttttaaacaggtcttatctgaaccctttcgttggtaatctttttctgaattgtcatattagagtgtgagtgtgtgagaattaaggttgagaaataaattagcttaaatacaaaacagctatctacaaaatagatattcttaaccaaaataatatgtctttatactaccattttatatcgtgccaccaagataaaaggtcgcagttatttaagggaattaccttcttaagtttcatgaaatcactgtgagttattcttttctaactgaaagcataaattataaagagattgcacatggtcatttctactttatcctaattaagtggtctgagatttgaaaaaaaagtaatagacttacaatatttttatgacttattttttaaataaatatgtcagtaaaaacttccctggggaaaaaaaattcttgaggagaaaagagtgtttggggttttttttttcagttgtatggcactgcttgcaaatgaaaggattcgttgtgtgcctcacatgcccaaaaaggacagcacgagcattctaacttaaggactggtttaaatatgacctaatgaactaaatatatttctgtctggtattcttaggttactttacttctaaggttgtttgaatgcatttatccagctctcctatcaaatacatgccaggttaaccctgtgaaggttttcctgtatgattctgagaatttctttataagaacagggtcttgatagtgaaggttctttccccaaagtgcaaggccttctattttgattcaatatcaacataatgctttttttttttttgaaagtgacttaagtactaaagattatcctcaatagtaattctacttagacatattttggttgaagaaatttaaagagtttattttttgtaggagcactgtgctgtgatcatgaaatttttgcaaaactaacagaaaatgataaacagttaagaacttccagctagaacaataggctgtttcctttttttaagtcagtttgtcatccttgctgattgacagtctccaattgttttcagaattattagtctcacagtatttcagaattacgctgtataaaaaagtacattaaatttaaacttaataaaataagtttcgcaagctcagtcaagacagggaagtgagaatatgattattcttccaaatttactatttccaccagcggtctcagttcagcatctgagaatatgttaggggaaactcagcaagtcagttccttttgtttttctggcctctgacttacttggatgggaaatagccaaaaaaaaaaaaaatgctgaatatctcagatataggtaatgggtcttcaccagaacataaaaatagacccttattagccatatcagtaatgtgctgtgtgggggattttttttttctttcaattcctctggcaacaaaccacacactgggatctgacactgtagagtgctttctcttctctttttttgggggggggagggggtgtggttgcatatttaaactctcacgcatttatgtactgaggactgcagtgtaggactttcctgcagaataccatttgatcctattaagaattgtccaaatgttggagcatttgattgaaaaatccttcttagccattttaaaggtaagttgtatgatttttctttaaataaaaaagattaagggatttttcccatcacccagatgacgggaggtgacactactgtataaatactcctaagaagttatataggaggacaggaaaaaaggtagtaactgttttcttagtcactaggctttatctaaaaatcaggtttgcattattttcaagttatcaaccttcctatattttatgcttaaaccatacccaatggcatttcatgtcgtatgtataagttaatatttaaagtgatttataatccaatttggattattataaaactttcattttatacttaggctatttatacatgatgtttaaatgatgaagatcattatactgcagaccaatataatgaggttagatgttataaatgacttacagctcttatgtcaacatgttgtctaatatgcaattattaactattactttacagagtcattagcttgtttaattttcaatctgaattgcacaacttttggtatacctgacttgctctacatgatcaaatgcaatgtgtattttggatatgtgctttttaagttcttttctgtaatgaacaaagatattgtcattgttactgggaatagcaaagtatattacttttaaataatctgaaatttaattagtgtaaattagtagaataaaaataaagttaattttttttcgattcaggaagcttattacaaatagtactgaattattagatgatgatgccaagttgaagtaaaggagaaatcaatttggaggaattaagtaaaagcctcaaattaattatacattaactaaaattataaataactgtaaatggcataaattctctagagtacatcccagtttctgaaatcatcaagtagcatattgaaacctgttttgtaaagatttgcatgtactttttagtctttttctgtgtggtttgaagtcagtaatgtgtgttgaagctaaaaaatattgctttaaatattggttcacaaggaagccaaaatgaaatatttaaaaatgtttgttatatagaaagtccagtggtcctttggaatttacaagaaaataagaactaaagtagaaatcatttaatttcccagactcattagtgaaccagaacaataaaccaaacagagaaccatcagataatgggttagcctgggaagaatattaattacaactggaggtacttgcacagagtgtactgaatttggaatttaccttggaagttatagttgccaccctatttttttaaggaatttttttaaccttgtttactttaacacatttgaaccctgcatgtgtgtgtatttcctgtgtgtttcctgaaaaggaaagtttaagataattctgtaactatcagatacttaattctgtaagtatccttgcatctaatcagaagatgtttttgttcactggcccaagatgtgtctgaaacttgcaagtagcattgttctaaactagtagctgtctttccatttgcatattttaattccatacatatatgatcacatttcattataatctaactattttgcaaatactcatttctacttttgtaaaatatacacatttattagatttttaaaacacttggccaatatgaaataacactttactgttatggtttgaaatgatacttcatagtaatatttcaaaataacaataacattttctacaatataaatatatattattttacttcatttaatacttgcaaccttatttgatgtaagtaaactcattttagagaaaactgtatcacagacaaacttcaatactaacacccagaactgaatctacatttcttggcttcaaggtccagcatttttggcattacaaactttatagtgtctgtttatagtagaatttggggtgtggaaaaaagacattagcattcttgtctaaggttcaaaaattaagaatgggtctagataatactctttaagtcagtatgaacttaagggaataatttcaaacctacagtaatccctggttcataagtctttaaaagacgggacttgtttctagaaggatcccaagtataatatataaagtccaatgtatttattgcattagtttttaaagactaccatcaaaacaagttacaaattgcaatatttgagaagtatgtaattattttatattacagatgtctatcaagttttttcctattttacatttttaccatcatatattctgataggatagaaatggacatgagataatttcagtaagataagattctggagatctcatagtccagttatttgaaaattacttgtggagcccatgggttctttggagatgactcagagcccaagtgaagcgtgactgggaaagggaagaggcacagtttctgctcctttcttttaccaaataactcttctttgaactatcttttatattggtattgtgcataaaatttaccttgaaaggagaattctatctctaaacatgattttataaagaatgacctaatgaccttatgttgatgaaacataatcatagttaaatgattgttttacacccatttctactaccttgaatttgaatctacatttttactcatgtatagggaactgtgtctttataaacatacatagttatgataatgtgaaaaaagtaattttaaaaactaacttctatactcatgcaaaccgttgaatgaattcccccaagtcctccaaaaactagattttatggacagatgctgtattttttaggtaaggaaaactctctgtatcaagagaatggaaaacaagagtgtggtctggttttctatcctaagaaaaagtgggaggaaggcttatagatagaaaaaaaagaaattttagcaatctactgatcagtaagaaaatgtcatttaggtctggcaagtgtctatggtacaagtaccctggaaatctaaaacttttcaaatttcatagtttacatcccagcagatgttacttcagggccatgccttttctgggtggagtttccaagggaacacagctttataaacacaagggattaattatagatgctctggggacttgctctaatgttctaaactgtttactgaagaggcttcttatatctcagtctaatgcaggctttgcaaaaagcttagtctctgtttctactgggttcccaatatagtgggagggtattttgcttaaaagttcattacagaaacactgttgacctgataaccaaaaaaaaaaaaaagttatatttttcctccctctttcaaagatgacccaacggaatagggtccactcatgaattctacaaaaggaataggatttataatctataaactggacagaaggcaactgagctgcctatagaatcaagaaaggcatgtaattagttgcctattaaaacacgtcttcttattttccctttcttctttatacaagtctcaattagttttctgtatcttggctttctaaatttaagtattttaagcaggaagtaaattattaccgatacagtatcaatatcttgtctgtttcttataaaggacaagtaacaattagtaaagaataaaatttaatctacaattagcaaatgaaattaattacctattttcatatataaggagttgtgttattaagaaaactgagtaagcataacccaaatttttttatgctttagacagctaaatttggtggaatggtggagacaaactacattctttctctgaagataaatataggtggaaaagctgtgtgactacatgtgctatttaacatgaacttttctcttttgtatttggtgcacgtcttacgtagtatgggtggttctcctttgcctcaggtgaataaaactaattataattttgtcatatgcagcttaaggatagagtatgattataataacaatacttcattactcatggtgtcaaggcaccgagtgataataaatgaacccaactagtgtcacgtattttgcctattcttaggaaaaaggtagaaacttaaagtaataagaggcaatcaatcagttgaaaatttgaacaaatagacaagttcagtttgtctagctcttttttcaaaatatcagcacatggattgaagttttgttagattaatacttgtaattttgcttgtatatcatcctgaccaatgttagattgagaactgtctaaccatagaattcaacagaataaattacttgatacttctgttttctaatgtatgtgactctacagcagtgggatgtgtacactatctcacttcagttttaagttcaaagcagacagagctaggcagtacccaggcctgtccattgctcaacatatctaggctcagagtccatagaagttatactaatcagttttcaggtctagagagggagccattggagcgcatgcactactccctggtttcttcagtggttactgttggaactctttaccccttgcagaaactcttctctgtagtgcatggagctacttgattgaataaagaagaatgatttgggaaaaggccagatagattcacaactaggttgtggcatagaatctggagaagggctaatatatgcacatatacctattctaacagcaatagagttataattttaaatcattttgtatcacatttgtcagagttgcaaatgacattaatattgaatgagtaatttttagtgaagtttatgtggaacataaaataacttttccagagagataacttaatccttgagttatacatgttttaaatagattttcatactatattaacaaaactggaatgtgacactgggggtttcctgctgcattttttatgtgggctcataaagctgtgggtttctacagaggttctcctagagcttcctaacagtgaggataaagagtgtcaggcaggaacaggaagacaaagttaagaaacagagtctctgggtttcttaactgctgtggaatcagtcattttacctaatgcacttccacgtaagaattgaaaaaccagttcagccgcttaaattaaaaaatgctgatctcattttatcatctcattttacgcatgaggaaattgaggtgtagagagattatgtggcttgtctgctttcatttagcaagacagtgacaaatcagtctttggtttaatcttgtcccttcatctcaattgaaccagctgggatcgctatattttaattgcttcgttaagtataacttgcagaaaatatttggggatggtctatgaaatgggcattcaataaaatattatgtacctaataaactaccctaaatctcattatcagttcacaacatacagaacaccagcatgacattctctagttggcgattactgtggttgcttaaaagatggtttcaagaaaagtttcaagtgctttacaattatgcattgcaaaggaaattctatttgacaatatccagtcctgattaccagcattaaattactcattccattgcattaggacagccatggacaaagccatatgaggtagcatggtatacgatttccaagggcagggaaagctattgttaccactccaccctgaacaattaataaaaagccagccctacttgctcagtgagacagaaaattccacaggaaaaacaaatcacttgtttagacttatgtgcattccctttacattggagaaaaatgacactaaagaactagtcagtcttcttaatcaccaagaccttgatgtaaatgaagtttattgcatcctatggtttatactggaaagtatcctatgtataagggaataggcaaaggggaatcccaaaggttaagggaacatatgtaaataataaaattgccaagaaaaatatttgtaacatttattcctacattttgggggaaaatatcattttcttattcttttcttagctctacaggtaatatttttgaaaaactatatgattactaaagtggaagtaaatactaataaaatcataagagtggtacctctgttgcaagacagctgtggagggaaaacctgaaattataacaaaccacaattattaatacacttacaacattaacaacaatattctatgtgcccttttttgactgtagccttcattccgttggcacatatgttttctttggccatgagcatttcaaagtagagaataattgtttataaactataaagcgcattctgactataaatgacacgccaaccccattattgacaaaatgtcattgcaacaacaaagaagttcaaataaatgtgttttcaaatactagttagaattaactctgattattacagtaggatccactcatttcacaaactgtattctttcttccaatctttttttttttttttgagatggagtttcactcttgttgcccaggctggagtgcaatggcatgatctcggctcaccgcaacctccgcctcctgggttcaagcgattctcctgcctcagcctccggagtagctgggattacaagcatgtgccaccaagcccggctaactttgtatgtttagtagagatggggtttctctgtgttggtcgggctggtctcaaactcccaacctcaggtgatccacccgcctcagccttccaaagtgctaggatgacaggtgtgagccaccacgcccggctctcccaatctttatataataatcacatactatggctgggcatggtggctcacgcctgtcatcccagcactttgggaggctgaggtgggtggatcacgaggtcaggagttcgagaccagcctgaccaacatggtgaaaccccatctctactgaaaatacaaaaattaaccaggcatggtggcgtgcacctgtaatcccagctacacaggaggctgagtcaggagaattgcttgaacccaggaggcagaggttgcagtgagccgagatcgtgccactgcactccagcctgggtgacagagaaagactccgtctcaaaaaataataataatcacatactttatgaagacaccaaacattagattgacaaatatatactaacacaaactacctaattttaacagaattagcatgaatcaactgcaaatgacaaactatattgtagttgaatgtgtagggaaaaaattcttcagtaagagagcaatgccatggttgaaacaagacatcctctacattttatatttgcttcaaattctttatacctgtagtctatccaaagtcatcaataaaactgaaagtaagatactcttattttaaaaattccatgttttaaacagtttttaggacaagccattcaggcctgaactcagtattcatgaaaattagactttcttttaacagttattttaagtatggtgatattagagagtgtcccagtataaaatttctgagaatttttttctatttacccatgcttttcttattttcacagatagctttccaatgattagacgaattgattctttctgtgactcatcagttcatttcctgtaaaattcatgtcttgctgttgatttgtgaataaggtatcgtaaataaaacatctgttaccatacttgcttatcatttaatggaaaacacatcagtcaacccacattctgttcgcaggagagctccagaaggggtgtggaaggttgtgttgggtggagaaaccagatagtgaggatgcaactaagttgctgagacaagggaagagagatgagggtgagagttctccttagataagatttcaatatgttaatcatgtgtagaaagaaaattaaaaaggaggaatatgaagaaattcagatatgacattattagttctgccactggtaggcattagaagcaagaaaagggagacggaccgaggaagccactttggtgaaacaaaaagaaaagcatttgtttatttagaacgggcaaaatgatacgtttcagtgggtgttttctttgtactttgatctttttgtactgatatttaagcttctgttttatgatctctttctaatgatagaaccagagcttgtagaaaccactttaatcatatccaggagtttgcaagaaacaggtgcttaacactaattcacctcctgaacaagaaaaatgggctgtgaccggaactgtgggctcatcgctggggctgtcattggtgctgtcctggctgtgtttggaggtattctaatgccagttggagacctgcttatccagaagacaattaaaaaggtacaagtagtccaaagaatatgccttctcattttgattgattctaacttctctttttttgctttgtatttacctgctttatatttcatggtaactgctaattttgtatctttgacataaaggtaattatgaaccactgcaactctatatgatgcgactttatgtgaaatgttataagtataatgtatatttaacatgactccattgctgtcttaaatataaataccaaattctattaaaagctgtctacaggtatgcatgttagtagaaataattgttttaagttatgtccaaagagcatgttggcatgcttttgagtaggaaataagtgagtatattttgtaaaagcacatttataaaagaagttgcactttagttaatactgagaaaagtaaaactgtgtgtgtgtgtgtgtgtgtgtgtaatgtgtttaatattgaaacataaatccttattaaattgtaggtaaacttgtttggtaatacactgtttagtaatccactatttttatatatgtgtaataatctcatctcataaatattttctatttgtgaagcttcatattggaatcttagaaaatactttcagaaatatgcagaacatgtcttagtataaaacaaattgactgtagtgtgaaaaaacagaatgattgaatagatgggctttgcacaacaacctagaattcatctcccaccctagcttattcgaattagctacacactcactcatcagaaacgttgattgatagggggaagaagagaataaagggaagcagttctgctgaagttctaaatcagggatggcaaattcaaatggctgcaggagtttggatacaggggttaaacaaaatttaaggtgccaagaacaagataaaatgaagaacaggaactgctgtgaactagactgtgtgtttactgcctgaaggcataaatgttcattttattaaacataatactggccaaataaaacgagttctgccttcaactctctacctggttaggatggcaatgacctagacaaagggttagtaagcatagtgcacgatggagaacaggaggaattgaatttttattaaatttttattgctatattgttagtatttttaatatttttgatccacagttggttgaatctgcagatgtggaacccatgaatacagagggctgactgtattgtgtttattgctaacatattgcagaacttcagcctcatgcatttaactgaaaaaacatatgtaaattagtatcccctgccttggaattcttagttttcttgatagtatttttaatacaggccaatggaaacagacaggtaatagtgaggtgtggggcttatctaatagtgggatggagtggccattgatctgacatccttcctactcataaactatgttctcacccagatcttatgcagagaaagtacaagatcagtgtctgtgttaacgtacagactacaacatcatttggaaaagttttccaaattcaaaaatcacaataatcttccaatgcacagcgatttagactacttttttttgctgacacataattattggtcaataactgagtattgatgatttaatttttttctttgtcatgcaacaaaactggtacatgtagattcttttgaatagcatgtgaggtgctagcatttattttaattctttaatatttatctttatgcttataatagttaaccatgagaaagtaagttttctgacatcaaaatgtgcttttgtataatgactaagagaataatataatctcatctattgtaagctataaccaggggaagatatattataataaaaaataccgagacctatgagactctagaattgaattggaaaagtaaatgctgtaatactttgaaagagaaatctctcagagtattcaagaaacttcaggaaaaaggtaggacttgattcagattttaaagaagtgtagaattttgaaagtctcaaataactgcagtaaccatattaaaggactgattgatagtatgaaaaaccctgtgaaaatgctaccaaatgcagtgaagatggaaggaagaaggtagagaatgtgcccataatactggattaacagcagaaaagattagaagttaacatggggttagagttaggaagcaagcttagaacatcaggcagaaaaatacttaattgatgatacaatacacaatagtcgtcggtatgtttttcagcaagtgtaagatatgataaaacctgaatttagagattagatggctaacatttaattcttactaagagtttcctatatactagttcacttaatcttcaaaaatatctgtgagaagttgctgttattttactcatcttacaggcgcaagtccttaaatcaacttgccaactcacctagccaatagggaaagaagtcattctccaaatgtaagcaatctgtaggaagagcctagatgaaaaacctggccttgtatactactctacagcagaaaggttgcaaagtgaggataccagagataggaaaacaaacaaacaaaaaactgtaggatatgaccactttcaaggagaatataagattcccttttagaaagatatttgcataatctgcacattatataacaaaaggcacactggtctggcatggttgagtatatagaaaaaaaaaactgatagataataggatgaaatggaagcttggagagacagattaaattagaggagtaaaagcatcaaactcaagatgtccagtgagttattgatagaaggtatgtatataccttacaaagtaaaacagaggttttataagtgatgttttatgaacatcagtctgtgtttcaaaggtcagagttcaaatagatttgatcattgctataaagattaaaaataaaactaaacagtagatttacttttagagagttttaatggagagaggaaaaagcagaagaattattacagaatttgtaataattcagaggcaggaagacaaaagtagaaaaggaaaagaatgatcttatatgaagaaacaaacaaagagtacaatcctagaagttaataggaggccagaactcaaggaaagaaagcataaaatgttctcaggcagatgaaaattaagaaaataatgattagaacatggtcaccaataattttgaaagtatactttgagtagggtaataaagaagggggaattaaatcaatggagtgcttttccttcttgtttttgaaataagaattatccgtgcaatcttttacaaggaaaagagaagattcagacttcctagtgtagattcaaactcaaggaggtggtacaacagagactcataaaaactgtcaaatgacagtgcacattgtaagccccctacatgtccatagactaagactcatcatcagaatccttatattggtcaagatgtatggtacatttaaggctaagcttctttttgctctcagattcctacacaaccatgttgaccttgttaatttagtcatatgaagtaggtggaatattgtttgaatagactgtttcttttttcttcagtttacagactattttttaaatgatattggcgtatgtatatctttggcatagagtaggagtcaaatatttgaattttgtgtaaacctagagagccaagtgtcttactgctgcctcagaaatacttagagtaatgctatttcacaaacatatgggttttggtactgttgacttcttatttgtgtaccattaaaactcatttaatattactttgtttagctgactaatagcaaattaagaaagctattgtatacaagtgatatttggaaaaaaataattaaacttcttaattgagaatgatgagaaaatcatttcatatttagtgtagagttgcagtgctgtgataccttccaattctgaaagatgtcattaccatttgaagtagtctaaaacagtttagcaagcttatttgtactttatttttgctctttattttcaagggatgtctctggtatcctcatgctttttatggattatagctgcaatctttcttaccagtatttttgaccgtgattcttaatagagttgtgtgcagccagcaagtttatgcagtctttcaaaaaaaaaaaaaaaactaaaaatcaatagcaagagctgccatgaaagtagaaactaccaaagcactgtggaaaagggtcaaaattctaccaccatttacaaaagataatttatcacttgacattattaatgtcagttgataaaaagtttagtgaatattgtataacataacataggtagttgtatgctaagcagattaatgcaggaacagaaaaccagataccacatgttctcacttgtaagtaggagctaaatattgaatacacgtggatataaagaagggaacaatagacacctggggctaatcgagggtgggaagggggaggagagcggaggatcaaaaaactacctatcaggtactatgcttattacctgcgtgaagaaataatccgtacaccaaacctccatgacacacaatttacctatataacaaacttgcacatgtacctctgaccctaaaataaaagttggaagaaaaaaataaaatttaaataagttctatagttctaactatagaacaccaaaaaaggaattataggtttctttgttcctgttagagaactaatattaaatatcatcattcaattataccatttttccttctcccattcttgaaaacaatgatccttctgtagcttgtaagaaatgccttcagacaaaataaattgaaatcatgattcattaaaatggttatacatggctgggcatggtggctcatgcctataatcctagtacttcgggaggctgagacgggtggatcacttgagctcaggagtttgagaccagcctgggcaacatggcaaaaccccatctctacgaataatacaaaaaaattagctggatatggttacacatgcctgtagtcctagcttttgtggggctgaagtgggaggatcccttgagcccaggaggttgaggctgcagtgagctaaggtcgcgcctctgtacttcagcctgggtgacaaagtgagaccctgtctccccccgcaaaaaattatgtttgaattaatagtccatattttaaacatataatttgtttatattacctttataatgtatgcttctagtatttccagatataataaaataatttgtactttttcatagtatctaaaagctcaaaaataaatgactaaaaatattaaagatggtaaagtttgttttatatttaataacgtaagaacaacccaaaatatttaaattaaaatagcagtataaaaacgaattaaacactatgtatatgtgcatatagctgtaataacaaatgtcacttaaagacaatgtttcaagaaatagacaagcatatatgtttcttctactagtccaatttaatatcaacatagtttacttttcatgccaaacacaacatagtttacttttcataccattttaggtacttacataaattcttggaggctaatttctaggtttcagaaacatattaaagcttactactccaatacatttcacctaattttattctgggttttagttgatgatgatgttctgaaactaaagccattttcagattctctgcataactgtcactacaattctaattcattctcaacttacacacacttgcataatgcaaaaacattagaatttcttttaacatggggaaatgattcgttttaggcccaattacaagcaaatggtagcagctagtgggaaggatggaagtatgcttctggtttttaagaaagtttttactttactagaaagagaaatattaaaatgattaaataacagaaaaataattgtcacaggatattatataagttattggcacatgactggcttagacagtaaatgctatgaaccaagcaattaaagcagaatggagaagtaaatggtattagagttcttcctctaaaggatggatagaatttgtaaaatactaatagctgacatttattgaatgtctggtttgtactaacactgttctaagtgttcacgtttattgatccccataacaacctatgaggataaatatttaagccacatgaaaatgccaaaattcaactttttttgattttcaaaaatactaagtctatatggttcaatctaacattactgttataatttcacagataaggaaagtgaggtacaaagaaattaaataatctgctcaaacttcaatgatgatgattattattaagtgatcaaactcatagcatctaatttcattgttggccacttcagtctatgctttagggaagaagccactataccttgttagggtggggatagggtaaaaaaatctaactcgtagattaaaatctgctaaacatacttctgtctcttggtagaaatgtgtaaagtccttgaaaagtgaaacaaaatattttctacatttgtactctactccatgcgtagcaaagtatgaagggcattttaataatgaaagttgtcagttatgtagatgattattgctgttgcatgaaaacagtattcaagtgagtgcatgactacatataggatattaaggtcccaacaagcatctgttttcaaattaatgtagcagaatagaagtttcaaggtcagtgctttcaacccagctatagaacatgctatgtgagagtcaccaggttgaaatccagttgttgttggggcttggtagtctgcatgcttagagtcagggacaaatacacacatacacattagccaagtgagaaaatcttatatcactttttctgtgtacatacttaccagctttgtacttcaaatttagtaaaatatttgcaaaatagtctagacagtccaaattcaatttaaaatcaagttcttttaaattcacaaaggacataacatcttttgtttcttgtgacatatttagtcttggtattcaaggagtgactacaatttaatacatatagtagtggtagcgtcagaagcatattattactacttcgactacttcaatatttttctctatgtctctaaacaaatcatgatgctatggaaactatataaaattgaagtgaaaggacctgatttttctattatctgctagtaaatttgtcacataacattgagtcagacatctcttttctctagaacccattttccacctctaaaaaaatggacggggttagatagtcctgattctaacagttgataattcaacacattcatttcaaccctgtgtttcacgtttgccttatttgtcgctagagatattttttaagggaaaagtgatttgtggcctttagaaaaaaaggtctcatacacgtacaatgtcttttggtgtttagatggacactcattgtagagttaggaaggcattcaatcctgtcaagcacattctgtcacagactctcttcaattctataagagtttgttgagtttctttcattaagagatattaggtcggtacaaaagtaattgtgatttttgtcattaaaatcgcaaaaaccgtaattacttgtgtacaaacctaatatgtaccttgagaggcacttgatgaataacaggtattgtttttgagcattaagattctaatagtgtgaggagaataatgtttgtgtttgtgtgttctcccttgttaagtctcttgaaatggagaaatcaaccgttttcagcttctatttagctttgagcttcaacatcctcaccaaacatatttacatttagaagaatatccataatgctttaagcaattttgtcttaatattagacttagtatggaaataagcctttttgggagcaaataaaaagtttttcaaggacaatttgttgtaaaaagtaataaagattccatcactctagcaggtccaatgtaccccgtataagtggattacagcagcgtaggattttgaaattccattttaacttggtgcccagttcttctctaaggaattcgcttattccctacattaagcaataagtaaaatatcatgaagatatgaaacttaatttgacttctaccaactaagtgcagagggtgacggaaaaaaaaaaaaaaaagacagtcatagcatggtgtaaaggaggactagtctaagggtcatggatgaggatttttgtcatgaattcactactgtttgcctaggctgtccttgggccagccacctggtttctcagagcctcagtgtgatccactggaaaatgtgatcatgttcaatgtcctttcctaatctgtcattctgtgaagtggtgcttccaggtcaaggaaacaaataggtcagaatgttcctgtggtcattgttctctttaggctcattttccatgaaatagttgtattcctcttcctgtagcacactcaggttaagttggagctctttaacctgggcattcttcccaatacttcattagaaataccgcctgcttcaaaatcacctttgtttgcactatctactacagcgtaatagacttctggctcagagagtgaaagctgtggaagaaaactagaagaatatttatgttaactcccttattttacagctaatgaagttgaccctagggaggtttgatgactctccacccagtcccaaagctcctaaagcaaggaatcgagttcctaatgtaggatttttaattctcttattggtgtattttccacttgtctatctttaccaaaggagcatcagtgatttttagtggatttcacaaaggagtaataggacagcttccttgtcctgtttttttctttaaaaactacaacccaataatgatgagtgaggctgttgtaatttttggaaacatgataatgggttgttgcaaatatattgaaagttaggggctgtgtgcagtggctcacacctgtaattccagccttttgggagtccaggtcaggtggattgcttcagctcaggagttcaaggtcagcctgaccaatatggtgaaatcctgtttctactaaaactacaaaaactaggtgggcatggtggcacaggtgagaggatcacttgagcctgggaggtcaaggctgcaaggagccaagattgtaccactgtactccagcctgggtgacagagcaatatcttgtctcaaaaaaaaaaaaaagaaaagaaaaagaaaaaggttagggaagccagattgagcaggattttgaagacacggtgtcaaatttgtgttcttcatgtagatatttttattttcttaatgtagtgagtgttaagtaccatcctctgaagtgtccaactcttgaaggaaaagaaaaagcttccaataccattagatttttcactcagtttttgtgttttgtttcatcagtccaacttaggggcagagaagaagttcaactcagtaagaacttttttgaacttcggtaaaatttgcttaataaattatgttgactgttgcaatattttcaaagcgtcactctaaagcttgccgaagggtcactttaaagtttgccttaaaatcaacagtcgtgtcttcagtattacacactgattctctttgtaaaaggctaaaaagactgctgtaataataatttgttgaaaacatttctgctgcaagtgtatggtaaggttgcaaaggttctcatgaatgaggtacttgggcttggtccttttattctggctgactcaaggctgcaaacaatcttccagaagtgcctgtacttactacaaagacataacccaaacttattttctttttcatagcaagttgtcctcgaagaaggtacaattgcttttaaaaattgggttaaaacaggcacagaagtttacagacagttttggatctttgatgtgcaaaatccacaggaagtgatgatgaacagcagcaacattcaagttaagcaaagaggtccttatacgtacaggtgagtgagtccccacaaatatgagacactcttaccttgaccatgtatttctgagaagtcttctacttggcaaatgtcattgtattgaaatgtacttattattttcttgccaaaaatatactttaaaatatttttcctgtctgtatagaatcctaatctaagaatttaatgattataaggtatttattttgaaaaaagtggaagatatatacattatccaaatatttattagacaatatatagaaaagataaacagattttattataaacttaccagtatcaaataacttccctatgtttatgaagttagtgttttgttattgtggcatatattctcaacaactctgaaatattcctgctgaggaaaaaaaaatcagttttcacatcttaaaatttaaagcatattttaacagtggttctcaaagtgtagctgggccacagcaaagtgctgggccagctgcatcagcattaacagggaattgggaaacatgcaaatccctccaccccatcccagaccaaatgaatgaaagagttgaggcccactaaagagttttacaaatcctgggtgatttgaatacacaattttgagaaccaccgtgctaaattcatttttcctaactgcggtacctactcaagatttatattcaaattaacttctgggtcatatagatgtttacattgatctattttagtttcactcttatatttcctctagtgttgagacaatattttatatctttcctctgccttccctgatagtttaacacacttttgaacagaatcttagagtattagaactagaggaaatgatcagccagaatctgtcattttgtgagttaaaaatgcctgatccagtggatgtgaggtcacttgtccatgttcacacagatgtaggtactggtagctcctagatttttgtataccttttcttccatttcaattatagacactctgtctttttcactaaaaagggaaaaaagggggagattgaggtgccaaaaacactaccttaaccaaggattaggaatatatttatggtatccatatggaaacatagttatgttctgctatagaatttgttacctaaatgtgtattttccctcatggataatcacaactagttatacaccatgattagttctcatcacaaagttttgtatttctaatgattttttataatttgtagttttagcatcttatctgttttggttatcggatgattgtataattttccttcttccccaaagcattactatgcttccagattgaaaattcacacccaaaataaaatgaaataacaggcatggtgagggtggtgcctactaccatagcacatgacatataagccccagagggccttggtgcatgtcctgtcttagcagttttacccgaatcgggtgtctctgtgcgcatctgtgacaattcataattttgtcaatgaagacttagtttttatgggtacaaaaacatcttaccttagaattttcttcatggtcttaaagtttttatattattagcaagagtctatacaagtatcttgttgcaaagaatgttgttaggtgtaccatatatatatacacacatatatatatatgtattcataggtgtatatatacttatgaaaatctagaattcacatatgacctaaggagagtatcagcataattgtttaagaaatagaacctaagtgaactgagtaagtgtgaggaaagaaaatagttgttagaatttgagaactcatcatgattttttttgtttgtttgggggaagttatatttttcacttctgtttttaattttgtttattttttgaggcaaggtcttgttctgtcacccactctagagtgcagtggcacgatcacagttcactgcatcctcaacctcctaggctcaagtgatcctcccacctcagcctcctgagtagctgggaccacaggcgcatgccactatacccagctaatttttatgggttttgttttgtagacaaggtttcgccatgttgctcatgctggcctcaaactcctgggctcaagcaatctatgtgccttggcctcgcaaagtgttgggattacaggtgtgacccaccatgcccgaccatatttttcacttttaaatatattatttgggatatgagaaaacatattattgaaatagttctcctctggtagttgacagctgatctatattttattcttaaagcctttaacctatctctctaagggacaaaaaggggatgtgttagatatatttggtttgcttagagaggcaatggagcaaagactggagaagaacagttgcatttacagctaaattttagaatccataaatagctctttctgtaacaattttaaagggattcctgattatctgtaggtcatcttgtctcagcatgtcaccaaaatagtcttttattgtttgcctgagtgccttaaataatggaaaaacaaccagtaccttttagaaaaaaaattaacactttgatagtgcatgtgttgagctaaacatgctttttcataactaattataccctaaatccatctgacattggaagtatgtgagaatgtccctcctcaaacagaaccacaggctgtatttggccattgtctgctaaagtaagcttgattacactttgacaagatatgacctgaatcaaagcacgaaattgcttgggttgagatcttatgtgtgtttctacctacaccatctctatgaagatgctgtaattccttcagaatattcttagatctgtaattcattttttgagttactttgctttggaaagaatataaaaagtaatcttgagaaaagcataaattccttcccttgaccttataaacaaacacgttccaaaacttccatacagtctaacttttaaacaaaaaattcagtaattatgttccctttttaaaacaacattctaaaggcagggctgttttaaggatttttcttctagtgactgccatctactggtataatgttgtcagtacactttaggtaacgtgacaattatgttgctattgttttaatatatgggcatatttctgaaaattgaagtactttgatttgaaatattagtaatatgcacactaatttaaaatacaattgtcctgagtgctgtttcagatttttatattctttgtgtgtctgcagtacttcaagaatagtagttttaataaaattatattaaaaatatatttctagccaactttgaatcctctttttaaagaatctgagacatttgtttagtaaatacatttactgagaactcattatataccaggcatgatgcttagagatacaaaacactcataaacccctaccctgtaggaatttacatttttattataatggaataaaatgggtttttaaaaaattcagtccaattgcttaagtctttaccttggctatctactcacttcacaggcattcaaatatgacagtgcaattatgatatatatcttatttcttctcagtgaatatcttccacttgtgaaatgtatttttcctgtaataatcacccttcaccgcgttcctaaaatgtagttggtactttgcagcctagatatgttagagtcaggagattagaactagcaaaagtattcaatatacttgaggggctggggaagttagtctataacccttaaaaatggaaattatattcttatctctaattctcattaaagaagtcctgaaaaagggaaaaagcagtgctggataggccttgtattttgatcattctttctaatataagaaaatgtgctctaaatattcccctgctgaagcccctgtactttttcctccttatcctcaggataaagtctcgtttgagtattagatgcaactcttttatgtttgagatcttacttgtttcaataactttatttccactactctcctcacctcttactctgtaatccaaccacactcaaatatctgcatttcccaaaacatattatgttcgttcttatgcatgctaccatctgccgtactttacctaactaaacttgtatttgttacatagaccatttatgtagacttgtactaaaaagtgttttaaccctcacccctaccctgaccattctaaatctggatctggatctgttttgtgttttcccatggagtctccattataacaatattccttctctctcactattttaatttccagtttgccagtttaagaccccttctcgttagtttgctagagaccctggctgatttctcattttaacaccattgcttacatactatctatctggcatattctgtgtgttcaaaaatcatttgttgaatgaatgacatttgagatctaatgttcacatatgacaaatgttttgaattttgtttactgctatttctttagagttcgttttctagccaaggaaaatgtaacccaggacgctgaggacaacacagtctctttcctgcagcccaatggtgccatcttcgaaccttcactatcagttggaacagaggctgacaacttcacagttctcaatctggctgtggcagtgagtagacaaacaacaaagttatctattttaaaatactctagaactcatgtaattaatcctatcattagaattattaggttttacttgtttttccatttttatcaaaacgtattcctatatcattattttgaatggaggcatggtcatttggaaagtgacaaaatcataagaatcgactgcattagaagaccactttatttttttcattattttttgtcgaaacattctctatatttaatttcaattttataacagattacaggaagatgcttaagaaacaagtacaacatttgtttcagtatgtctttaaatgaaagacttttaagtatgtaagcaactatataataaaaggtttccaaacgcagcctgtaagaaatcaggcaaattttactataagcaataaaccattccgagctttccagacagtgtaccagtagctgtaccagtgggcaataacctttaaccaaacaaaaacaaacaaacaaacaaacaaaagcactttgcaatttgttgctgcaaaatggggagaaaaaaagagtatataaacttgatggaatcacaactgtcaatataatttaagggaaaataaagtcgataaggttgatggtgtctattgtttggaaagtcgaattcggctatttgcttggggctctagagaccacaccactgaataaacaaaactctgcagagtctagctatccgccaacagggggtgccgtccaaattcatggcaaataaagggcatttggtgctcaccattcacaacaggcgggcatttatgtggatgaagtacaatttcttcagcaagctcagcaaaaactcttaaggggcaaatatgaactctgcattttaagaaaaatagaaaacggaaacacaaaatcctaaaaagtatatgaaggctctgcattagcacactggcatcaaaccacacatccacagcacatcctaattctatgggaaacaatccttgcttatcggaggtgcatatctaaattcaatagcttaccaatatattcttgggagtaggccaaaaggaaacagaaaacccacattaaaaaaagaagtttcttttcctaaacattttcctgaagctgaaattgaagtggagaggaagtcagttgtcctcgtcgaaatcgtagtcctcctcatcctccccaacctgggacaccggggtcttcaccctggagatgctgtactgagacctgttggagcttgtggccagcatttcatccgcaccattggtcaggtcactggcagagagcctcgtgccgttagacgtggaacctgccgttgtgatgaacacgcctgcaacaattgtctgcgccatttctgtcacgtgtggctccagcgcctttgggaccagacttatggctttttttttttttaagttctgggatacatgtgctgaatgtgcaggattgttacataggtatacatgtgccatggtgctttgctgcacctatcaaaccatcatctaggttttaagccccgtatgccttaatgcattagatatttgagaagaccactttaagtgtatcgttaaataaatagagcttaacttggaatgtcgtcttcttgtggctggcactgaggcaaagaaatgtaatcatctaggaattagacgaattgcattttgagttttggcaggatctggcagtaattttaaagataagctttaaaaagttttgtattaagctcaatattagcatttaatccatttatttgttaaaatctaatattgtattcttgtcttaaacagtgactttgtttttgtaggctgcatcccatatctatcaaaatcaatttgttcaaatgatcctcaattcacttattaacaagtcaaaatcttctatgttccaagtcagaactttgagagaactgttatggggctatagggatccatttttgagtttggttccgtaccctgttactaccacagttggtctgttttatcctgtaagtaccaaatatgaatggcaatattattacattttaatttaattaattcaatggcattggcaaggcataattttataatttagctcattagtcttattgctgatctggagacatatatcctaactttttaaaaagtccacttctcattatagcttcagctttcctagttgggaaattcatctgaatttaacaattaaatttaaacctgaagaatagatttaataaggtttctactcatttataaatacacaattttttttaaattagccggtaagctagtctgtaaatctttgagcactgtttttggcttttatttccctattcacataatcaagtttaataccatatttttatttgttttaaatatactcctcattcctccttttctagacctcttacaattttaatttatatttaaaagttagcctaatgttcacatctcaatactgataaggtaatagacttcattttaatgggatttgtaaataagaatttttagtagtccataatgtcatgaaatggcagcttgaagattaaggaaaatgtgaacttgatggtgtacttgattaccgcttaatgttttgaattacaaataggataagctaactactgaattggaagttggactatgacttcatttggcactatatgtgaatattatgttctctagttcattgttttacttttagatactgttaggattacaaggttatatatcaattataaatgaatgtagaaagccataatgaatcaaattcattctgattttaactcaatactcatagctctttctttggctaatgctttaacttttggatgtctaatttttatcattttagtaaccacttattatcattttagtaaccacttattaatgactgtaacatttagaatacccctagaaatcattgttcttataggtttgttcaatgtccctcacctcaacatagtaagaatagtgatcaaaatgccctcattggcttaattatgacagagtgctagagttcacatcatgtcagcttctgatatgtatcttctttgtcacagcatctagcacttatttctaggcacctttcacaatttttaaggccaataatttaaaaaaatgtattgcagatgtatttcaagtcatttgagtaaccagtgattgagaaatgtgaaagtgagttatgtattgtacaactttgaaaaaatgacttgtagaagtaacattttcccatacatatatttcagtacaacaatactgcagatggagtttataaagttttcaatggaaaagataacataagtaaagttgccataatcgacacatataaaggtaaaaggtaagtattctggtaaaatgtgcatgtatgttactagggtactcttaagcaggaatagtattcatttaacatctcataagacataggcatcaacctatagaacagacctggttataattcagctctggaaactcctgttctgctaggtattaactctttagttgtggtaactggtgagttcacaccagtgcatagctgctgactatcagctccactttaaggtttggttcacctttctgcacaggttatggttgtgttacataaatccccaaagggactattttttcatctctgctacttatccagcattacagtataattattcttacaattagataaccataaatgaaaaggtaaaaaaaaaaaaaacaacacatcaactgattgtgtagtagatggaaactttttttttactttttaaatcgagcatatcgaattccatattccagtggcatgacctaaatgtgtctataaagatggaagcttaatgaatccaggcaactgctttcatgaccttccccctgcaaatagtctttaataattttccatattgataactcagcttttttaactttatcaatgcaaaaatagaatgaatatttcaagtgcagttctacaatgtaaatacaaaatgtgaaaatgaagactttgccaactttaaagtggtaaaataacaaatcagcttcctaagccattatttcctttttttttttctagctccagcctattcacctaaagaatttataatttatcatatatgtaaactaggaagaaccctaataaatatcagaggaacaagctttcttctccataaaattaacaattgtgtgtttgactagtttttttctgaaaaagaataaagtgatcaaaaccaaaagagatgaaatgtttttattaatataaagtaacccctacctcaaactgagtctatctaatgattgcttttaacagctaaatattactagtggagtactttttcttctaaagagtccacagttacatatttttatagaaaaagtcagtagagggaaaaaaacacttctaagtattcacttaaaaggaaatcacagcaattttttatattgagaaataacgagcatttcactctaatattacagagagatgtggaggggagttgcaaagcactcctagttagagtaagaatttcacatcattttaagattgtaaggttgatttaactcatggcaagactgaacatgattaaccacttattttgtttaagcaatggcttgtcttgacatgtcactgtcaggagtggaaaaaaagtttttccatcaccaaaaagtgaggatgcagggaaactattactattgtttttatcacttccagatatatatagcttatttagacagcaaagtataagttagtaaactctttcctactttaacgccagtccatgggagaattaaagggaggaaggggcaagaatataaattaatcatctacatgttttgaatgtttgctgatccaaacatctgcttctttcctcttccctgcttctctcttctgcctgccttgtacttagcttatatcagttacccacttaacactttccttctattcattctgaacacttatactactgagtaattcatgtatcccattggaaaaaaaaaaatttcccctaagtagagatctaagtttctgataaatgtttttaatttttttcttattccaagatgtttctaattaacacctggcagtttttattttatgatctggctacctaatggcatcaggtacattgcaataagataaaaggttcaaacaaaacataaacagaattgaacatttcttaaacttagtacttgtcacatttaaatgcatcatattaacagaagtattgaattataatagaaaaagtaatgtaagaaaggtattctttaaataagaatgtttattcattgtctttttctattcctaggaatctgtcctattgggaaagtcactgcgacatgattaatggtacaggtaagaatatttgttttgtggtcatcacagttaatccacctccctttcccacaaatccaccgttgtactgacagtgttctgaaagttgagggtgtgtgtttacttgcctttatatccccacaacaaaattcagagtcactatttgtatataggctaaaggtctgttcaatgtgatgggatttgtaaagattaatcataaaaaattagcccttactgcatgattcagagaaatgtttgctttgtaaaaactttactgccatcctggcaacagaagtaaatggtaaaaaacaaacaacaacacaaaacactttagttacatttcaaatattttataaatagtatacagataagttagaattgaaagaattaaaaaaagctaattacaaaatagaaaacatatctaagcaaggcttatagctgagatagaataaagttgcaagacagaaccatccatttttggataaggtggtcagaatgagagagaaaacaataacaaagtcagatgtcttcttaactgtgaaaaatatatgtaaaaaatgagcattcataaacttagatttaaggtatggttagatcaggcttattctccttcaggaaaagcaaagtacagatatgcctattagtttaagaattaagatttttaaaaagcaatgggaggctggtcacagtggctcatgtctataatcccagcactttgggagaccaaggcaggtagactacttgtgccccggaggttgagaccagcctgggcaacatagcaaaatcccatctctacaaaaaaaatacaaatattagctgggtgtgctggcacacgcttttagttccggctacttgggaggctgaggcaggaggatcacttgattccaggaggtggaggctgcagtgagctataattgtgcctctgcactctagcctgggcaatagtgtgagaccctgtctcaaaaaaaaaaaaaaaaaaaaaagtggtgggaatcgaataccatgaagtaattaatatccagaggcaagctttcaactactaggaaacaaaagcatgaagtttagaaaattagggaatatcccataggaaaatgatataacaaagataaagacacttaagtaaaaatgaagtacagagaatgtttactttgccaaaggtatgattattgacttcgtatgcgtacttgattctatcattgccttgtaggaaatgataaacaaaaaaagcaaacaaaaaaaacagcaaaaacactgttggatttgcaggggttttcttttgtttttttttttttttttttttgagacatagtctggctctgttgccaggctggagtgcagtggtgcgatctcggctcactgcaacctctgcctcctggggttcaagtgattctcctacctcaatctcatgagtagttgggactacaggcatgtgccaccacacccagctaatttttgtatttttagtagagacggtttcaccatgttggccaggatggtcttgatctcttgaccttgtgatccgcccccctcggcctcccaaagtgctgggattacaggcttgagccaccacacctggccaaggctttgcagggttttgagccataggagtgggcaaataagctattttctaagtaaagcatttctggaaataaattttcaagtcctcaatactaccaatgctagtagttgtataagcggaatacttagtccttagatgcagagataaatatactgtgttaatcctagtaaaggattctttaaggagaaaaatctttaaaaagaagattcattgacaataatagaaatgcatgagcatcaggcatgatgttaaaaatatctatggggaaaatagggctgatacaaactaggaaaagagggaatttggacagagcaggggatgatccctgtgagagagattcttgcttatggcactagcgaaaagaaagtaataaaacagtaaggttctaatgtgttttcatcgtaatttagaagtgcatcctctttaccttcttcagtaagtttgaaaagacttaaaatgaaagtattggtatacatttagaatgtttcttttgggaggacagaaaaaaagctctgcaaatatcaactatgttgcagtcattgtccatggtagttgctgggtataattaggacataatcttcaatgatattttagataatgatcttaaaagcttttcaatgcatttttctttaattattaaggaaatggaaaagcagttgttgtcaatgtccatatgggggcttatattttacttgtcacaagagtgtaaactaatgaaaacaaggtcacaaggttgacacacttgccagagaaagaacctacaatgcataatcaaagatgagacttaccatttaaaactcattcaatgacggctcgtattagtgatattcatgtgagaagtacatggaggagttaactatttcttcatatatccaatgtttgccatggatcatagctgtagcaaaaagtaaattcaataaatgacttttttatacactttcaaagcatttgaagttctgtttagtgagagaactttagtaaatatttttagaagtagtaatcagccattaggacaaatgagaaaaaaaatcactacaaataaatgtggacatggcaggagatccaaatgaacttcactggaagaaaagtgccactctactggtggggtagggcatttcaaaaaacaaacacaatgttagccttaacatttcatgtttaagtttcttttattttgtaccattaaatatgtatagtatgtagatttgttgttgacaatagcagccgccagccatatgtaactgttaaggactcaaaatctggctagtatgatttgaaatgtgctgtaaatataaaatgcacagtagattttgagactttaagaatttaaaatattttataatggttacatgttaaaatattttggatattaataagttaaatatagttttgttttgtttgagacaaagttttccacttgtcgcccaggctggagtgcaatggcatgatcttggctcactgcagtatccgcctcctgggtgcaagcaattatcctgcctcaggatagctgggattacgagcgcctatctcaggatagctgaggcaggcctatcctgcctcaggatagctgcctcccaagtagctgggattacaagcgcctaccaccacacccagctaattttgtgtatttttagtagagatggggtttcaccatgtaggccaggctggtctcaaacccctgacctcaggtgatccacccgccttggccttccaaagtgctgggcttgcaggcatgagccagcatgcctggccggttatttctttttaccttttaaaaatgtggctgctagataaattacttaggcagtttgcattacatttctatggactacactggaggagagatttctaggtttttttctagaacacacattacatctaatcatttgccactcgatttttaaacagatgcagcctcatttccaccttttgttgagaaaagccaggtattgcagttcttttcttctgatatttgcaggtaagacagatactgaagtataagtatgtctgagtcagaccccaggtgacaaaatgcagaccaagaaacttaaacacagcataggaaattcatcatgtttattaactaactctttgcaaaatgttcttctgcatcttccaatttttaatagtacaaattttttttttttttgccatttctatctaagcaagaaccattttgccttttaaaaactaaactagtagtctattaacgatcaagtccagaagggcgtgcccaatctttctaaagacatacagagaagatgatgcaaatgtaacagaactgtgttaatgtgctctgctcagatttgtggggcccagtagataacacacaagcactggagcctttaccactacccttgagcccaagctctgtccctaaagactgtatgcttgtgggtaggcatttaacatctctgaatttttttcttatctgtacaatttaagacagcagtatttcttcatatacgtgtatctggggataagaaaaatatgtgtattgaaccctatgatagacacttggtaaacgatggaaatgtaccaggtatatatccagcatgtatatgcatacactccagtgagtggtctttctttccaggattaattaagccgtgaaagaaactatttcatttaaactgatcacaaataaagtatttgaaggaagtcctataaatatttactctattggataaattgcctgtgagaagtaacttgagtataaataaacatggtacttcacaaacaagaatagttcatgcttggctattgagttttagtatgtgttaaaatttcccaatcactttttttctaagaatgaaacaagaatttaaaagagtatatgatgtttctaagttaaaacaagaataagaaaaaatgaatctccagaatgtaagttcaggttcctggaatgcagctcttttttctctgtatttaggtcaatctatgctgtatttgaatccgacgttaatctgaaaggaatccctgtgtatagatttgttcttccatccaaggcctttgcctctccagttgaaaacccagacaactattgtttctgcacagaaaaaattatctcaaaaaattgtacatcatatggtgtgctagacatcagcaaatgcaaagaaggtgagtaaataacctcagtagcacagtccataccataatttgtgatattctttaagatgagaactttaccataatcctttagcaaccaaaatttaaaatatatcataatttgtgatattctttaaaatgagaactttaccataatcctttagcaaccaaaatttaaaattaaagtaagaaagtaattagggcagaagaaagaatggtggcagaaaattttagtgctgattttgtattttgggaagatcccacttgtgtttcagtattacaaaatttagttaaaaccacaccagtatttccttgtggctgcttttagatttagggtgaaatgaaaataattccgagaacacattaaacatcctgttattcatctgtcctaacttttttcactagaaaatggtacaggtaaatgtattttcagtatgtatctaaagctagagttaaacataaaatttggagactagcttatcctgtacatatttatcatactaacgtgggtgtggaagaagaaagaaaaaactagtgttaaataaattcttagtccatagacatattactgcctgaaagctttacatattgaaaattaatactgaaggagtttatagtagaaatcaactgacataattcttccccacccatgttaaaaaccatgtattttttaatgcaagaagctttagttttgtggaaatattttttgagttatatgtgaaatgaaggaagttattaattccaattgactcttaaaacttgtcttcagggagacctgtgtacatttcacttcctcattttctgtatgcaagtcctgatgtttcagaacctattgatggattaaacccaaatgaagaagaacataggacatacttggatattgaacctgtaagaaaacaccttattgatctgatttggttgatatttttaaaaatacaattgaaataaaaataatcttgtcgatgattatttattcaataaataatcatatttattgaatcacattcttgaaagttactgaaacttaggtcgatttcttcctatggtttatgaagtgattctaattggcttaaaataattttatataaatatttatgtttagatgaggagttattgtatattatgcaaaagtcaaagagtatatgtgagtttgactatacttattgtcaaaatctataaaattgttgtagcgcaacagttttaatcatctttatttttgtattttccttttcaaaaagtaaatgaaattctaggattttagtagttatgttttagtttaaacaatgacacatggattctaactgaatatatatttgaccaggaattatctgagatcttatattttgttgctgatttttgattttttaaaaaccatttcaagtaactcacaaatctaactaactaaaaccttgacattcgattgggcaaataaattgtgtgtatctatatggatgcatgtgtatataactataactatatatgcagttttaaaagtttcaattagtcctgtttaaccttaagttactaccttctcttctgctgtaagaaaaataagttttgaatagtataaaataatgtttttaaaagttggtaattatttagttgttctctttttagataactggattcactttacaatttgcaaaacggctgcaggtcaacctattggtcaagccatcagaaaaaattcagtgagtctcttgaaaatggttattttgatatgatctgtagtatcgtagtatcttcttgtaagaacatgagtaaatctatgtaagtaagtggaaataacatctgatatcaacttatctttagcttaatgtcaccaatcattattaaatgcttatgactaatttcacagattttggaatggttttatggttttatttgagcatttgatagcatctcttattttgttagctgcccaaatatttctatgacaataattaatttttggaattcatatttcagttccccgagaatttattgaaaggaaaaatccacacttgtgaaaaaaaatcaatgtgattagaagacatataagagcaaaggaagtcaaaaacaactatattaaaatttaaatgagtcattacaggaacaaaatcaaattagcaacagcaactaatttatgaacatttattttaaagtttgttatatataaatattagtttatatgttcataattattttcaacgtatattacagagtattaaagaatctgaagaggaactatattgtgcctattctttggcttaatgaggtttgtatttgcagctgttagtcattaaaaacaaccttctttgtatataaacaagctcttgatgtttcaaaagaatgtatagtatttaaagctatatgtatttccattacccatatggatgagtatacatttatttaacctatttgagatgatccaattgaacaaaaacatttcctatcatttaagattttcttcaaaaatgcatctattaaacacattttcttgttgtaacatttgtcttctattgcctgacaaggtatttttactataaatccatgcattgatagctataaaaataggaaaaacattgaataagtctttggagcaaatgaaactgttgaccctttgatagttctgaagagcaaatgaatcctagtacattgaagagtaccgtactctatctggcacttaattgcctttcttgacttgcaaaaggaattccattaacttgccttatagatactgatgactaacaccaatagaggtgttagaaaaaagggtgataggcaattgaagggtttattttgttttactaacgtacccaaataatgttgattattaacttgattacagactgggaccattggtgatgagaaggcaaacatgttcagaagtcaagtaactggaaaaataaacctccttggcctgatagaaatgatcttactcagtgttggtgtggtgatgtttgttgcttttatgatttcatattgtgcatgcagatcgaaaacaataaaataagtaagtatgtaccaaaaaatattgcttcaataatattagcttatatattacttgttttcactttatcaaagagaagttacatattaggccatatatatttctagacatgtctagccactgatcatttttaaatataggtaaataaacctataaatattatcacgcagatcactaaagtatatctttaattctgggagaaatgagataaaagatgtacttgtgaccattgtaacaatagcacaaataaagcacttgtgccaaagttgtccaaaattgactggttcatttctcaattatatagctagttatatattatctgatacttaaaaataattgactaggaaatggtttcataagaccaggattgctgcatgtagacatgctggccgtgcattttccaaatccagaaaagtcctgaacaaaaatttgaatataatagtatcaggaaataggggaaaatagtgttcaacatagtagaaccaagtactcagagtggtgtacaagagtttaggcctctatgctttagatattagtgtccatgcactcttaaagatgaatgaatgcctgacctttcctaaaggaaaacctttttttagttatcacaggtaacattggtgttgcctgtgggggagaattttttactttctccctatttttcttcagcccacctcaaggcaatgtaaataaaagcagtatgtgtgttataataacttatttagttgtttactgtgtgccagtaccatgctaaagaaagattctttatctcacatgatccctaatacaatttcatgattttccaatagcctggattcatcagcatccattctatcttctagagatgttccatgaaatcatacattttaattgtttgtgaccaaagcataaatcagtgaaagtggaatttggggaccaataatttccttttgtgagatggagagcttgtgtttgaaaaggcaacctaatttttggttctaatcacttctaccactatttagtcaccaaaaagacaataattctgcatccaaactatttggacagaatggcttcaaaatgctagcctaaaatgttcacattataaaaagttaaatattaccttcaatacctgtcagtagcctactgacaaattatgactaaacaaaggtatttgtatgactatgtaatagatcatccgctgaaaagtaaaacaaaataacaaaaaaacttgtcctaatgggaaagcatgcttaataaaaggaaatgcagaagttataaacatgttttgtaagtaagtattcagaattaaaattatgtgatacatttttatgattgcttaatgatccttggatgtcagattccttgggtctatttatagctaaattataatgaaaaattcaaggcttgctggagcaactttgtcaacaaatatattagttttgcttatatatttgatttttatgtggaaaaattactacccttttttacaagcagagaataaactgttgattacttgatttactagatttagaagaatcacaaaagatatgtagattttcttaagcaaaattcagctcttaatatcataaaaattatatctttgggcagatttgtaaacaataggaacaagtaagaagacaggtatgtaagaagtagcaaagtgtaagacggtggagctttaatgtgtggttttactcagggggtcacaagaaaataacccaatggtccttttgaaagtagtacatacacctttaaatggaacttggtctgaagggtgtggaaatgctggtccagggcagatgcacttcagctaccgttccttgcctggtgtgtgcttgtcttgaagcacccttcttatgtgcctttctggaatgggaatgtgttttgccctattggtgaagtccgttagagaacttctctctgcagctagagaaactgaactgattaataaaaagtatgatatctaagatatactgccactctacaggtagtaaatgattcttcacatttgtgcgccagctacatcatgacccttggtaataccgaccaacaggatgaaaattggatatgctttacttttacaaagcacaccttatcttttagttgaagaaatggtggcactatttctttttttgcactaagcaactgcacatttcaaaaggattattgagatgttatgaaaatctctaccttgcacaaaaaaaaacccagcagcttttaaaattcatcatttccacaactgaattgatttccgtttctacagacctggctcaagcacaaaccaatttgtgttgttctgattcaataattggtttctgggtggccaattcagaagaagagtgtacatgctcaacaaatcctaggccctgcattcctgtcatcctcatccgggggaaacaccatcatcccagtagctgccctattcaactgcaacagtctccaggaccatcagtatactgcatttcatgtgcaccaaatattttgaaagacatttataaataattggcttatgactcatatttctctatgaataccttcatacagcaggtataactcttttctttatgggcttaaatattttgtcactgatcctgcaaatggacatcattttagcacactagcggtttatattttaaggaccttcattctctgttctgcacctcttctggaaattgagtaaattttgcttttttttttttactcagttgcaacttacgcttggcatcttcagaatgcttttctagcattaagagatgtaaatgataaaggaattattgtatgaaatattacaaagcgtagactatgcattgttattcattataatattttttgctgtcataatcgcctcataaagacaggtttcaaccattaaaatatgttcttccttaaattcctgtgctttttctagttcctcttgtgtcataaaatgtttatcctaattttctctctgaagtatattttatctgaatccacatttctttataaatccatagtccttgctgaaatatgctttctaaatttctaccactttgttctaggctaattttttaagctaattggatgaagaacaaaaagacatttggtttcatcctttacagcagtaggacaattgcaaaggtttttcctttttcataaggagacacattaataggtaactctgtttcttgagcaggggttcacttattctgagagcattagttctcctaaaaagctccagcatagaaagggaagataaaccaaattctagcttgtgttttacccacagaaggatacaggacaaaggaatagtaactggcctgtttggatactaaaatcgaaaataacttttagcctcctccttatgatagccgccagagtaaatgttgagcattactacagaaaagccacaaaccaagaatctacctgtttggaaagatcttttgcatctctgaaggtgcttaaagcatacttagtgcctttccttttaactgggaagataaaagaagtatctgtccaagatattaatatgtaagataacattgtagacatgttcttctgataatacaaggtttattctatttgcattaggatatttgtggacatgtccatctaatataaaggaaagttttttaatcattgaggcatgtagggctgagttatataatgtagaaacttctaaagataattggatgagaatatacatattgacctgtatattatgactaatcatgactcagatcttaatacagggatgatctcatagcatttagatatcagaaaaggttttgacctatatgtctttaatattgtttgaatacatgtataatctttatcattcctcagtgtttcatttctcaaattctgtaaaaggaatataagaggaaagacaattcatatacaaagacaacgagattaaaaatatgcagtaggaaaaataattacttaaggggagattttttttacatgaaatctgggctttggatgtgtgtgtgtgtgtgtgtgtgtgtgtgtgtgcacatatgcactgtggtgggagtggggcaacttggggaatatgttacatgtgtgactttgttttgccctggcgaagttaatgttgttcagaaagggtaaatgtttggacacttgcaattgctcatggatgaatttatatgttttagtcatagaaaaattgtaccctttgatagaagcacattttctttccaaagctggttattaaccacagaattatagcaggtattcataacttaagtttgaaaatcaatagcgtctgcaaatggattaacagattagagaatcaacagcatcggaaaataggttaatgcatattgcttctaacaagtgcatgaagaaatagaagaagctatgtagctttcagttctgacagaaaagggtgaaggagggtatcatttcaagaaaaaaaatagctatcacgcaatggttatctctgaaaatatttgtattaagatgtgtatacatggccaggcatggtggctcatgcctgtaatcccagcactttgggaggcaggtggatcacgaggtcaggagatcaagaccatcctggccaacatggtgaaacctcatctctactaaaaatacaaaaatgagcggggtgtggtggcccatgcctgtagtcccagctgctcgggagactgaatctcttgagcctgggaagcagaggttgcagtgaactgagatcgcgtcactgcactccagcctggtgacagagcgagattccatctcaaaaaaaaaaaacagtatgcacgtacaaatttcttaacctgttatcaatgtctgagctacataattatctttctagttggagtttgttttaggtgtgtaccaactgacatttcagtttttctgtttgaagtccaatgtattagtgactctgtggctgctctcttcacctgccccttgtggcctgtctacaattctaaatggattttgaactcaatgtcgtcgcttctggtttcctgcatataccaatagcattacctatgactttttttttcctgagctattttcactgagctgagctaatgaactaaaactgagttatgtttaatatttgtatcaaatacataaaaggaatactgctttttccttttgtggctcaaaggtagctgcattttaaaatatttgtgaaaataaaaacttttgttattagaaaaatga

SEQ ID NO: 60 - DNA, 28959 bp, Homo sapiens
ctcccaggggatgtgcgagcagtctccgccctcgcgcgggagctgggaggctgcgagatccctaccgcagtagccgcctctgccgccgcggagcttcccgaacctcttcagccgcccggagccgctcccggagcccggccgtagaggctgcaatcgcagccgggagcccgcagcccgcgccccgagcccgccgccgcccttcgagggcgccccaggccgcgccatggtgaaggtgacgttcaactccgctctggcccagaaggaggccaagaaggacgagcccaagagcggcgaggaggcgctcatcatcccccccgacgccgtcgcggtggactgcaaggtccgagcccggggaggtcgaggaagcgggtgctgggcccggccggggagggctgcgcggactgcagcggcagtgcgccccgaggtggcgggcgcggggctcgcgccgcggggacaagtccccgagagagcccggcgctcccgtttcctgtgggtccgcagctcctttgtaaggaagtgcgtgtgctggaagcggtgcctgacgcggggtcgggggcttgggaggcctggagagggaacgattggctaattgtgccgaattcccggtcgtttgtgcagtccggggagcgtgcgtgcagccaggacttggcttgttcgatctggggaccggcagcgacaggcacaacaacaacaaccgagtttggcacttccttcccagtataaataatgtacctaaaatggctgacatcattacaagcctaaacctctgttgtttcccactttcgtttctaggcttgaacagcacttggactaagtccagcaactgtaagcgtcttaattttaaaagcgtttctttacctcctttttccacggcccttcggtagtggcaggtgaacttcacctggagaggggacgaagggacagtccgcccgaagtaggtttgggctgtctcttaccattactagtaaaggccagtaatgactatgtggatgttagtgaaaaaccaattgttggcatttaaattgtatcagcgtctttgtgaggactcctgctgcgtgaaactaaacatgagaaatttgcccccgggtccctaataaaattctcctttattttacaaaatctccctttaatcctaggaaaattcatgaagtggggctgttactgtgttgacttttagtaggttacgatcatatttacttaaatatgagtgtaattgtctcataagttaaaaaagcccacagcctcttacccagaccctttttaggctgcaaaaattagaaattaactgtaaagttatgttgcttatcttattttttgttgttgttagcatttttcaagacctattatcagtagggtaaatttagttttaacttaaaaaaattggtgtgccacgtatgaataatgggagtttttatatggacgaatgaaaattattgctgaaaaacaggccactaatatactgtaaaaaattcacaatataatggtaatctagacatcatattataatttattatattctgaatataatctatcttcagaatataatggtaatcttactttctggaaatgttctgataaaaacagacacgtcagaggttgatttctaaatgacttgccttgccttgaaataggaacagtgaactgattccctaaaaggattaaaggttttggttttcgtattggtattgttttcctgaagccattgcaaacaatcttggtctttaaagaaaatgtttggaatgcacagatgaaaattgcagtagcaaattattatgttagctctttgtttatctaacattcgttgtacctaaaatagattgagagtcaagtatccagtcacaacagtctcaaatatatgtagtcttaatgctatcacatatatatatatacacacatacatttaaaaatcctattaacaaatataactgctcccatttagaaaggagagagtgagcgagcattggatgatgtcacttcagacagcttttctctgttccgctgtagtggagatttgaaactctggacaaacatcagaattacatttgctgagcaccattaaatctgacttctgacaatttttgtcatttctgaaatagtgactctgccagattctcaaaattgctcacgagttcaccatatttaaattttgtggtcattgcagctataagtaatcattggtagctccgtgctttgttttccattttttattttctcagatcctccatatccaaagaaaaatactactgggactaaagagtgagggccagagtcgtctttgtaaaccacccagcagtcacggatgagttggtagataaaaaatgactaattctttttccagctataagctgaaagacttctttaggggatgacaaaatatttctctacattaaaagtagaatccttataatcagtcagtcgcttaacgggaaaaggaaaaccttaatgacagacttttgtgaaagaagttctgatctcttcatttcagagcttgggcagtgattacataatgttctctggctccttgcgggtggctctgtggcagccaccttgtctgactgcctggactgggaacagaatcagccttaatgtgttttgccgagggcatttcctttgcctggttggttgaaagaatcaaaccaagctagttaatggcctagaactcctgaacaagaatttttcttatctttaaccctcccagatcacaatatcccgcagaccattgttttccaaaatgtgctcttagggaccacctgctctggttttaaaatgcagattctgttaccttatgccacaagaattctgatcactctaatcagctggcttatataacatgcattccagtacttttacattgctcctgtctttctatttttttcttctgcagggtgagaactctccagaaacagttctattaccccatttttcagtcttatcttttcagcagctattaatcctaacagccatttctattgatagttttatctcaactagcttgctgtttattcttttcctgcattttccccttaattgttttcaccttcctcctctcctagtaggcataaagctcttagagctatagagacagcaaagatgggatgtattttgggtagcagaagtgaatttgaaattatatacatgttttatgctataggcaacaattcatatatttttgtggcaatactttgaaccttgggaaattgttttatatttgcagataacaaaatacttgatgtactgtatcagaagtcccagttttgtcattacataactacttgatcttgggcttaaatttttaggttttctgtctgtaagatgagagggtaggaccagatggcctgtaaggattcttccagtttcaaaaatctatgaagatgctaggattacataattatatttggcagacattaaattgttttaattgtgaaaaatagcaactacctcctcactctaaccagactattccctttcttccttttggtgtttaacatgttacattcttccctcatatcaagtagcagtgggtcaaagagaaaggagatgggtagaggtattatgtaataaagcacattgtcacttctgtttacctcacagtgaacagtgaagttgtcagcacctctttgttgcaatgcctgcttatgaaaccccttttccagtatcaggccacagaatagcttaagcttgcttcatatgtatccctgcaagttgttttgctgacaaatagtgttgctttctctctaccccactttgtagatattctttaaaaggagagagaaaagtaaagtgctgatataggagagaaaatagtggcagggtgagtgcaagagagaaagtgaaggccgactcacccagtaaaagttttgagttacccatgacaaatggctgtttagaccctggttctttaccctttctggttttccctattcacacaatcaagactgaaggttttgataattaagcttttcgtttgtggtggtggttttgtttgtgtgttttttggggagtgaggagaagggacataaaatgcatggctggccatttactataatgttgatataatgctctcaagggattgagagcttggttctctttaaccaaagtgcatcttattacctagttatgtaattccgtgtttgcagatattggccagtgaaacttttacattacattttggttctccatgaggatattaatatctgaattgagggtttagtgctgggaaataaatgaattgcgtctgtgcatcccaaatgccttggcaggacctcctgtgtacacatccctgacaggacactgctgtagcatattgggtgtgcaaggttgcatattgcacaggattgtagtcttcccaactagacagaaatgagtataatatacttggcataataagcctgagtgacctcatggaattcaactctgacatataaaaggtttatgtgactggaagtattttttaagcagaaatatctcaaatacgtttatgttacaggcctatttaaattaatttagaatttgacttacaaggtgtttattatgcatttccaaatcttgacttgtgggtaaatgtacatagaaacatgtactaagtagtcattgggggagattttatttctcttagttttatcataccataacttaaatgtctggcgtgtctattcaaaacccacattctttttccaaaaggaaatactacttcctgaattcctagatttaactaaagcttcttgtactgctttgtatgtcagtgtcagtaaaggaagactcagaaaaaaaaatctttttgggttaccagtaaaatcatcctcttaaattttttggcaaacgtggcattttattagagcttaaagactaaaggaaaagaaattaaggactttagaccgttactgaaacctgttaaaggatttgacaattctgaatttctgaatgaggtgatttttgcctaaatgatatacaaaatattaacactggagctgtgcttcacaatgaaagtcttttccaaagtagacagctgaaagttgaaaattggaaattataacactaaggacatcatttttgaaaaatttccacttaattgtgattatcccttttaattagtacttacaacacatatttttaatagctttaaggagatctacaatacaacctcattttataagtgttatcaacaattgaatgaacaagattattttaaattattgtgcattctttaagctcttttattagaggaaaaaactttttgcagtatttctataattgtacttggggaaaaatcaggtaagaatgaacgtagactttttattcttaaacagaaaagtttgaatcttgagttgtagcgatgaggaaattacccttgtttttatggtagagatatattctgatttttcacttaatgttttatctttcagtactgataagttaccagcaataattttatgatgttgaactaacataagtacgacaaaagagaaataaaattttcacagcttatatataataccacttctgagttaaatatcctggacgtttatttgggaaagtgatactaagtatggtggtggatattttgtactttgaaattttgaaatatttgcataaaccgtttttggcatagttgaatttcatactttaaaaaacaagtttggtggatttttgtgtttatttgaatgattaactttaaggctcaaattattatttttttttagtgaaagcaagtttattaagaaagtaaaggagtaaaagaatggtactgcataggcagagcagtcaagatgcaaattatttttaaaagttgtttgttttcagaatgagttaaggataaagcttaagtcttaactattttctctgcttatatatgattataatgttttaaattattttatataaaaattttaaaagatgcattgttaattaaatcacttgaatctctgcagtatccaaaagcagacccatttttatgctggggaaaatgatttttgagagctagtctatttagctttgcattatcagttttcagtttttcattttatataactttatccaattcattttttcctccctttaatactgggacataaaatttcctgtctatcagttttacctagggccgtgctaggcatcttaagcagagaaggcaaattcagtgtctcctgggctgaagcagatgaattgttgaagctggactttttgcatatgaaacaagtaagaatattcttggttttcctgccaggcgcaagccaccgcctgtaatcccagcactttgggatactgaggctggtggatcacctgaggtcaggagttcgagataagcctggccaacatagcaaaattctgtctctactaaaacaaaaattagccaggcgtggtggcatgcgcctgtgattccagctttttgggaggctgaaacaggagaatcgcttgaatctgggagatggaggctgcagtgagctgagattgcgccattgcattccagcctgggtgacacagcaagactctgtctcaaaaaacaaaagaatattcttggttttcatttttaaaacatgagtccagtgttgctggatcctccaattttccaaggcaagctaaaaatcagtactattttaatttatacaacaattttagcccaaaacactgaaggcatgggccactattttataatctcctttaaagtggaacgcaggactggcaaattatagcctatatcttcaaatactgcctgcctgctgtttttctgtagcccatggggtaagaatgatttttatattttttaatggttgggaaaaatatcaaaggaatgatatttctcctttttgcccagtaccctcactgaattgttggggaggggctgctgctattcaggaagcagcagcactagcagaattcaggttatacagtcattcttcaaaagatttaaattttgtctctatcacttactttgataccttgggtaagttacttcagttctctgtgtctcagttttttcatcagcaaaatagggaaaataataatctgtaacaataatagcacaatgcctggaacagagttaaaaattagtagatttcagctactgttatttttatttatttttttgttgagaaacagtcttgccctgtcacccaggcaggaatgcaatggtgtgatcttggctcactgcagcctctgcctcccgggttcaagtgattctcctgcctcagcttcccaagtagctgggattacaggcacctgccactatgcctggctaattttttgtatttttaatagagacggggtttcaccatgttggcccggttggtctcgaactcctgacctcttgatcaactactattattaaagtcccagttttctctcctcatcattcttgttttggaatattacttcttatattactgttactgcttatccctgcctcacatgtcagtaacaatattgttggtacttttttcacagcaaggcattctggtaaagattgattcctgcaacataaaaacccttaggattcagtagctgtaccgatttcatttaaaaatgttatttattcattacataataggtgttaatagaatttgagttttaccaaagtaatactaaattttaatatgcaaatatatagtcctgccctatgtcagaggaacatactttaaaaaaattgtagcatcattgtatacagtaaaatgcatagatcatgagtgtacagttagataattttaagtctgtatacctgggctctaactcccaatcaagctgaacattgttatcaactcagaaagttatcttgtgtccttttacaatttgttctccttagaggtaaccactattctaatttttctccccatagattaattcaaagcaatcatattcacttattagcttcttatggtcttttattaccatggtgaccactagaccctcttctgcctttgtgcaatttagaaaaagatcccctctctggtggtttggagaatagagcatcagttggtttctagacctactgattcccttggcctggcatccttgtactggaaacaacctgcccaaccatacatggcgatcttaactccatgtttctcactttttgccccagtagggcgtggtgcggcgggcagcagagtcttgctctgtcacccaggctcgagtgcagtggcatgatctcggctcactgcaacttccgcctcccaggttcaagtgattctcctgcctcagtctcccgagtagctgggattacaggtgcccaccaccactcccagctaatttttgtatttttagtaaagacggggtttcaccatgttgaccaggctggtctggaactcctgacctcaagtggtccacccacctcggcctctcaaagtgctgggattacaggctgagccatagcacctggccctccatgtttctcttttaactccctatttctctaaatcagtggttgttaaacattttgctctgagaactcctttatagtcttaaaaattgttcaggatcccaaagagcttttgctttatgtaggttatatatatttccaaataaccaaaaagatttaagaagactaacagtaacattgttttacattcggcagtgccctttattgaatagcttaatagaagatagccggattttcctatcaaattcttcattcagtctgttgtgatatggtgcttagcttctggaaaattgcactgtacaatttttattgtatataaacatagcgagagaatgaaagtgaaaatgacagttttattatttaaactaacacagtcttagttttattatgaaaaaagtttgaccttgtggaccccctgaacgggtgtgttcctggaccacatttgcagaacatctattctaaatatttgcttatactgctgtttcatggtttgttttcatttgttttattttttgcagttttagataatacctattgataatagctacatggaaggtgaatatttagctttttctgaatatttacacactgcacacatgatctcttctcctgttctagcaatttctggttaaattgatatttagtgttttttattataattaacataaacattagttacatttgagtattgtagtatacttttattttacttccattcttgtataacaactttttattttccctgaatttgatcatgcttcttggggcaggagagagggttccttaattttctacatacttactgctcattcattcctcagactctgacagcagtataattgtctttctgtgtcttcaaactcaccaggtaacttaccaagtttctttctttctttctttcttttttttttgatgatttcttgcccatcattcattagttttctattccagactggttgcactcatacaaatgtcctgagagtcataatcatcttggaagaattgcctttgtctttatcacatgctagatctacagtttcataaatctgaagaaaaagataaatttttaaaaaatcttacgtgtctcagaatcgttattccatcctcatatttgataatttatctgggtgtaaaattctaggttagcattcatttttctctcagcattttgatggcattgctccattatcttctaatgtgatgccattctgattccttgtttgtacatgactttttttccccctttggttgtctacaggctggtgattttctccttatatcttttttttcttttttcttttatgctttcagctttcaacatttttattgacatgacttgtctgctgtcattcattttcattctttgtggcttaaggtttatttgttttatccctttactgtcgctttattgagctttcaggaggaagtaaacaaacatttcactggaaatcaatattagaacttcaacttagctatcttgatagctttttaaagatttgttagaatatttccttttacattaaaaattgacttaatgataattaataatggataataatggaaaccatctgaattaccattagcattaatttaagatcagacaggatggtctagaaagattgatgaggcatcctctgatcgtcctcttcaaagttccaagattgtctccttcatgaggaattttagaggcaactcattaccaactttgtagttttgctttgtggcattattactccaactaacttaaaaaagtttcatttttgtaattaatatgttgcctttttcatttatgttgaaatgcttatgtgctggtgtgccttagttattttcctttattgttttaagttcacatgtatgtgattttaatactttttgctaccatcctttgtaatttgttgaacaacagagaaaagccctattaattttgacaacatattaaaagtaatattactgcctttgtaatagttcacacatgtagggcttattagtgtgggtcaatttaagtaaaccttttacaacagtagaaattcatgctgtgggccgggcatggtggctcacgtctataattccagcactttgggaggctgaggcaggagaattgcttaagaacagcctgggcaacatagtgagacctccacctccacaaaaaaatttaaaaattagccatgtgtggtggtgcacatctgtagtcccagctacttgggaggctgaggtaggaggatcacttgagcccaggaggttgaggctgcagtgagccgtgattgcactattacactctagctggggtgacagagcaagaccctgtctcaaaaaaaaattaattaattaattaaaaagtatatatatttaataaaaaaaatcaggctatgtggtttctggttaggagtattatccaagtgtgacatggtgtctgtcacttcatttattaccagagttaatttgcctaagctgtttgagtcagtttccttaagcagcacatagagtcaagataatattcagactttattagctctgtgatattacataaataattttacttctctgggcctcatatttatctgtaaatgatgtattggattaaactaccttcatggtacttccataggggatctattcctgagaactgtattgatcatatattcagaagcacctactggatagccaggtactatacctggaatttaaaaattgctaaacaccccagctttcaagaaacattgtgtagctagggaagaccaaccagttatgaaaaccaaattagtcacaacctatttaaatgcctatatttattcttagaagaaaatcacaccgctggatccaagagccaggagagtggtggagtaagggagcaacattcaatattaccactgagtttttactgcacatgccttcagtgctaggcagtagggctcataggatcaaagcacttctcacatgtagagagacaagtattcctgatctttagaactattttttctagtagtcatcttgtttaacatttagaattccaaacttggacagaaattttctcttaactatccacatttaaattatgttatactttcagatgaatatacttggaattttcttaccaaaagttctgcattttaaatgaaattacccatatttgaatatgaatgtataattatcttgttgaaagacattaaaagccagcatttatataaaagtgagtctagaacaggtttgttcttttttttctttaatcttgacactgaattttataatgaattatataaaattagagcattcgaattgtgcttaaaatttttagggaaactgttgatactggtaacaatgtggagtttcattcagccagtggtagagaaaatctgtcttcaccaatttatcccggtaaaggatattattaacaataaataacatttgtatataatgctgttgtttatgaacatttacctgtttgtgctaatctaggctttttgctatcccagtgccttttactcaccaatatgaatttgaaattctgctaaaatttcactttataaaacggatacaaggccgggtgcagtggctcatgcctgtaatcccagcactttgggaggctgaggcgggcggatcacttgaggtcaggagttcgagaccagcctggccaacatggtgagatcccgtctctactgaaaatacaacagttagctgggcctggtggcatgtgcctgtaatcccagctactcggaaggctgaggcaggaaaattgcttgaacctgggaggcagaggttgcagtgagctgagatggcaccactgtactccagcctgggtgacagtgagactccgtctcaaaaaaaaaaaaaatggttacagttctgttcagcatagattgaataaacacagtagagaaatgatggtcattttttaaactatgtagaaaaaagaataagagattttaaacttattattcatataaatattctactttgcactaatctgcttgtctctgatacaaaagtgattaagttatgatccagttctaaatgcattgcgttgataatctgcctgttgttttttttttcaagttccaacctatttttatttaacctaaaactgtgctagttttatgtgatgctaataatttggttcaagtttcatagatttctgacagtagttacattattatgcagtggctttaaattttaattttttttcattctatattactgcttttatattgcaggattttttaacaaaaaagtatgttaatgaggaatctgttttatagaccttgtagtttaagttcttttttttttttttcgagacagagtctttctctgtcgcccaggctggagtgcagtggcatgcagtctctgctcactgcaagctctgtctcctgggttcacgccattctcctgcctcagcctcccgagtagctgggactacaggcgcctgccaccacccctggctaattttttgtatttttagtagagatgggttttcaccgtgttagccaggatggtctcaatctcctgacctcatgatccacccgcttcagcctcccaaagtgttgggattacaggcgtgagccactgcacccagcctaagttctcctttttaaagccttcccctgttcgaattccagtacagaataattccataacttcattaatcataacatgttggtataattcccaattttgactgtaaatactaatttaacttaactaaatgaaatctaatattgacagaaggtcagaggcctttgtgaaatagagtactcacaaatatagagagcagctttctgtgtaatgccagacactaggaaaactgcttcctttttatgtgtcaaacatttatcacgtggacttcctcactacagtcaagacagcagcaatctcatttcaaaaggcaaattaaaaagcaaaattcagatactgatttaagtgaataagaaaaaatgcaaacaaatgtttgatgtcctcatggattgttaacttctcagccagagattttgtgtcttacatataccagatatatttgataatcagtgcagttaataattagcggatcaccacatcatgtccttttgatgctttcatactgaggaaagaaacctaatgtagaaaccaaatgaatatgtcccagtgtacaaaacccagaactcaaaaccctttatatggagaagtagtttagattgattatttaatataaataggatcccagaaggaagtatacccagtcatagctggaagtgaagatcagaattcaaaacctatatttggtctccaagtagagagaaaaaaaagataagagagaagttgaaaatactagaacattgatgggaaatttagtttttggttttgttttgtttgagatggagtctcgctctgtcaccaggctggagtgcagtggcatcatctcagctcactgcaacctccgcctcctgggttcaagcgattctcgtgcctcagcctcccgagtagctgggattacaggcacaagccaccacacccagctaatttgtgtatttttattagagacgggtttcaccatgttggccaggatggtctcgatctcctgaccttgtgatccacctgcctcagtctcccaaagtgctgggattacaggcatgagccactgcgcttggccgggaaatcctagtttttaaaagtgcgaatcactaaatttttttaatgtcccagctgttttgctgttttggaaagcattataccagccaaacaacacatctgtgggcagctgtcctatgcacccccatatttacctatgttacccagcatgtttctgagtaactaaatctatttctgaaggttcagtatattttgagttgaataaatggtattggttctttttttatgtatattttttgataatataatttttaacactaagagttgttttcctcattagtatcctgattcctaaagcactgttgttgaatttgatacagaaatgtaaaatattgtatctgagcactttgaaaaatgtctcttaaaagcttcagtcatcctgtaaaaaaatgttcaaatagaggtgcctaagaatataaagtgatttgttagtttgagaacagaattgaaattatacgaaaaaatatacattttatttaagtttataattgaagcacatttactaaagcctcttagggaactgattgaggtgacctaattcttaactaattgaagtaccagaaaagaatttgtccttcattttgtttaagatataacttcttaagtaattttattttattatccaatgctgagatttatttgaactagaaattagtactgtgccagagtgagagtgctcctgaaagccaggtctttctatatctactgttgcaaggtggttataggccagcgtgtgctgcagtgtcttcttttataaactgggctaaaaaacttgaggtttaggaagattaattagatgataattgtacagcacctgtgggagttctgttaccttttaagcgcgatgcaaggtgcaccagttttattgcagtagaagggaggaaacgtctcggtgacttgttttaaattaggccaggtaaagttatataccccagtgaagaagctcttacttgttagtggtttttttctttttaaaattatgaaatatttcaggcacacaaaatacagagaacctgaagtatattttatatgttttgaaagtcttaaatatcacatacttacataatacttaaatatgtggtgttatatgttgtgcaacgtgccttttttgggggggtcagcaattatgtttcttaggcttatctaaaaatcagcagtgctagtactttttttttttaatttttattttttaaaagagataggatcttgctatgttgcccaggctggtctggaactcctgggcttgagcagtcctcctgcctctgcctcccaaagtgctgagagtataggcacgagccactgggcctggtcactagttgaatctttttagcagtattatatgaatctataataatttatttcgaattttttttttgttgctgacaatgtagtgtatattcttggacatatttccttacatattcaaaagtttatccaggatttatacctaggaatggaattgctaggtcataagataaatgtatgtcagaggtgtccaatcttttggctttcctgggccacattggaagaagaattgtcttgagccacacataaaatacactaacaatagttgatgagctgggaaaaaaaatcacaaaaaaagtcataatggtttaagaaagtttgtgaatttctgttgggccacattcaaatctgtcctgggccacacacggccatgggccacgggttggacaagcttgatgtatgtttattagatactgccaaattgttctccaaagcagttggacctaaatttctgtcaattgagtggaagttcccaagttccctttgttacacactttttctagcacttggtgttagacattcttttattgcctggtagacaggaactcagttgatttcttccccaccctccatatcaaaatataatttacatggaataaaactcctgcattttatgtgtacaatttgattgaatttatggtaattgtataaagtcatatatccaccccaacaatcaagatacgaaagatttccatcacccaagtaattagtttcctcatgcctgtttgtagtcagtctccccttccccagccagtaagctgcttttgtcattatggttttgccttttctagaatttgataaagatgtgatcatatagtgagtaatcttttgtgctaaacttctttcacttagcatgtttttgagattcagtcccgctggtgtgtgttattttgttcctttttattgctatctatttcatggtatgaatataccacaatttattcatcagttgatggatatttgggttgtttctagtttggggctagtatataaataatgatgctgtaaatattcatgactaaatttttgactcagttgatttttgattattgatctttaaaaatcttgccaccctctaattagtttaaataatttgactttcttagattttctacatagacagattatttacaaataataacagttttttcttttttctaatacctaatctttttattgtttgtgtacttgctgtaggatctctagtacagtgttcagtggaaacagtcaattttagtgggcattcctgtattcctcaattaaaagggtatggtgaagtattaaagtttcaccattaagtatgaggctttctataggcttttgattattagccttactgatgttaaagaatttcaccctttgctagtttgcaaagatttttttttaatggaagttgaattttgtcaaatacattttctgtatattttgagatagtcatggggtttttcttcttaaatctcacgtggctttttctttaagtaaagcttactctttgaagtgttaaaatttaatcactctaaaaacacttttaataaatctcttagattaaaaacttttaaatcttgagcatactttaatcccttctccatgactcggattgtattatggaacatcatttatctatcatacgtgatgttaattcttgactataaatcgctcaaagtaggagccatgtcttaatcacatttgatttcccacaggatctagcacagtatattgcaaatagcaagccttacttaataaatgctgaactaggctactgctcttgctaaatagccacagtttgttttacgttatgaattatgttgcatctctcccttcccttattatcacgctggctgctggtataacttttatgaatcataaaaaattaaataaccaggctttttaaaaaaatagatctaagttggccgggtacggtggctcaagcctgtaatccgagcactttgggaggccgaggcgggtgaatcacgaggtcaggagattgagaccatcctggctacacggtgaaaccctgtctctactaaaaatacaaaaaattagccgggtgtggtggcgggcgcctgtagtctcagctactcgggagacagaggcagaagaatggtgtgaacccaggaggtggagctttcagtgagctgagatcgcgccactgcactccagcctgggcaacagagcgagactccatctcaaaaaaaaaaaaaagatctaagttttattcactcatcaaatatatgagtgccagctaatgccaagcctaagcttggcttggagctaccagtaatgcaaaatgaatatgaatggatacttaaaagatcttatagcctagtagagagagataagatctttatgtgaattattctcatgaaagaaaagtgataattaggaatttagagaacaaagattagatagactttgaagattaaacagctcttctatgaagtacatgatggtggtgcataggtttggggtctataatttggctgaccaaagactcttgtttatttcctgattcttaagccacgtttcacgttgttgaggtgctgaataaattgacctgtggataagtgaagtatttgtaagtgaaattcctcaagaaattgaattttaaaaaaatattcaatagtgctgagaagtgatttttgaatgaacatgagaagtcaaactctagcatggtttacaaaggtcttttgtgacctgcaccagcttcttgtccatcatttctcatactcatctccaccatattgggcactccagccaaagcacatgtggctcttggaaatgtcatgcattttagctccataaattttgaaaaatcattgccatatataaaatttcctttaactctatcttctgctgaggtaatgagtatttgtcctttaacattccactaaagtattttctcccttgggaagtcttcctgaaactcatcccctcttatgtgctctctgtgcattttcctattagagtttgtatcatatttattttctttttgtatatttatctgttttccggactgatctaacaggtctctttcttggcagagcatacatttccagtgcctagcacagctcttggcacatagtagacatttataatttattctcaaaatgattgttgaacagttaaaaatgatatattacaatgccttgaaacttgtcatcaatttgccagttggggctgcgtattcttttacagatgtctgcctgtgctgtttggctattcatttatgtactattggaagagaaagcctgccaaatggggtgggtgtgtgcgcacatttggctgtcccagcagctgataccaaatgttggaaataactatttccatctgtcattttcatcccccccactctccttccactctaaaattaattatgttaggaatgatttcttacctccttagatatttatgtcagacaagggctcaagcaaaagatgtatacttcgtcattaaagtttcataataccttatgactccatggaattcttgtagctttcttttcacagctgggatatcttacatggcttgctaaattcttcagacttattctcattacatacttttcttccttgcaatacgctcattgtctttcacacatagtatattgacaagtgctacagaaaccatgacattctcatagcaatgcactgattcttagaatacacattgtttgttgttcagtgttaaattctatgtttgaaatctcaacctaggaacacactgtatcgtatcacattgttcttggttgcttcaacatctgggattagacctttttcagttgtatcatgttaaagttcctcattttagaattaaaaacatataatcttaggtttcattcgtaactgaattcttgcttcaaccaaatctatgttctaataccggggtccccaaccgccaggccacagaccagtaccggaactggtcttggctaggaacttggctgcacagtgagcattgctgcctgagctccgcctcctctcagatcagcgggggcattagattctcttaggagcgcaaaccctattgtgaactgtgcatgttagggatctaggttgtgcgctccttatgagaatctaatgcctggtgatcttctgaggtggaacggtttcaccccgaaaccatatcccaacacccctcagtctgtctgtggaaaaattgtcttccacaaaactggtccctggtgccaaaaaaggttgtgtagtgctgttccaatgaccgatcctgtttttgtgcatcattcatagtttttctttctaattttatatcctattatataggtttaggtgaagtctgctttctgccttaagcctactccatagtgggttttccaagtaaaggacagagtcatgtacttcaaagaggctgttcatgtatactatgaatttttgcagtctttactatttattgagtgactacttatttaagtatctttgttttcttagctctttgcacatgaacttgggtacaaatcagaaatttgctgtaattctaaagtgacagattagagggatcaggttagaagggcacagggagggaatatctaggaattatgaatgtcatgaccccaaataatgttctaatgctaaattgttttcttaagtggatagaaatgaaaattttataaaattctgtgctagttttgtttcttgaatttatcagtaaatttttatcattgaatatgttctcatttttttctactgcttctatctttaaaagaaagtgaagaattttatcagaccatggtttagggtagagcagtggcataataggattatgtatttctatgtatataattttgtcctattttttgaaattctaattgtttaaataattttagtatcattgtttgttcttttccttattttcctgtaattttttcttgtggatggtttagaatagttttatacctggtatgaaatataaaccacctgtagcaggcctaacacataatttcataaatgatcagatagagagatgccctggatttataatgtacaaggctcatcatcatattatgtgactaagttgtagcataacctcttctaaattattaaattatagaatatatcaccaaaagttgtgcatggaaagtaaaaattatggagtgtatcattgcttgaggcagggttagcaggtagggtgttgagattagaagtagacaactctcctagagaccaatgtcccagtccaagaaccattaagatgagccctggagctaccacttaatcattcctgggttgattttgatgagagacacaactcctttggtctttgtgtcttcatttattaaaatgataatcattaaggtttttctagtcctgagccttctgttattctgtctggagataagatatttaactgtctttttcatattttaggacccagatgatgtggtaccagttggccaaagaagagcctggtgttggtgcatgtgctttggactagcatttatgcttgcaggtgttattctaggaggagcatacttgtacaaatattttgcacttcaagtaagtggaaaaattattttgtgtctctgatttttttttttttttgcctctcccgatgtgcattacaaaattgtttacaacttgcgctaagcttgtactttttatctgtgaccttcagccagagtggtagttctattttaaagctgtgtttaaacatctctccatgatatgtttgctgagcccatcacacacagtcactaaaagcagagtaacttgaaatgttggtgactaagggatttatttaggtcattgggtgattttactaacctttattttcctactataattaagggttgagaggaatagtattatcaattgccagttgaataaatacatcagccacaaatgttttcatgttgataggccataacttgatagtcagcttggactcccctatggtcctgctgtacccttgggcccagaatacagtaagaccatgtctctgcttcttttccagtcatggtttcactaaagaactgggtgacttcagcagtgatattgaaataacataggatgaaagttgtttataactttgagtgtttaatagtaatcccagtgggttaagacaaaggtcttccttgtgattgattataatttacaatctattttgtaatatatttctcttggcaataatacacaatttttttttttaggagttttgaaggggaaattactttcaaggttttatgactacttcagctgtttcaaaatttggagaaacagttgacaactagacttattaaaataatttaactaattttgaaacattctcaatttcatgctcattttctgtgttgttcaagataatcaatcacatgttgatagacattaccaaaatactagtcatctttttaaatacagttttatttacaagaaatacatatagtatagaaaaaatcatcgcaattccattttccagagataacatttggtgcattaacttttttttttttcttgagacagagtttctctcttgttgcccagactggagtccaatggcgcgatctcggctcactgcaccctctgtctcccgggttcaggcaattctcctgcctcagcctcccaagtagctgagattacaggcacctgccaccactcctggctaatttttgtacttttagtagagacagggtttcatcatgttggccaggctggtctcaaactcctgacctcaggcgatccacccaccttggcctcccaaagtgctaggattacaggcgtgacacaccatgcctggccctgtgcattcacattttgtatacccttagtctttattgtgtgtgtagtgtgtgtagtgtgtgtgtgtgtgtgtgtgtgtgcgcgcgcgtgtgcgtgcgcgcacgtgtacatgtactgtgtgtttggctttttttgagatggggtctcactctgtcatccaggctggagtgcggtggtgcaatcacagctcactgtagcctcaacctcttgggctcaggcaatcctcccgcctcaacctccccaggagtagctaggactacaggtgcgtggcaccatacccagctaatttttttattttttgtggagacagggtctcaccatgttgcccaggctggtcttgaactcctgggctcaagcagtccatctgtctcaggcctcctccccacaaagtattaggattacaggcatgagttactgcacccgaccttatgtactgttttttctttttgtaaaagtgagacagtagcataaagatttgctgtaatctaatattttccactgaattgtgatataaagggaaaagtagaactacgtatatgcatatagaaatttcagaaaaattatcccttttttggctaataagaaaaaagtcatttaattagtagaccatatcaaaactttttaatatattctttcagaaaaacttgactagttttggaatgtattcttctataaaaactgcttacaggtagagtaggtctgttgtttctttatatttatttgttactggatagctaattatttttatgttctattttcacctaccaggaaaagtaaagggaaaaccagctgcctttcttctgaagctgttcttttacagtgcttcaaaacctgatcttaaagaatatgttaactctgtaattaaactgtctgacttgtcatctaaaagcaagagtttgcaagcaaaatgctatttagatagaggtggcagcttaagtaatgcttatttaaaaacctgtctcatgctgaattgctgaaatgagtctttaaactctctatagccagatgacgtgtactactgtggaataaagtacatcaaagatgatgtcatcttaaatgagccctctgcagatgccccagctgctctctaccagacaattgaagaaaatattaaaatctttgaagaagaagaagttgaatttatcagtgtgcctgtcccagagtttgcagatagtgatcctgccaacattgttcatgactttaacaaggtgagccaagtgtccagaattgtagaaagaatgcaggttctgtagtttatgctttttgtagttttaatttcaatatttgctaatttattatatttagagtttagtttaataaactgtcagcatttggtgggctctgctatgtctgaagcagaccctgctgatgcagccttctcatatcttatctctccttccccttgccttacctactcttaaagcccacctcatgactgttcctcctttgctggcaaactaatattttttatatgttcccacattttcttagataagaggtaatttatgttcctgtttcttggtagcattttcaaaatcaataattttgttaatctgtttttaagttctcattctatatttttccccagcttttgagcatttttatgtaatgcagaaaagttgaatacccaaaatcctccactttgttccaaatattgccatatttgcttcatctctttttctgtcatttgacataagtacttatgctattatctctcaagaatgagttgtcctcctacgtaaccacataattatcacatctaagaaaattaacatgatcttataggacagtagtccccccttatccgtgggggatacatgccaagacccccagtggatgtctgaaactgcatatagtaccaaaccctgtatatactatgttttttcctgttagtgtacatatatacatatgttaaaatttaatttacaaattagccacagtaatagattaacgacaataataataaaacagttataacaaaatactataataaaagttatgtgaaggtggtttctcaaaatattttattatgctgtactcacctaggtatttgtggactgtagttaactaaaggtaactgaaactcgagaagcacaacctcagataagagggactactgtatttaatatgtttacatttctgtttatgtttacatttccccaatttttgtcccaagaattttttgttttttcaaatcaggattcagagattcagaagttcatgtatcacctgtgatttttatgtctctctgtaagcttgccattttgaacactcgaatatattactgaagttagctttgcaaacatttcgtgcctgataaatacatctgatggatgtttataaaccagtttgaaaatttacttatttcaaggaaataaacttccaaagcaaatagtaaataataatagttaacacttactgagctcttaggaatcaaaatgttgacattatttgatttaagttattcttaaaaaccgttctatgagacagtctttctcaaccagcgtttctcatttgaaccacagaacacaaaatcatttaaatgactgtttttctaatgttctaaggatggtagtattcaagatacatatgagaaaatttaatctttacaaacaatggacagataaccttagagggcatttgagcttataagtggggaagttaaattgcttaattatataataagtatttgcagttaatttgaataggtattattacttattatagaaatataccctcgatgagcattttatttactggtagcaatattttttcctctcccattcccacttccaactttatccagccaaattctgaatttgttgaaatgcaagtgatttatacattctaaagccaattcattttaatgatacaaattattcttaaaaatccagttgctgcctgtttttgcaagtattactgtaactacactgtatctttttcttcccagaaacttacagcctatttagatcttaacctggataagtgctatgtgatccctctgaacacttccattgttatgccacccagaaacctactggagttacttattaacatcaaggtataagaatgttgactgtttttgatgaatgatgccttcatagtgttctggaattccctgttgagaaattagccctataggagcccattttatcagactgtagttaagaattttacaaagaggaactaatactcatggtttttgtttttaatgttttatatcttgaaattgaaataaatttctcaaataatgttttaagttttcctaaagagccagggagtaaatattagccaactacttaattctggtgccatagacaatacgtaaaacagatgaacatgactatattccaaaaaaaattctacttataaaaacaagccgggggcggtggctcatgcctgtaatcccaggactttgggagacctaggtgggaggattgcttgaggccaggaatttgagaccagcctggacaacatagtgagaacataaacaaacagatggtgggtagtagtttggcaacctgttccataccataatgtgtaagaattttgtcttgtttctctagtctactcagtgtatgttctgagatagtcatgtcatgtattcttttctgaatgtaggctggaacctatttgcctcagtcctatctgattcatgagcacatggttattactgatcgcattgaaaacattgatcacctgggtttctttatttatcgactgtgtcatgacaaggaaacttacaaactgcaacgcagagaaactattaaaggtaatactttttaaatattaaagtgttgggcagaaaagttcattgcattaaactagatttaggtgaagcctagtcattgttaccaatatacctgccatgagtgaggtaatattgtgtcgttatataatatttccaggtttctatagaattatcttaattccatttagtaagtccactcttttcaggtggagagaaaaggtcaatgtgaaatgtcattgccttgagatgatggtacctcattttccatctagttagtcaccctgtccaacttcccatcctaccactttggttgagccatactgaaagggtttttattatccagagggtgtcttgggaccagctcttcagctgtgttttcagggatctggattctaagcaggctgtttgccttttggatcatattgggaataatcactgtcagggtagttggaaaggaatttgggtgaagaactaagagcattgatacaactaatgttgtagctttgccaaatcatttaacttttattttctcacctgaaatataagaattacagtatctccccatttccttttaagagcattgtgaaaataaaaagaaagtacatgtggcagctgtggaaagtaagaagtgccattcagatacactgtggtgtgatttctttggaattgtgtcacccagtaaaagtgctttcctggctttttgctagcattttaaataatactgttctctcatctccggcggttgagtcatctgaaaccagcttgatttcttttttttttttttttccaacttttattttagattcaggggtacatgtgcaggtttgttacaaagggtatattatctgatgtgaggtttggggtacagatgatcccatcactcaggtagtgagcaaagtacccaataggtagtttttcttttcttttcttttttttattatactttaagttctgagttacatgtgtacaatatgcaggtttgttacataggtatacaggtgccatggtggtttgctgcacccatcaacctgtcaccaaattaggtatttctcctaatgttatccctcccctaggcccccacctcccgacaggccccagtgtgtgatgttcccctctctgtgtccatgtgttcttattgttcacctcccacttatgagtgagaagatgcagtgtttggttttctgatcttgtgatagtttgctgagaatgatggtttccagcttcatccacgtccctgcaaaggacatgaactcatccttttttatggctgcataaaattccatggtgcatatgtgccacattttcttaatccagtctatctttgatggacatttgggttggttccaagtttgctattgtgagtagtgccacagtaaacgtacatgtgcatgtgtctttatagcagcatgatttataatcctttgtgtatatgcccagtaatgggattgctgggtcaaatggtatttctggttctagatccttgaggaattgccacactctcttccacaatggttgaactaatttacactcccaccaacagtgtaaaagcgttccccaataggtagtttttcaacccttacctcctccctccctccctcccttccttatagtcctcagtatgtatcattcccatctttatgtcagtgagttcccagtgtttagctcctatttataagtgagagcattgtaaggtaggtatttggttttctgtttctgtgttaattcatttatgataatggcctccagctgtatccatactgctgcaaaggacatgatttcttttttattgctgtgttgatttcttacattttaaaattctcttggttcataattttttttaaagtcagccttacacgtgccatgaaatttaccctttttagtgtgcaactctgagtttccacaaagatacacaaggtcttgcaagcaccaccatagtcaagatacagaacattttcaataccttcaagttcatgaatttgtaagcagtctggatagcattattaatgttgctgtgatctgtcaagatattaatacttggttcagaaaagggagaaaaattacttttcttcagtgtaaacattcaaactgtagaagtttttgtggaatatagagtgaaatacttctatatgtctaaataataactataaaaatgatgtgaatatttattattaaagaatcaaaattttaaaaaacttttttccctctccaacaggtattcagaaacgtgaagccagcaattgtttcgcaattcggcattttgaaaacaaatttgccgtggaaactttaatttgttcttgaacagtcaagaaaaacattattgaggaaaattaatatcacagcataaccccaccctttacattttgtgcagtgattattttttaaagtcttctttcatgtaagtagcaaacagggctttactatcttttcatctcattaattcaattaaaaccattaccttaaaatttttttctttcgaagtgtggtgtcttttatatttgaattagtaactgtatgaagtcatagataatagtacatgtcaccttaggtagtaggaagaattacaatttctttaaatcatttatctggatttttatgttttattagcattttcaagaagacggattatctagagaataatcatatatatgcatacgtaaaaatggaccacagtgacttatttgtagttgttagttgccctgctacctagtttgttagtgcatttgagcacacattttaattttcctctaattaaaatgtgcagtattttcagtgtcaaatatatttaactatttagagaatgatttccacctttatgttttaatatcctaggcatctgctgtaataatattttagaaaatgtttggaatttaagaaataacttgtgttactaatttgtataacccatatctgtgcaatggaatataaatatcacaaagttgtttaactagactgcgtgttgtttttcccgtataataaaaccaaagaatagtttggttcttcaaatcttaagagaatccacataaaagaagaaactattttttaaaaattcacttctatatatacaatgagtaaaatcacagattttttctttaaataaaaataagtcattttaataactaaaccagattctttgtggatactattaaagtaacatttaagcctcaaccttg

SEQ ID NO: 61 - DNA, 159718 bp, Homo sapiens
atttaaatacgcggcgccggcgagtgcgtcgagctcgccgcggactcaagatggcggcgtgtggacgtgtacggaggatgttccgcttgtcggcggcgctgcatctgctgctgctattcgcggccggggccgagaaactccccggccagggcgtccacagccagggccagggtcccggggccaactttgtgtccttcgtagggcaggccggaggcggcggcccggcgggtcagcagctgccccagctgcctcagtcatcgcagcttcagcagcaacagcagcagcagcaacagcaacagcagcctcagccgccgcagccgcctttcccggcgggtgggcctccggcccggcggggaggagcgggggctggtgggggctggaagctggcggaggaagagtcctgcagggaggacgtgacccgcgtgtgccctaagcacacctggagcaacaacctggcggtgctcgagtgcctgcaggatgtgagggaggtgaggaggtgggacgaagccgggagggccaggcctggtgcgggcccgagggtgttgccggccttggaagccgctgacgccggtcggctgctttccttgcttcctctgtgctgcactcgctccttccctctttgctcctcactcccaggcgctttcagggaaaaggataccactcccactccttctttcccccgcccttatttccctccctgttgccggggtctgggacgaaaacctgggctcctggccgcaatccgccgaggcccagagcgtgtctgttcgctcctgtcttttgtgtgatgctctatgcagagtgtctcctcgccgaagatcagtttaggattttgccatcagtttcgactaggacaatttgtggcaagccatttaaacataaaaaaatgcctggcgtacttaggctgtaaagaatgatctgtttattagcagtagatgtaattcgcaaatccatatttttggtgctgaaattaatgtatgctttgttttcttcacttcctttggtcagttgtattgaaccccatgtttaagctgttaactcccagtgacttggcgccccaaagcttgaaaagttggggaagcgtttgaagctgtgtttgtgactgggttatgggatcttgcctttctgaggtctgaatgtgattttaacagtatctcttaatgaaatctacatttgtcgttgcttggtgtgattcagttgagtgacattgataatttataatcaagtgacattgataatttataatctaggtttaatgctgcagaccataatgacaattctcaaagtttgggagcaaatctgacagtagtaactttttccagaggtgtaggtatataaaattagccctaaaggtggacaaatagaatgaagctaccacttgatactgtttttggttttttttttaaatatcagatttgtttaaggcgttcaagctatagcaagaccacttgcttgtagaaatttgcttctcttggcatttccccccttcatctcgtgttctagtattctatacaaaagcaattcagatagaggaaaagacatacataagcaggagacagaaagaaaggaagtttccagagcccctagaaatgtgaggccttacctgacttctcatcttcagcttaacgactagagggatagtcctctggtagatacagctaatattcctaactctgtcgaactttttggaattttcttttcgctctttgaggacacataatagatgtcgtttcatcaaactaggatcctaatactggtgaccaaacaattagtagtagtttgtggtagaaacagcacattattagggaaagtggcaaaaagtggcctattcaaggagtgtatatatccttcatgtgtattccggacatttggaaacctccacttaaaggaggcagttttatgctccagaggaggaaaggcgtcatataaattggaaatgggggttttggggggttggggggaggtggagggaccaaatttccaatttaatgttttttcctccagtttttacatacagaaataatgaaggaagagtactgtgaacacctatgtgtattcttcaggaggtggagttatttttaaacttcttttcttttttttgagatggagtctcactctgtcgccaggctggagtgcagtggcttgaacttggctcactgcaacctccacctcccggctttaagcaattctgcctcagccacctgagtacctgggactacaggcgagcgccaccacgcccagctaatttttgtatttttagtagagacagggtttcaccatgttggccaggatggtctcgatctcctgaccttgtgatctgccagcctcgggctcccaaagtgctgagattagtggtgtgagccaccacccccaccctattttctttttctttaaagacagcgaaaggaaatttcattctgcttagtctgggagttaattaaatctgatctatgtgtttgaaagagcataacttaaagaagtaaactagttaggcacatttgaagaaacatgtatagaatatgttttgtatttgctgttcagtaagtagaactatttgatagtgaaatagatatatgtacttttctgtccctttgcatgcaaatgcagggaacattttcctatccgtacccattattggaattatgaaaaggcagagcatatgagtacagttgttccttggtatcactggaggatggttccaggcctcctgcagatattgaaatccaaggacgctcaagtaccttataccgtataaaatggtgtcgtatttccatatcatctgtgcacacccttccgaattcttgtcttctctaaaatacttgtgatacctagtacagtgcctacatatcagttcattcatgtggattcactgtagtacttggcatatgtcaaacttaacttttgctttttggaaccttatggaacttttctttctgaaaaaaaattttttattatggagacagggtctcgctctgtcatccaggctggagtgcagtggtgcagtcatagctcactgcagcctcagtcttctgggtttgagagttcactgaagcctccacattccgggttcaagtgatcttcccagctgggctttccaaagtgctgggattagagttgtgagccactgtgcctggccttgggattctttttttttttttttaacgctctcggatgagtcatgcttttaaaaaggccaagtatatcatgggtccactatgaaataatagatgtaatagccagtaatggtgtgttagtagtcctagttgtgtgtgtataattattagtagttcaagttatttaaataaaaacaaaaaattagaaagtgtaaggcagaaaagaaaaaatattccctgggctgttctagtaggtggagtaataataccaaagaaagagaagatactgttgcttagtatgtgataaggaaggcatgcttgatgttgtcagtcattttaaaatactttacttattcttggttgaaatggccagtagcactttttttttttccactagtgtcttgtatttcgaagtttcagatggagaccttggttccttagaagtttgtggtgttcagccgggcgcagtggctcacacttgaaatcctagccctttgggaggctgaggcaggaggattgcttgagctaggagttcagtaccagcctggcaacatagtgagacaccgtctctaataaaaagtttgtgatgttcatagattagattttcttttttttttttttttgagacggagtcttattctgttgccaggctggagtgcagtggtgtgatctcggctcactgcaacctctgactccctggttcaagcagttcttctgcctcagcgtcccaagtagctgggattacaggcacgcaccacctcgcccagctaatttttgtatttttagtagagacagagtttcaccatgttggccaggatagtcttgatctcctgacctcatgatctgcccaccttggtctcccaaagtgctgggattacagtcatgagctattgcgcctggctgctgctgctgctgctgctgttgttgttgttgttgttgtttgagacgaagtcttgccctgttgctcaggctggagtgcagtggcacaatcttggctcactgcaacctctgccttctgggttcaagtgattctcctgtctcagcctcttcatcaccttggccaggctggtcttgaactcctcaccttaggtgatctgcctgcgtcggcctcccaaactgctggattacaggcatgagccattgtgcgtgccccatagattttcttacacagaagtagagagaatagggtaatgagtccctgggtatacatcacccagcttcaactgttcccacccttttttttttttgagagacagagtctcactctgtcacccaggctggagtgcaggggcacgatcttggctcactgcaacctcagcctcccgagttcaagcgattttcctgcttcagcctcccaagtagctgggactacaggcatccgccaccacacccggctaatttttgtattttttagtagagacagggtttcactatattggccaggctagtctcgaactcctgacctcgtgatctgcccgcctcggcctcccaaagtgctgggattacaggcgtgagtcaccgcgcccagccccgcccttttatttttagggcacagggttgggaggctggcatatttaaaagcaaatcccagatactgtcatttcaaatacttcaagcatgtctgtgataaatactttttaaaaactagaaggttttttttgtttgtttttgtatttaaatgtataatctttcttttgcaagtaattctgacactaaaaagaaaaacataaaaaaattctttcttgccaccttttcttgatatatcagtctcagattataaatttgtagccatgctctaagctttgcacagagtgaatgctttgtaaatatttaaataaactaatttaggtattgaacaggaattaacatttcagtgttgcaaaccataaacccccttttagactcataggtaaatatttttatactctgcttttaacctttcacttaactgtatacttgagatagtggactacaccatctctattgtctcactgttgataatgactatcattatcaatgataatgataatgaggtgctagtgctagtgctagtgttattcttttagcagagaaataggctcaaagagctaaagtaagttgtctgatgttatatcctaagtggtagagctggtgttcaggaagtcctttttgacttaaaagaccatactctttctaatgtaccatgggtggttgtagctaaggacattagtctgtgactgttgagaatgccataggtttataaatgtatgctaaatgggacacaagaacaactgagttgtaacagtgcattgaagtatttgtagatttctcaggcaaatgcgttatcacccaacgctaatttaattagtctgagtgcatcataaaccgaatttctgctttatgaaaagagtttcaaatcccaactcaccttaagcaggatttgtactagaacactggaagcatttagttgtatttccttgatatttatattgaatccatggaacatcacaaaaagtgaactgagactagagctgtcagtgccattaactaacaaatgactgtaagcattttctctctctgcttcctgatgtgttaaatgagtagttggggtatacttttttttttttttaattttaagagagacaaggtcttgccgggttgcccaggttggtctctaactcctgagctcaaccgacccaccctcctctgcctcccggatgctgaggttacaggcggagccaccacaccctgcccctacagtacggtttctaagatctctgctgtctaacttatatgagtcgtttcctgtatatattctctgggtatgtatatattgtaaagtttctaggattatatatgtaccagttcctgattccatattcattcatggagggaatcagtgacaatgaataattcaaacagcaattaatccaaacattgtttggctttaggatatattatgattgttttgtttgagccaatatggaatttcctcctatgctgtctgtctggttggaagcaatctaaccacataatcaagtcattattgatcttctattatacacctatcattgtggaaggacactagtactttaagacaccaccattgcttacagttggtttgataagtgagattgttgtgatcgagaagcgattatataagagtgttaatcacttgatgtcatacagatagtaaattattttagggcagtgtaataagacaaaattaggatttagatttgggtggaacacagctctgctattcttagcttgaaatttctgtcactgtttttttttgtttttttttttttttttttttttgaggtggaatctttctcagtcgcccagattggagtgcaatggcgtattcttggctcactgcaacctctgcctcctgggttcaagtgatttttctgcctcagcctcccgagtagctgggactgcagacatgcgctaccacacccggctaatttttgtatttttagtaaaacgggggtttcgccacactggccaggctggtcttgaacctctgacctcaagtgatctgcctgtcttggcctcccaaagtgctaggattacaggtgtaaaccagtgcacccggcctcttttcttaagcaaggactgtctactttagctttgtccttgttcttttttttctttgaaagtcttactctatctcccaggctggctggagtgcagtggcatgatcatggctcactgcaacctcaaactcctgggctcaagctctcctcccacttcagcctcccgagtagctgggactataggtacacaacaccacttagccttgttctaagcggaaatatacgtgaactcatgaatttgatgtggtaggtatacttctctaatatatatgaaactaaatatatgactataaaatataagtaccaacacataccacctgaaatcatcttgcatattaccaatagcacatgcttcagaaagcactaacactggattatctttctctgttgtttttttgttttgttttgcttttggttaagacggagtctcgcactgtcacccaggctggagtgcagtggcgcgatctcacctcactgcaacctttgtctcctgtattcaagcgattctcctggctccacctctctagtagcagggattacaggcaccagccaccatgcctggctaattttttttttgttttttttttgagacagagtctagctctgtcacccaggctggagtgcagtggcgcgatctcggctcactgcaagctctacctcccgggttcacgccattctcctgcctcagcctcccgagtagctgggactacaggcgcccaccaccatgcccggctaattttttgcatttttagtagagacggggtttcaccatgttggccaggatggtctcgatctcctgacctcgtgatctgcccacctcggcctccgaaagtgctgagatgacaggcgtgagccactgtgtccggccgaggcttggctaatttttgtatttttagtagagacgggttttcaccatgttggccaggctggtcttgaactcctgacctcaggtaatcccacccgccttggcctcccaaagtggtgggattacaggcgtgagccaccgctcctggccttggattatctcttaagattcttccagctccggtgctttgtgattttgtgatctgtgggaatacaaaacgtgtgcaagagagtcgtagcacaggtggaaaggggagatgctttggggaattattaaaggggctgtattgaccgaaatagagaacttgaaaatgttttcagtccaggtcatgaagggtcgtatattcacctctagctggttctccaagtaaagtccagaaatgggatgtttttatccctacctcagataaaaatattacagcagataattgagaattacctgtaaagtagcattgtcgtttatggcaaatactttttaagaaatctcttgatgagaatgctttacagtatatagttgcttaataattcattgttctgtagaaggaaataaaatacttgaacagtccaaaagatgaaatgctgtatttctcttttgtgcatttctcctaatgtgttcaaaacaaatttactcaggaacaataacaaaaatctcctctttatataagttatatatatatatatttatatatttgttgttgttgttttgaggtggagtttcgctcttgctcaggctggagtgaagtggaatgatctcgactcactgcaacctccacctctcgggttcaagccattctcctgcctcagcctcccgagtagctgggattataggcacttgccagcacacccggctaatttttgtagagacgaggtttcaccatgttgaccagggtggtctcaaactcctgacctcaggcaatccacccacctcagtctcccaaagtgttgggattacagacgtgagccaccgcgcccggccttatttatatatttttaaaagcagcagttaaaatggcttataggctatcatgtaaattaatttttcttctttcttttttctttttttttttgagatggagtctcattctgtcaccaagctagagtgcagtggcgcgatctcggctcactgcaacctccacctcctgggttcaagtgattctccttcctcagcctcccgagtagctgggactacaggcgcccgccaccacgcccggctaattttttgtatttttagtagagacggggtttcaccatgttggccaggatggtcttgatctcttgacctcgtgatccgcccgccttggcctcccaaagtgctgggattacaggcgtgagccaccgcgcccgaccaatttttcttctttcagcaaacatttattgaaacctgtgtgcaagacactgctcagtgttcaagtatactactgctacttataatggttagcatttactgagggttttctgtgtgccctgttctgagggactggatgctttctaggcgttatctcatttaatcttatgagagatgttttattattatcattcttattgattttgtttgtttgattttgttttcgagacagagtcttgctcttgacgcccaggctggagtgcagtggtgtgatctcagctcactgtaatctctggctcccgggttcaagcgattctcctgcctcagcctcatgagtagctaggactacaggtacacaccaccatgtccagcttttttttttttttttttgaggcagtctcactttgtcacccaggctggagtgcagtggtgcgatctcagctcactgcaagctccacctcccgggttcacgccattctcctgcttcagcctcccgagtagctgggactacaggcgcccgccaccatgcccggctaattttttgtattttttagtagagatgggatttcactgtgttagtcaggatggtctcaatctcctgacctcgttatccgccagcttcggcctcccaaagtgttgggattacaggcgtgagccactgcgcccggctaatttttgtttttttagtagaggcaggatttcgccatgttggctatgctggtcttgaactcctgacctcaggtgatctgcttgcaccaccatctatcaccggagctttttttttcttttttctttctttttttttttttttgagatggagtctcactctgtcatccaggctggagggcagtggcatgatgtcagctcactgcaacctcagcctccctggttcaagcgattctcctgcctcagcctcctgagtagctgggactataggcgcaccccaccacgcccaggtaatttttgtatttttactagagacggggtttcgccatgttggacatgctggtcttgatctcttgacctggtgatcctcccgcctcggcctcccaaagtgctgggattacaggcgtgagccactgtgcctggtgagttttgttttgggttttttttttgtttgtttgagacgaggtctcactctcttgcccaggctgcagtgcagtggcatgatcatgattcactgcagcctctgcctcccgagcacgagtgatcatcccacctcagcctcctgagtatctcctccttagtagtaaccatactcggttaattttaaaagttgtttttttttgtagagatgaggtctcactctgttgtccaggctggtctccaactcctgagttcaagcagtcctcctgccttggcctcccagagtgctggaattataggcatgtgccactgtacccagcctattacatcctattatttttagtgagaaaactgattctaaatagcttgcctcagggcttgtaagtagtggaatcaagatttgaaaacaagtcagtccagctgtgtgatagctcattttcccccctgtccctaaagcataagtaacctaggactgcactgtctactgtggtagtcatcagccacgtgcagctagtgaacagttgaaacatggcctgtttgaattgagatgtgctgtaagtataaaatacacatttgattttgaagatttagtaccaaaaggatgcataatatcacaataattttttttttgaggtggagtctcttgtggcccaggctggagtgcaatggcacgatcttggctcactgcaacctctgcctcccgagttcaagcaattctcctgcctcagcttcccgagtagctgggtttacaggcacacgccaccacttctggctaatttttgtatttttagtagagaaggggtttgaccatgttggccaggcttgtctcgaactgctgacctcaggtgatccacctgccttagccccccaaagtgctgggattacaggcattagcaaccacgcccagcccacaataaattttttttctttttttgagacagagtctcgctctgttgcccaggctggagggcagtggcatgatctcaaaatgtgtacactttgaaggggtaaatcctctgggtaaaggaattaagttctgccaaatttggaatactgcctatcaaaggaaaactccactttcacgtataaggggcaacctctgcctctcaggttcgagcaattctcctgcctcagcctcccgagtggctgcgactatgggcatgtggcaccatggctggcaaattttatatttttaatagagatggggtttcgccatgttggccaggctgatctcgaactcctgacctcaggtgatccacccgccttggcctcccaaagtgctgggattacaagcgtgagccactgtacctggcccaataatttttatattgtttatgtcttaaaaaaaatttcgatatattgggttaaataataaattacaaaatcaattttactttttaaaaataaatgactactagaaaacataaaattatgtatgtgtctcacatacttatgaatagcactgatctagaagaaaaagatatctttactgaaaaccataatacaagttttaaagtaataagtgtcataagagaagaataaattaaatgctgtaggcgtacagtacaggaaatggttgggagaatcagaaaaaaaagcccttcagtactttcttttttgagacggagtcttgctctgtcgcccaggcgggagtgcagtggcgcgatcttggctcactgcaagctctgcctcctgggttcatgccattctcctgcctcagcctccagagtagctgggactacaggcgcccgccaccacgaccggctaattttttgtatgtttagtagagaccaggtttcaacgtgttagccaggatggtctcgatctcctgaccttgtgatctgcctgcctcggcctcccaaagtgctgggattacaggcgtgagccaccacacccagagcccttcagtacttttaattcttcttaaattggtggttcatgttaattaaattattattatttttttttgagacggattcttgctctgttgcccaggctagattgcagtggcgcgatctccgctcactgcaagctccgcctcccgggttcatgccgttctcctgcctcagcctcctgagtagctgggactacaggcgtctgccaccacgccgagctaattttttgtatttttagtagagacgaggtttcactgtgttagccaggatggtcttgatctcctgacctcgtgatctgcccacctctgcctcccaaagtgttgggattacaggcgtgagccaccgcgccggccttaaatcaacatggtttgatttgataggcagtattccaaatttggcagaacttaattcctttacccagaggatttaccccttcaaagtgtacacattttgagatcgtgccactgccctccagcctgggcaacagagtgagagtctgtctcaaaaacaaaacaaaacaaaagcctcctaatcttgttcatgagtagatttcatcttccgaatgcctaatttatgagttgtaaggggtgctttagctccttccacttgagaacaatactctgataaaactggaggtcagttagtgactcatcttattttggttgccttagatagatttgaaacttaagaaaagatcctaagtgatggtcctcagaactgtgccagtactaccctttgtatctgcattaaaatagagtgtgaaggaacaaggagtgtggactggaatctaaaaacaatgacttaagagaaccaggcatctgtagtcattcagctttaataattttactgaaatcagaaagttttgtttgactgaatgtgtgatatttacaggacctgtacattttcctattaaaggcttgaataacacctataattcttgatagggtgaatcatattaaaaatgggtgctgacttgaatcctggatctatacacttgtaaaataaaacaaattcttaaaataattttgtgtttctttaaaaaataaatgtgataggctgggcgcagtggctcacacctgtaatcctagcactttgggaggctgaggtgggcagatcacctgaggtcaggggttcgagaccagcctagctaacatgtcgaaatcccgtctctcctaccaataaaaaaattagccagacatggtggcgcatgcctgtaaccccagctactcaggagggtgaggcaggagaattgcttgaacctgggaggcggaggttgcagtgagccaagatcgtgccattgcactctagcctgggcaacagtgagactctgtctcaaaaaaatgacaacaagaaaaaaataaaaatgttatacttatttaaaatcataagaatgataaacaatgaagtgaaatggtagatgagtaaaattaaccaggagaataggaatgtaagttctacatcaattgaaatacaagttttaaacaaatgacagcaaaagaaattatgttaaaaatgctctggtacctggccaggtgtggtggctcacacctgtaatcccagcactttgcgaggccgaggcgggcagatcacctgaggtcaggagtttgagaccagcctggccaacgtggtgaaaccctgtctctactaaaaatacaaaaattagccaggcatggtcacacatgcctgtaatcccagctactcaggaggctgaggcaggagaatcgcttgaacctgggaggtggaggttgcagtgagcggagatcgcgttattgcactccagcctgggtgacaagagtgaaattctgtctccaaaaaaaaaaaaaaaaaaaagctctggtacttcacttgtaatttaggtgtaaactataaagactgccctgcaagtcatttaacagaactctcaaaattcttgcactggccatatcagctctgtaatgtgataaatagcatgaagtggacagtaacttcaacgatgcagaaaggggtgtaatggagaattttaatcattgacaaacgtaatgccatctgttaattagtgccattgtctgagtccattttgtgttgctataacagaatacccaagactgggtaatatataaaggaatatttatttggctcatggttctggaggttgggaagtccaagattgagaggccatatctggtgagggccagcttgctgcatcatcccatggcagaatgtggaagggcaagagaatgcaagagggagggcgggcttgcacaaggaatgtgcagaactcatccttttatcagaaccccactcccaggatcacggagataagggcattaatccattcatgagaccagtgctctcatgacctagtgagctcttaaaggtcccatctctcaacacttgtattggggattaagtttccaacacatgaactttgggggacatattcaaacgatagcagccatttgctgaggacacacctattatatatgaaataaaataagaagagagaaggtcctatagtcatgtgaagcttgtgatgagaggaaaagcattgtggtaaatggaaaaatagaatgggctttggagctgcagtcctggattcaaaccctagctcacttaccagttattatgatgttgggcaaattaatctctcagacctccagttttcttatttataaatggtcttccctttcccctttgttgttataggtgagatcattcgagataatgctttttgttcgctgccttaagagaagtgtgaaataaactggaatgcttcacaccctttatataatccttccagagcttcttccataaagctttggaataaggtcaagaacatttatataaacagtccgggtgcagtggctctcagcacttggggaggccaaggcgggtggatcacctgatgtcaggaattcaagaacagcctgggcaacatgggggaaaccctgtctctactaaaaatacaaaaatcagcaaggtgtggtggcatgtgcctataatcccagctactcaggaggctgaggcaggagaatcgcttgaacccaggaggtggagtttgcagtgagccaagatcgctctattgcactccaacctggatgacagagcaagactccatctcaatcaatcaatcaatcagtgaataaattacagaaggccaggcacagtggcccacagcccagcactttaggcggccaaggtggcagattgcataagccagaggtttgagaccagtttggcaatacggtgagagcccaactctacatacatacatatatgcatggtatttaaatgtgtacactatgaaggggtaaatcctctgggtaaaggaattatgttctgccaaatttggaatactgcctatcaaaggaaaactctgctcccacgtataaggggaaaaagaatagttcagaagactgctttttttccctgtataaaaccagataaattcaaaaattactgaaatttttctgaaagatggtgacttttcagagggaaaataatatgtaaggccttttgctctcatatttcccaggttggaacatttctctggcctgtgaaacagtctgtgatactaagatataaatactaaacttagccatacgttaaggacagcgcaaaaaatttttggtttgtaagtcttctttttttttcgagacagagtcttgctctgtctcccaggctggagtgcagtggtgcgatttcggctcactgcaagctccgcctcccgggttcaggccattctcctgcctcagcctcccacgtagctgggactacgggcacccgccaccacgcagagctatttttttgtatttttagtagagatgggatttcaccgtgttagccaggatggtttcgatctcctgaccttgtgatccacctgcctcagcctcccaaagtgctgggattacaggcgtgagccaccgtgccaggcctttattttttttttttgagatggagtcttgctttgtcacccaggctggagtgcagtggcacgatgttggctcacggcagcctccgcctcccgggttcaagtgattcttctgcgtcagcctcctgagtagctgggactacaggtgcatgccaagacacccagctaatttttgtatttttagtagagacggggtttcaccgtgttggctaggctggtctcaaactcctgacctcgtgatccgcccaccttggcctcccaaagtgctgggattacaggtgtgagccacggcatccggccctgtaagtcttctttcagaagtaactaggcagcagagttttgaaatagttgaaaatccacaacttcattttcatatttttatattttaattttttttttttttaacaagaaaggccctcctttgacacaatttcattttaaaactctgagtttggtaggtttgttagaacctgacttatgtgtattgatagcagcttttagtgtgtctggtggtggtgatgctttcctttttttttttcttttttttttttttttgagacagtttcactcttgttgcccaggctggagtacagtggtgtgatcacggctcactgcagcctctgcctcccaggttcaagtgattctcctgcctcagcctcctgagtagctgggattacaagcatgtggtgtcaccacgcccggctaatttctttttttttttttttttttggagacggagtctcactcagttgcccaggctggagtgcagtggtgtaatctcggctcactggaagctccgcctcctggattcacgccattctcctgcctcagccttctgagtagctgggactacaggcgcccgccactacgcctggctatttttttttgtatttttagtagagacggggtttctccatgttggtcaggctggtctcgaactcctgacttcaggtgatccgcctgcttcggcctcccagagtgctgggattacaggcgtgagccatggcacctggcctgaaacttcttataatggtaaaaaaagaaaaattatcggctaggcacggtggctcacgcttgtaatcccagtattttgggaggccgaggtgggcggatcacgagatcaggagatcaagaccatcctggctaacatggtgaaatcctgtctctactaaaaaatacaaaaaacttaggtgggtgtggtggcgtgcgcctgtagtccctactacttggaaggctgaggcaggagaatggcatgaaccctggaggcggagcttgcagagatcgtgtcactgcactccatccagcctgggctacagagctagactccatctcaaaaaaacaacaacaacaacaaaagtgaagtttcaagaatttgtactatcggtatatttttattatttatttatttatttatgaaacagaatctcactctgtcacctaggctggagtgcattggctggatttcagctcactgcaacctctgcttcccgtgttcaagcaattctcctgcctcagcctcctgagcagctgggaccacaggcgtgtaccaccgtgctcggccaagaatttttactattggtatactttccttttcaacttgagagtatatgtgaaataggagaaattagagcactgaaagcagaagtcagaagacattgttgtgtttcccttcctcttgtggaaattcccattctttagcccagattctcagcctgcttgcctctgcttcgcactggctccatacacatcttgctgccccacacccgcaaataaatagtgtagtggtgtgggcttttggagagtacagagttacagcttcagagtttacagggcttatatgtaagtgttatttttgggaaaatattttatatcagtggtttgggaatttgctgcaccaaaatatttcccagtgcccttccctcagcacagcccgctgcttctcttcccctgccagctaggtctgctttaggcattgttttcttccttcatttttgttagattgaatgaactataagaaattaccaatatttcatcatatttgacttataaaaacattttcatatggtttaacataattgttctttttttttttttgagacagagagtttcactctttcacccaggctggagtgcagtggcgcaatcttggctcactgcaacctctgcctcctgggttcaagtgattctcctgcctcagcctctcgagtagctgggattacaggtgcacgccaccacgcccgtctaattttttgttgttgttgttgttctttttgtagagacggggtttcaccatgttggccaggctggtctcgaactcctgacttgaagttatccacccccctcagcctcccaaagtgctggcattacaagcatgagccaccatgcccggccactcaccaaatacatttgatttaaaaaaaaaaaaggatattggtctaacaaccttttccctatttgattattcttagtcaagttgctatttagctttcagtttatggaacccttttaatcttatttgtagctcttgataaccatgtgtggtagatatgacagatatgagacttattttacaggtgaaaaaccacgaatcagatagatttttatttgcccaagtcacataatgttaagaacaggccaagtgtggtggctcatgtctgtaatccgagcactttgggaggctaaggcgggtggatttcctgagcctaggagtttgagatcagcctgggcaacatggcgaaacctcatctctacaaaacatacaaaaattagtcagtgtggtggtgagagcctgtagtcctggctacttgtgaggctgaggtgggagcatcacctgagcctgggaagtcgaggctgcagtggcaacagaatgggtaacctggacatcagagtgagaccctgtctcaaaaaaaaagaaagaaagaaacagagcttaaattcaaatccaaaaagcttaaattcaaatcttttaaaattcaaagcctctgtctttccatgttaccacattgcttctctgttatttttcacatttacatagataacatattttcatgctattttttttatatttttatgcccctaccatttttatttaaatccatcaacaaatatttgatcacatactatttgcccactatttcttcagacagtttttttgtccctctttctctcctgggctctaatcttatgtaggttaaattgattgctattgtcccacaagtgggctctgtttttaatccccccaccaacgctccccctgttttttttctctctgtgtttcattttggataattgctattgctgatcttcaggttcactgatgttttcttttgtagttttcagtcagctattaataccatccagtgaatttgtattttaagtatatttcacctatagacgtttgatttgggtgttttatttatatattcgattatccattatgttcatgtttttctttacaccctttagtgtacttgcaatagctgtttttttcttttttgaagcggagtctcactgtgtcgccaggctggagtgcagtggtgtagtctcagctcactgcaacctccgcctcccaggttcaagtgattctcctgcctcagcctccggactacaggcacgtgccacaatgcccagctaatttttgtatttttagtggagacggggtttcactgtgttggccaggatggtcttgatctcttgacctcgtgatcgcccacttcggcctcccgaaatgctgggattacaggcgtgagccaccgtgcccagccgtaatagctgtttgaggtcctcatgtgctaattccatcatgtctgtcatttcttgatctttttctattgattaagttttgttattagtcatattcctgctttacaagtgtggtaattgtttattagattcaaggggatccctccacaaatctcctgtgaccattctcagtacagaactctttattctcactctttcttggttccactattcaaatctttcaaattctagctgctttagataccctaaagtttaatttctctcctcttttcagcaagactatccaattctgtttgggttccctctccctgtgttgcagccgggaagccacttccatacagtaagctaggtaatcatcggctcacctggtttgttgccttctctcagggatcatagttaatgctgcctgttgtccagtgactgaaggttacgtcatatattgtgtctcgttcacaatgggagtaagggagatagtttccatagtagttaatcctcatgagtggaagtagaaatcattacttcttggattttaacttctgacatattaaatgtgggaaggaatggggagaatttgttagaaagagagattaatgaggccaggtgcggtggctcacgcctataatctcagcactttggtaggctgaggcaggcagatcacctgaggtcaggagttgagaccagactgacgaacatggtgaaaccccatctctactgataatacaaaaattagcagggtgtggtggtgggaggctgtaatcccagctacttggtaggctgaggcagaattgcttgaacccaggaagtggaggttgcagttagctgagatcacgccactgcactctagcctgggcaacaatagcgagactacatttcaaaaaaaaaaaaattagaattacaaatgtgtgtgtattttgatccaaagttctgactttattaaaacaaaaaaattagccaggcgtggtggcaggctcctgtagtcccagctgctctggaggctgaggtgagaggattgtttgagctgaggagattgaggctgcagtgagttatgattgtgccactgcactccagcttgggtgacagagcgagaccctgtctcaaaaaaaaaattatctttccattgcccaatggaaaaatatttaagcatgatataatttcattgtgtgtcaaggtggtcaacttgtcttgtaattgagttgagctaataataagccctttaccagtgtacaagataaaagatttcctttcagttcatgtgctaattaggacaaaactaacttccataaaaaacccaaaaatatcagtggttgaacacaagagaagttgtgggggactgtgatgcagtcatctggtgatccagagacccaggttccttttatcttgtggttccattcgtttcctagggccttgcctttgtttttgtttttgtttttttccttatcagctctttctaactcattgagatgaaattcacttaccataggattcaccctgtttaccacctgttcttgttttttttttttttttccgatacagagtcttgctctgttgtccaggctagagtgcagtggtgtgatctcggctcactacagcctttgcctcccgagttcaagcagttctcctgcttcggccccccaagtagctgggattacaggcacccgccactacacctggctaatttttgtattttcagtaggaacagggttttatcataatggccaggctggtcttgaactcctgacctcaagtggtctacccaccttggcctcccaaagtgttgagattacaggcatgagccacctcatccggccaaatcttactttagataactaaactttatttgtcataattttacttagaggccttttttttttttttttttgagacggagtctcaggctctgtcacccaggctggagtacagtagcgtgatcttggctcactgcaagctctgcctcctgagttcacgccattctcctgcctcagcctcctgagtagctgggactacaggcgcacactaccatgcccggctaattttttttgtagttttagtacagacgaggtttcaccctgttagccaggatggtctcaatctcatgacctcatgatccgcccatctcagcttcccaaagtgctgggattataggcgtgagccaccaggcccggcctcttttttgtttttttgagacagagtctcgctctgttgcccaggctgcagtgcactgctgtaatctcagatcactgcagcctccacctcctgggttcaagtgattctcgtgcctcagtctcccgagtagctgggactacaggtgtgtgccaccacgcccaggtaattttttgtatttttagtagagatggggtttcaccatgttggccagaccagtcttgaactcctgagctcaggtgatctgcctgccttggccttccacagtgctgggattacagacatgagtcactcactgtgcctggtcaattttacttagagtttttgaatctgcgatttaaagatagggttttaaaaattttttttatttcaatagatttttggggaacatgtggtgtttggttacatgaataagttctttctttagtggtgatttctgagattttggtccacccattactcgagcattgtacactgtacccagtgtgtaggggtttttttgttgtttgtttgtttttacaagtctcgctctgtcgccaggctggagtgcagtggcacaatctcagctcactgcaacctctgcctcccagattcaatagattctcctgcctcagcctcccaagtagctgggactacaggcgcgcaccaccacacccagctaatttttgtatttttagtagagatggggtttcatcatgttggccagggtagtctcgatctcttgaccttgtgaccacccgcctcagcctcccgaagtgctgggattacaggtgtgagccaccgtgcccagcccccagtgtgtggtttttttattcctcaaccgcttcccaccctctaccccaagtccccagagttcattatatcattcttatgcctttgcctcttcatagcttacttagctccctaggatttaaggataggtttctaaagtgaaactgaaactaattggtaagagtgttataaataatattaatcatgctttgtaagaaagataccctaagagatggtttataaatgtattgctaacaaaacttcgttaattaatgttaggcatttatgatgcaattaatagtaacatttccaagttcatattattgtctgcaaggagaataaaggagagtcaaagaaaacagtcaatgtttttcgaagccgtgcatggctagtgggaagggtcctgagcagctggcattactgttcttgtcaaagctggctgtctattgaaatgtctatattaacttagttttgttttcgggggaactaggaggtctataaacattcttgggtaggagaatgtcatgatgaaatagttaaggaaattactcggggcactatgaattgaagtgaggaaaattgaaggcgctgagaaagctgctgttacaatgagacctcaaaacagacttgggccaaaggagactagtagcaaaggagatagaagtgggattgatggggacttcttacctaggaaaaatttacagtgcttttgttcattcgtttgacaaattttgggtaaatattatttactgtgtgccagcaccttaattgtaggtgctgggaatgtggtgatgatgataccctcagctcccccttctaaaagacatggtcgagtggaggacgtagccatggtgagagctttgaaagagagatgcttggacattggctaattggagtctggatatgtctccctgagaagatgatgattgagctgaaggaatgatagaatttaaccaagtgaagagaagtcaaagtttaggctgggtgccgtggcttactcctgtaatcccagcactttgggaggctgaggccggtggatcacttgaggtcaggagttcaagaccagcctggccaacatggtgaaaccctgcctctgctaaaaatgtcataattagccaggtgtggtggcgtgcgcctgtaatcccagctactagggagttgaggcatgagaattgcttgaacccgggagatggaggttgcagtgagccaagatcacgctattgcactccagcttgggggacaagagcgaaactctgcgcccaaccccccaaaaaagtcaaagtttaactgttacactacctccaaaaatatgtaatttgtgctgaatttgaaatgacagctaggcatttcaggcagtttccagtaagaggatataaacttggaactaactcttgaactgagtctaaattttagagtcatcctgcttataaggctatagttggggctatgaaaatggccaagccctcttaaagaatgtgtaaatagaagactatgattccaaggactgagccctggggacagcttgcgatgaagggttggaaagaggcttgtggagggaattataggtaacaggaggagtggttgggagttacaagaagatttacaggagtttagttgtggaagccaaggaaagggaaattttagttgtgagagtcaagaaaagagaaatttaaaaggtagtaaacccttgggtaactagagtagcacagctaaagttaatgactgagaaaagagcatggtttctggtaaaagagatagaataccttctatagaacccagatttttattttattttattttattttattttattttattttattttatttatttttttgagaaggagtctcactcttgtcacccaggctggagtgcagtggcgcgatctcggctcactgtcaagctccacctcccgggttcacaccattctcctgcctcagcctcccaagtagctgggactataggcgcccgccaccacgcccggctaatttttgtatttttagtagagacagggtttcactgtgttagccaggatggtcttgatctcctgacctcgtgatccgcctgccttggcctcccaaagtgctgggattacaggcgtgagcccccacgcccggcagaacccagattttgaccgaaaagtttgatagtgaagagaaggtgagactatctaaaagggaggacattcctgttaacaaagatctttcaggattaaggaaatcccagcaccttgggatgttgaggcaggcagatcacctgaggtcaggagttcaagaccagcctgaccaacgtgatgaaaccccatctctactaaaaatacaaaattagctgggcatggtggcgcatgcctaaaatcccagctacttgggaggctgaggcaggagaatcacttgaacctgggaggcagaggttgcagtgagctgagattgccccattgcactccaccctgggcaataagagcggaagtctgtctcaaaaaacaaacaaaaaaacagattatggagatctatttttttatttattaaaatatttttcaccccaatcttactatctaggaaaatctgttttaaaggcaaagaaacagggaaccagtagagagggtgagagattggaaatgctggagaggaagagggtgcatgtaaaatgctacgcaagagaggaaggaggagagggttcaagccaatgtggtgtcacagaacatgatttgtactttgaatttgtttttgttttgttttgttttgtttttttgagacggagtctcaccgtcgcctgggctggagtgcagtaacgctatctcgactcactgtgacctctgcctcccaggttcaagcgattgtcctgcctcagcctcccgagtagctgggattacaggcgcccgccaccaagcccagctaattttttgtatttttagtacagacggggtttcaccatgttggccaggctggtctcgaactcctgacctcaggtgatctgcctgcctcaacatcccgaggtgctggggtttccttaatcttgaaagatctttgttaacaggagtgtcctcccttttagatagtctcagcctcccaaagtgctggtattacaggcatgaagcacctcctggccttttttttttttttttttaaatcttacattgaatctccataatcattaaataacaacttcccattccagagtccctggcaaccaccattctattttttatctctgtgaatttgactactctaggtattccatgtaagtggaatcgtgatatttgtccttttatgtctggcttatttcacttttaatgtcttgaaggttcatccatgttgcggcatgtgtatcagaatttccttcctttttaaaggtgaataacattccattatacgtatacactgcattttgtttatctgttcatctgttaatggacacttgaattgcttctaccttttggcttttgtgaataatgctgctgtgaatgtgggtatacaaatatctctttgagaccctgtgttcacttttttttggtatatacccagtagtggaattactaggtcatatggcaattctatttttaagtttttgaggttagggcatactgtttttcacagcagctgcatcatattatattcccaccaacagttcagagagttctaatttcttcacatcctcaccaacacttattttctgtttgtttgtttttgagacgtagtctcgctctgttgcccaggctggagtgcaacggtgcactaattttttgtatttttagtagagatggagtttcaccatgttggtcaggctggtctcaaattcctgacctcaggtgatccttgcccacttattaatcaggctgtttgtattttgttgttgagttgtaagagtttattatatattctgaatattaacctctcatcagatagatgacctgcaaatattttcttccttttcataggttgccttttcactctattgatttggtcgtcttcaactttgatgtagtttactttatcattttcttttgttgtctgtgcttttagtgtcatagccaataaattattgcaaattcaatgtcatgaagcttttctcctatgcttgcttcacagtatattgtagttttagatcttacatttaggcctttgatccattttgagttaatttaaaaaaaatttttctttttgaaatagggtctctctctgtttcctatgctggagtgtaatggcgtgaatatggcttactgcagccttgacctcctgggcccaagcactcttcccatcttggtctcctgagtagcagggacgacaggcagatgctaccaggcttggtttttttgtttggtttttttttagttttttttgtagagatgggggttgtgccatgttgctcaggctggtctcaaactcctgggctcaagcaatcctcccacctcagcctcccaaagtgctgggattacaggtataaaccactgcacaggcgtaaaatttggttttttgatttagcatcttttatacctgataaatagcctttaggatttaggcctgtgttttaaaaaatggtgcaacatgagattcagctcttctggaaaagttatcctaaggttttttgtttgtttttttgagacggagtctcactctgtcacccagcctggagtgcagtggcaggatcttggctcactgcaacctctgcctcccaggttcaagcgattctcctgcctcagcctccagagtagctgggactacaggcacgtgccaccacgcccagctaatttttgtatttttagtagagacggggtttcaccatgttggccaggatggtctctatctcttgaccttgtgatccacctgccttcgcctcccaaagtgctgggattacaggcgtgagccactgtgcgtggccatgctaaggtcttcatatgaagatctcttgagggttttttgttttgttttgttttttgtttttgagactgagtcttgctgtcacccatgctggagtgcagtggcccaatctcagctcattgcaacctccgcctccctggttcaagccattctcctgcctcagcctccctagtagctgggactacaggtgtgtgccactacacctggctaacttttgtatttttagtagtgatggggttttgccatgttggccaggctggtctcgaactcctgacctcaggtgatccacccacttcggcctcccaaagtgctgggattacagacgtgagccactgcgcctggccaagggttttttgtttgtttgttttgagacaagttctcattttgtcacccagcctggagtgcactggcacaatcacggctcactgcagcctttacctcccaaggctcaggtgatcctcctgtctcagcctccaccaccccaggagctgggactacaggcgcatgccaccacacctggctaatttttgtgtttttagtagagatggggtctcaccatgttgcccaggctgttttttttgttgttgttgtttgtatttttaagagacagggtcttgctgtgtctcccaggctggagtgcagtggcgcgatcatagctcactacagcctggaactcctgggttgagttttaaaaacaacttatgaatttaacttctcagcttgtgtacgttattgcaactcagcattcctagggcaaacctgaaccttgttgttcaggattccaacccattcatatggatcaataagagctggctcttaataaatgcagacataaatgcagaattctcaggacacatttacctattttcatcttgttaaagattacttaaatgccttgtgagaccatgtcattttggagaaaaagttatttcaaaaaccttatcctaaatcttgttttcacagaatgacttatgatactgcatgttaattgtattggggaagattttaaaaaaccacagaatcaatatatctacatcagatagctttttttgtgtgtgcattcagccttcagaacatactcctatactctaaggaggcctgtgttctggcaggcacatggatttaatctcttcgtctccctttaaaccaagtaatgcatcttcatagttttaagtcagagcgctatcaggttgataatgaaggactacagtcagtcttagttctctgcaatttcaactgttttagctctttactcttatttacctaatttttaaatagaatgtgtaagctgttctcttgatttttttaaaaaaattagacattatccgttgacttattacaagcaacatttagtcttcataaaacacacttgacagagtttactctgaaattgaacttcataaagtaagacatcctacaaagctagaggataaaatggactgtgcggtgccacaaagagtatttggacaaggcagtagctgcaggagatggcattagttggctgagttctacaaaaagcttttatctactttaatgagatcaattttcgtccatttccttcttgtttcagtcttattcatcagtcatgagtcatcacatactcataataaacagtttttcaaaaagagatcaaatgtattgcaacttaggtctaattaaacaaaaacaaacaaaatacctcagacaaccaaaattgtgtcttactcattcttttagttttaacagagaacaaggagcaaatccaaatgattgctgttagaatgggttttgtttttgagagacaaggtctttctctactgtccaggctggtcttgaactcctggcctcaagtaatcctcctaccttggcctcccagagtgctgggattacaggcatgagccactgcacacttttaatcccagcactttgggaggccaaggtggaagaatcacttgagctcaggaatttgagatcagcccaagtaacatactgaaacctcatctctacaaaaaataaaaataaaattaaccggtcatggtggctggtagtgcctgtggtcccagttactcaggaggctgaagcaggattgcttgagctcaagagatcaagcttgcagtgaaccatgatgatgccactaccctccatcctgggtgacagaatgagacaatgtctccaaaaaaataaaaataaaaagaatgttttcgtgtgaagtcagaatacttaccccttcctgttttatagtttttcattattgtatttgggattcttttttttttttttttgagatggagtttcactcttgtttctcagggtggagtgcaatggtgccattgctgttcactgcactttctgcctcctgagttcaagcgattctcctgtctcagcctcccgagtagctgggattacaggtgcctgccaccacacctggcttattattgtatttttagtagagatggggtttcaccatgttgaccagcctgatctcgaactcctgaccttgggtgatccacccgccgtggcctcccaaagtgctgggattacaggcaggagccaccacacccagtcctcaatgtctattttttaaaataagtgggcttacacctgtatttgcagcactttgggaggccaaggtgggaggatctcttgagcccaggagtttgagaccagcctaggcaacatggagagactcctgtttctaccagaaaattaaaaacaattagccaggcatggtggcatgcacctatggtgctagttgcctggaaggctgaggcaagaggattgtttgagcccaagaagttgaggctgcagtgagctatgttcatgccactgggagactgacagagtgacattcaccctgcctctaaaaaaaaaaaaaaaaaattaggagtggttagaatttatatgcagggtacatggtttcttccaagaggtaaaaataaaaatatttcttcagctactcaattcagtatctcattcatgagtaaagaaagtatactcaaagattatatttaaaatgaaaacaataaaaattttttcttcagcaggcttcattatttttttgtttagcaatttttgtaccttaaaaaagaatagatttgttctctaatttctccagcaaccttattttatgaagcactcatttatgccccatttatatctcagaccagaggtgggcaaactgtagtccaagggacagatccagccccacaacctgttttagtatggctctggagttaagaatggtttttataattttaaaaggttattaaggggatgccatagagaccacaagagattgtatgtgttctgcaaagcctaaaataagtatggtatgcctctttactgaaaaaatttgctgacacgtgtcttagactataatatataatgtacatgcaactcatttaaaatggtctatgatccatccaaatcatggtgtcattttaagttagaaaaatgtttggctgtattctctttatatgtcttgcatttttatagaaattcacggaatttgtcagtctttaatagttggtgtggagttttattaaccagggccaaatgtgtatgtatgacaccacagacttaaaatagtttgaactttttttttttttgagaaggagtctcgctctgtcgcgcagactggagtgcagtggtgctatctcagctcaccgccgccttcacctcccgggttcaagcagttctgcctcagcctcctgagtagctgggattacaggcaacctctaccatgcctggctaatttttgtatgtttagtagagacagggtttcaccacattggccagactggtgtcaaactcttgacctcaggtgatctgccaccttggcctcccaaagtgctgggattactggcgtgaaccaccgcgcctggctagtttggaattttgagagagagagagagagcatgagagcacactgtgcttgtatgcttactgttggttgtatatggtttcgtgatactgcttttttgttggtgatgaatttgaatatattgccacttctctatgaaatcaatattttctcattgatatctatatttacagcataaaaataaagagcgagctactgcggaagctgaggcaggagaattgcttgaatccgggaggcagaggttgcagtgagctgagattgtgccactgcactccagcctgggcgacagagggagactctgtctcaaaaaaacaaacaaacaaaaacagagcgagagatctttgaggctgtattttggtgttacagttggttgtatgtttggtttggttgagttctaatattggtagttagcttccagcaaaagtcctctggttacctggtcataatattttgttatttgtgatgtcttattgattctaaaacatgctgttaatttttcatcttaacatctttgaaatcagaatgcatcttaaattttatgacatcatatgattggtagaatatttctcccctagtggtacgtaaagtaatggtgcatctcaaaatcagtgtgtgattcagacagtttactcatttgtattaactgttaggtgcagtgtttttttgttctttttttcagatggagtctcgctctgtggcctaggctggagtgcagtggtgtgatctcagctcactacagcctctgcctcccaggttcaagtaattccctgcctcagcctcctgagtagctgggattacaggcacccaccatcatgcccagctaatttttgtatttttaatagaggtgagatttcaccatcttgagcaggctggtcttgaactcttgacctcgtgatccgccccccccccccccccggcctcccaaagtgctaggattacaggcgtgatccactgcacccggcttcttgttctttatatggattcctcctgtctctctctctctctgtcttttttttttttttttttttttttttttttgagacagagtcttgctctcttacccaggctggagtgcagtggtgcaatctaggctcactgcaacctccacctcccgagttcaagagattcttgtgtctcagcctttcaagcaactgggactacaggtgtgcaccaccatgctcagctaattttttgtgtttttagtagaaatggcattttaccgtgttggccaggttggtctcaaactcctggcctcaaatgatcctccctcctcagcctcccgaagtgctggggttacaggcgtgagccactgcactgacctagattctacctcttttttattttgattttgttgccaaaatttattattttggaaatctttcatcattcaaaggcttgctttgggggttaattctgatatttgcattttgagttagatgataagcaccatccttcatagctagtcaacagagcagtttaggaaaatgaacagttaacatagtcagttttgagtaatgcagtatccctatctgttactgttaacagatggcctgcagtctggtcttttatattagataatattttgctgaatataccgtagaagaacattaaccagaaaacctgtttagcgttagctttagctgagattttcttggatgcttgcaactgtgaacaccctctgaatttaaatagtcatatcctgttgatgggaaataattagaaattacatagtaattgttttttccacttcatcttcaccaaaggctgagaagcttagtgttctttagacctttagtatctttaggctgagctactttgtattacagagataataagtgtatgtgtgtatgtgtgcgcgtgcacacgcatgttgcttacttccgtggagaatcatgagtcagtagcttaaaaagaggcaagacagcctgggcaacatggagaagtcatgcctctacaaaaaattagtggggtgtagtggtgtgcgcctgtaatcccagctacttgggaggctgagctgggagaatcactttcgcctgggaggcagaggttgcagtgagccgagattgcgtcactgcactccagtctgggtgacagagtgagaccccgtttaaaaaaaaaaaaaagacgctagataggctgggccaggtggctcacacatgtaatcccagctctttgggaggccagggtgggaaaatcacttgaacccaggagggctaattagccaggctcagtagtgtgcgactgtagtcccagctactggggaagctgagcccaggaggtcgagcctgggcaacagggtgagaccctgtctctatttaaaaaaaaaaaaaaaaaaaaaaaggcaagataaataaaaggggaaggaagatgaggattcatgccagctttagatatataagtataagttttaaaatttaagtcagtggttcctaaccctagttatatctagggtgatttttaatatagtaatacccagatgtttcaggcaaattaaatcagaatgtctgagagtggatactggcatcaaattttcagaatcctttaagatacgattattattgtacttaaaaagcaatttttaaaaaaaatatatttacccagatatttagcactttcttttctccctgtatcttcttgcatctctcatctgcctacaatacattcttcagaacttcttgtagtaaagatcttctgagggccaactgtcagggtttttttgtctagaaatatcttcattctaccctattcttaaaagatatttttgctgggcttatgtgtcaattatctatttctgggtctgaggatatgtgaaaaaccaaagagtttttcctactatctactctcaatatagtcactcaacacttctggcaccagatgtatggatttttttacccccaccaacaaccaattctgcagataattctgcagtgtatacccactgagtgtcctctaattcagctcaatccttgacactatatacctggaaatagcatcagatcccacaggttgagagctcattcccataagacagcccgtcacttcagatgccagtttcaaacacaggtttgacctgtgcttctgaccaacctgctataaattgggcttcccacaggcaccaccccctcccacccctcactatccttgggttcagtgaatttgctagagcaggtcacagaactcaagggaacacttctatttacaagtattttaaggaatattatgaaggacacagatgaacagccagttggaagaggtgcatagggcgaggtatgggagaaggggcaaggagcttctatgccctctccaggcaggccactctccaggaacctgtgtccagttatctggaagacctcagaacccagtcctttggggtgttttgtgtttttttttttttgtttgttttttttttgagacagagtctcactctgtttcccaggctggagggcagtggtgcgatctcggctcacactgcaacctccgcctcccaagttcaagtgactctcctgcctcagccttgcgagtagctgggattacaggtgggtgtcaccatgcccagctaaattttatatctttggtagagacggggtttcactgtgttggccaggcttgtcttgaactcctgacctcaggtgatccacccatttcggcctccccaagtgctgggattacaggtgcgagccaccgtgcccagcccctttggggtttttatggagtcttcattacttaggcatcattgccctttggtgatcaacttaaccttcagcccctttcccctccctggagattgggggtgggcctgaaagtcccaaccctccaatcatgccttggtttttccagtgactagccccatcctaaattagctttttaagcgccaccaccacccccaacaccaccattcaattcattcagtagcatgcaaaagacagttatctcttctgagactccaaggcttttagttagatctgtgcgtcaggaaacaggcacagagaccaagtatctattccacagtatcacatgctgggaacacaccaccccaaacttcttttgcattttattgttagttactttcattttgttttctaatctttttagtatttttatttttattttttgagacagggtctctgtcacccaggcttcagtgcagtggtgcagtcacacctcgatcttctgggcttaggctatcttcccacatcagcctcccaaatagctgggaccacaggcgtgcaccactgtgcccggctaatttttttttttttttcctttttgagatggagccttgctctgttgcccaggctggagtgcggtggctgtatctcagctctctgcagcctctgcctcctgggtacgagcgattctcttgcctcagtctcctgaaagtagctggcacctggctaattttattattatttataaagacaaggtctctgaatgttgcccagtctggtctctagcttctgggctcaagtgatcttcccacctcagttgcccaaaacatggattacttgcgtgagcctctgtacccggtcccaaacttaatgactcaagaacaacaactacatatttgcccctgaatctgtgggtcagatttttgggcagtactcaatgggatcccttatctctctggtatacatggttatagttgggctcattcatgtatctgtagtcacttggcaggtcagctgtgggttggacagacccagatggcctcacttacatgtctggtagtttgttgggtgaaaaaagcaactgggctccatgtctcatcatctagcttgctgtctcactccttcacatggctgggtccaaaaatcaatacggaaaggacaagctccagtgtacaagcacttttcagtcctctgatgtcacatttgctaatgttttactgaccaaagcaggtcaggtagccatgcccagattcaaaaggttaaagtgccaagtgaggtgtggttaaaaaaaaaaaaagaccaaaaaaacacaaagagtgaaggaattataatccatctgttttttgaggggccagcgggtggtaggcggacagggtcttatgctgtcatccaagctggaatgcagtggcatgattgtagcttgctgtagcctcaaactcctgggctcaacccattctcccacttcagccttccaagtggctgtgtctgtaggcgtgtgccaccacacctggctgattttttatagagacagggtcccactatgttgaccaagctggtctcaaactcctgatctcaagtgatgctcctgccctggcgtcccaaagtgttgtgattacagatgagagccactgtgcctggcctgactccatctgttgatggcatgagcaacaatgtcacattcaaagggctgtgctttcagaaaggggggcaggtgggatttgtggccttgaaaaaatccatcacagtatagaattttaggttggaatatatttttctttcagtgcatttttttttattccactgtcttttggctttcatttttgctattgagcagtttattcctatagcttcttttaagattttctgaggctgagaaatgcttcacaattattatgtgaattaaaagataaatgtaaagagacaaatacctggtagtttgctggtaccagtagagagacaaatagctggtggttttatgatgtttttgcaccaaagtttattagacagctggagaaatggtgaagtcaggtgtgtgtacaaaagcacctagaaggaaataggtgatgtagaagtgaaaatattcattggatttattattctgattgatttttattaatataaaaatgaaaatattttgtaattatggagcaaaaaccatttgtcttttcaataaaattatgagccatcaaaaaatttcaaaactattgttttttttttttctttccttttcttttttttgagacggggtttgctgtgttgcccaaactggtctcaaactcctgggctcaagcgatccactggcctcagcctcccaaaatgctggaattacaggtgtgagccattgcgcccggccaaaaccgttgcttttttttttttttctttttttttttttgagttggagtttcaatctgtcgcccaggctagggtgcagtggcgtgatcttggctcgctggaactctgttccccaggttcaagtgattctcctgcttcagcctcccatgtagctggaattacaggtgagccccaccatgcccagctaattttttgtatttttagtagagatgcggtttcaccatgttggccaggctggtcttgagctcctgacctcaggtgatccacccatctcggcctcccaaagtgctgggattacaagtgtgagccactgtgcatggcactattgcattttgatgatacaagtgcaaatatgagaactagaaataatgataagctagactctgttagagatgtatttgaaactggaatcagtatttacgaggtggatgtgttccaggtttgtgaatgacagttgataagcagctggcattgttcagttcaggtatatataccttcaaacccaaggaaacatagaataaatacttgggtttactgtgtttaaatgtctattaaagtttctttgcctttctgctgattatcgtttatgatgtcttgtttcagaaaggatttttatttgcttatgctagggaattctgaccactccattctaagaccatcttacatcattctcacagttcgaggttttctgaaacacccatacagtacaaatctgtgctcagatctgtggaaaggctggtttacttctgattcacccttgtcttaagggtgtagccttttgagatgccagctttaagtgaggactatctcattagatttcctaccttgggcaggccttgggcttggtttctgcccacacggcccttcagtcattttgatgggtttagcaagtgccttcaaggcagaagtgagcttttgagctctcctgtgttcttgggtatgtacccccttttccttcagttctggcttgacagtaatttacggtatttttagctctttattgcttttaagaagatttttgttttccaacacttttagttgtttatagttaaagggttgttctaaataaccacttccagaagcagataactgcacttatttttaagcttttctgttactttgcatgtgcacctgatttaagatactattggttaagcactttgcaaatagaaaatatacgtacaggccaggcgcagtggctcatgcctgtaatcccagcactttgggaggccgaggtgggcggatcacctgatatcaggagttctagaccagcctggccaacatggtgaaaccccgtctctactaaaaacataaaaattagccaggcgtggtggtgtgcaactgtaatcacagctactcaggaggctgaggcaggagaatcgcttgaacccgggaggcggaggttccagtgagccgagatcatgccattgcactccagcctgggcgaaagagcaagagtccgtctcaaaaaaaaaaaaaaaaagcagtaaaattattctgatacttctttctgctttatcagagtgagatttaagtaaaaagttcatgttcctcactatatcagttaggagttatgattcttttatagtaataggaagtcctttccaaactagcttcaggtaaaaagagaatttgcctcatataactgtaaagacaaggtttagcacaggcttcaggcttagataggtattgatacttggcatcttagcaggactgacttctcttaccatctgcttctgggctggcttctttcacagtctccacgttgtggcaaggtggccaaagtagcttttattcctgttcctccatgtgtcccagcattattgcaaatgttgtattgtttgtcattgtctgagtccctgaaccagttaggaatgttatgtgcatagtcttggattatgtggactcatttgctctatctgtgtcaggaatgaggcccgacctggagcactcagactgagattgacagagttgggtgaatccccaaaagaaagccaggaggctagagaagcagacaatgaaagtgcaccatatggccgggcgcggtggctcacgcctgtaatcccagcactttgggaggccgaggcgggtggatcatgaggtcaggagatcgagaccatcctggctaacaaggtgaaaccccgtctctactaaaaatacaaaaaattagccgggcgcggtggcgggcgcctgtagtcccagctactcgggaggctgaggcaggagaatggcgtgaacccgggaagcggagcttgcagtgagccgagattgcgccactgcagtccgcagtccgacctgggcgacagagcgagactccgtctcaaaaaaaaaaaaaaaaaaaaaaaaagaaagtgcaccatatatagtaaggtttcagcacaggaagcagtgatttttatcttttggagttttacttctgacgtgacccaaatgaagaatagtcctgtgtcctaggaaaccccaatgttttgtatttgcttctatcattagaataaagagatacctgtcaatttctcatttcaaattctaaagcgctggcattacaaatttcagtgaaactattgtgagccaggccagagctgagggacgtgttacaacattggtaattgaacttaactctgttcctcctaccaacaaaacaaaagaaacagctaactcctctctctgtctgtctctctctctctctctctgtctctctctccccgctccctacaccccccacacacaacacacacacacacaattacatgtaatcatgtaattttattcaagattttctcctatagaaaattcaaaaatgctagattttaggagacccattaagcggcctgaaaggttttcttagattctttttctgggcaaagacaattttctttttcttagcttcctatagttttgcaacatcttaaacattttctcctctgatatctatattctttgcgtgactatatatacttttcattcacatcttagcaatatgtgttaggtttaaaataattaatgtttaaatatttctgttgtttatttaaagtttcctgcagggtattattttcctggtgtggagaataaattgtggtggaaaaaaatttgttgtatcttctacttcccatcagatatttattatgcactttctccattctgagttctagggttgggaatggtcttgactctgtaatgctactaaaattatacttttgaaagtataagaataataatctaatagtatgactaaaggatataaaaggcaaattacaacagaataggcatggaggggaaaaaaagagacctgctcagaggttaactcttcgagagaatgaagacggtagtctggattaaagtcatgacagaaggaaaagagattgactaaatctaaacaacattggaaaaagatgacaatggagagctctttaaaggattaaaatatgagacatacaggagaaaaattaaagataaaccaaaagtttcactgggtatgtgggggttactccctgtgggaacgatgaagccgtggtagaaagaactggcttggggacaaaaataaattctgttaaataaataaatagaaaagacaaatgtcctgtagagaagaatcacaaataatttatgtagatactttccctgtccaggaggtgggcctctgcatttctttcttgatgatgggctgagcttggtgaattgcttccaaagagtagcctatgggaaggtggaaagggaatcattttacagtggagaaaccttggccaagtgatcaaagttgacgttatgagtgaggtggtgtttgtagcatgtatgcctttgatgcgattgttgagaatggcactttacctatatggtctttctccaaaaagcctataacccatgaggaaaacgtcacacaaacccaaattgagggacgttctacaaaatacctgacgaggtttcctcaaaacagtcaagatcatcagaacaaggagcctaagaaggcatggtgactaaatcctggatgggatcctgtaacaaagacggaacgttagaaaacactgctttaagcaaaaccaaacctaaaccaaactttttagtttggtttgtattaggcagtgttctccagagacatagaaccaataaggtgtgttaaaagaaaaacttcagacaaatttaacagaatttaattgtgcaaagaataatttgcgaatcaggcagcctctcgaaccaggaaaggttgagaactactctggtgctggtgtatggttggagaggatttatggacagaaaaaggaaagtgacatacaggaaaggaagtgaggtacagaaactgcaggattggttacagctgggcctttggcttatctgaacacagtttaagcagttggcggtctatgagtgaagtatggctgctgtgattggcggagactgagttacttgttacaggagtaggttgcagtttgttttctcttctagtcaggttacagttccctatgtactgagaaatctttaggcccgaacttaaaatatgtaagaaggcagctttaggctaactttaacaattcccctctttggtcaacctctcagttttgttttgttattgttgttgtttttgagatggagtggctctgttgcctagactggggtgtagtcataaaatctcggttcactgcaacttctgccccctgggttcaagtgattctcatgtctcagcctcccaagtacctgggattataggcgtgtgctactgcacctgtctaatttttatatttttagtagagacagatttcaccatgttggtcttgaactcctgacatccagtgatttgctcatctcagcctcccaaagtgttgggattacaggcatgagccaccccatctggcctcaattttgtattgtttgtcaattttgagaggttgacaaaactttaggcatccataaatgtacttatttgatctcaaatccaactgggaggtaacaaaactggcttttgcaaggtggggaacaaggacttcaggttagttttctgtagggattagagcaggggcaacctccttatgctgggatctcttgtttttaggaaaggaataaaaaacctgggctgtttgggatctttctgcttccttaaagtttcaatttgatgatgttgcatttagcatgagtgacttcatttaggtttgatctggtctagcctattgatgcctagtgaataagcttaatccaaaacagtgggctctcacaattttgtttaacagcttcgcctttttggtcaggttctcacttgggtgtgagtgttactgaaacttagggctttagtgctactcagttaccatccttttgggtttccagtcctagcactttattcataggttttggtgtcctcatgatcatgcatgtctttgagtgtttatcattcctgctgaagagagaccatttgaacttacatagatggctgcatgcaaacatttataacttttgagagaatataatgcagcagggagactgctattatgactgttaggaggataatactaagagtttggagtatgctccttagccagagttcgcatgaaccaaaccaactaaaatcaaatagatcaaagaatgagcaagataaacaatctactcatttcaaccaagcagccagttcattaatcccctacaactgaatctctgtaatatccagtatattcatccacgtgcaacaagaggtgtcagcaaggcctggtatgatggctcacacctgttaatcccagcattttggaaggccgaagcgggaggatccctgaggccaggagttcaagacagcgtaggcaacatagcaagaccctgtctctacagaaaatacaaaaattagccgggcctcgtggcacatgctggtagttccactactcaggaggctgggtgggaggatcacttgagcccagaaggttgaggctaaatgagtcatgattgagccactgcagtccggcctgggtgacagagcaaaaacctgtctcaaagaataaaaataaaagtgtcagcaacttcacagatacttccctgattagccagtaggcaaccttgagcaattctgttatccagtagacctttagcaagataatttaaagaagtctgttttgtaaccatagcctttgcagtagaatctgctatggagcatatcatgaggaacaaatttcttttttttttctttttctttcttttttttttttttgagacagggtctcactctgttgcgcaggctggagaatagtggcgtgatctcggctccctgcaacctctgcctcctgggttcaagcagttctcccacctcagcctcgcaaatagctgggactacaggcacacgccaccacgccccgctaatttttgtgtttctgctagagacagagttcccattttgaccaggctggtcttgaactcctgacctcaagtgatctgcccacctcagcctcccaaagtgcttggattacaggcatgagccactgcgtccagcccatgagggacaaatttctagacactgtatcgtttactccaaactctggaaaaagtgacctaacaatgaaggccattcagaatgatgaaggcttccaagcactagtgttctttttcacctctgatgtaggttaaaaggagtggaccagtgttctctttctgacagaaccattaaaattcctaacccacattggactgtcatctttcatccattaagacataatgctgcctatggataaggttggctgtaaaagttttcacaaataaaagtgtgccccattggtgcaccataagaccccttttctgttgttcatagaggcataaacaaggaaaacattgagaggtaagagtctcatgatgacagagaagttttgatccatgcttttgggaaagctgtccatgtctagggtgccatctgcttctgggggaaaaccttttctaactggttagctttacgttaagatttccaatgggtgtacaattccaagtctggaggggccctcctgcattgtgatatcaattgacccagtgtttgaggccccagagttttgcttcattgtgggtaacaagggcagtgttttcctgacgtcatttccagaagaaccaacctccaggttctagattgtgaaggatttgaatgtcctcagtgggtgggtcatgaaaagcttcctttactgccagcacggtagctcatgcctgtaatctctacactttgggaggccgaggtgggcgaatcactggaggtcaggtctctggaacccaggagttcaagaccagcctgaccaacatggtgaaaccccatctctactaaaaatacaaaaattagctgggtgtggtggcgcatgcctgtaatcccagctgcttgggaggctgaggcacaagaattgcttgaacccgggaggtggaggttgcagagagctgagatcacaccactgctctccagcctgggcaacagagtgagaccatctacagaaaataaaaaaaagaaaagcttcctttagctggtgaaaatacactttggtataatgcattaaaggcttgcagcatttattcatatcagagtttgggagaggaagatacatgaggttctattattagtggcataggccttccagtgactatttcataatgagtcaacttatattttctactggaagcagatgaggttgtcatcaatctgcaatacctttgaccaaggcaaccagtcaattcagttagcttcacctaaagctgttgtgtctgtaataccttacttaactgtttacaacttgtccagtgaaacaagtaccactatcactggagatttctccaggaatgccccgtgagggaaacacattttctgacaaccttttagctactgttatagcatcagccttcttgcatgagaaagcttttaccagaaaacgtgttgaaaatgacagttgaatgaaattcctctataagtgttccaatgacccatcaggtagctgaagttttaattatcttcccaggttgtaggtttgataagccaaaccttggtcataaaccatttttagcgatttagagcagtcaccacaccaatgtatatgttttctatttggatcattttctgtcttccatgatgagtcatggagtgcagagcttttaataatggaagatttacggattcaggaaggaccaggtggctgtgcaggatctctgtgattccatgcttaacattgcatttatagcctgttaaataccaattttgtatctccaattcaggtgcatagcactgttcattaaatgggttatcataggtaatttgacttggaacatagagttcattcaagttgcatatcttaacagttttagtactggctgatttagcatgaaaatctggcagagtatttttcttagtattcagttaatttttgtcctgcttgggttagcagttttataaaccagtctctttattaaagttctgggaattcttacccagtccaaattagatgagcctaaagttatcagaaacttgtattcagtagtgcttattagggtcctttccattactttccatgaacgttcttgaagacataatgctctaggattttacttggttgtaaagagcttaaagaaaatgcatccgtataaagcaattaactgtggaaacaaaatgatcatggttaaagacataattgacaagaaaatttggttgtggtcatgaagggtgtgagggtgcaggcctaggtgccaatattgggggcagggacctcagccttctgaggctactcacaggcatgctgccccccatgcccagctctgacaccagcaggaggaaggtgctggctgctgcaggatcctggcttgctgcctgttggccccgatcctgccccatccctccagctgggcacccccaggtgctgccatgcaaccaagcaggactgtgcaggactgcgcaggactgcgtggtgccagactatatctcttctaaaaattcattcaatttgaaataacctttaaataactttttttctcagcaaacacatatttttatgcctttatagctttccttacaaaaacatatcttactttctttacatattctatatacagaattgcttctctctttccttccttctttccctcccttcctcccttctttttttctttcgagatgggattgctgtgttgcccagtctggtctcaatcaaactcctggcttccagagatcctcctgcctcagcctccaagtagctggggttacaggcctaagccaccatgcccagctcaggtttaatttttcttacaattagttgcttaagctttgccttttataaagagtttttagggctaggcgcagtggctcatgcctgtaatcccagcactttggtaggctgaggcaggcagatcacctgaggtcagttcaaggccatcctggccaacatgctgaaacccatctctacaaaaatacaaaaattagctaggcttgatggcagtcaagttactagttactgcgggggcaggggggcggcggggggaggctgaggtggcagaatcgcttgaacctggaagacggaggttgcagtgagctgagatcgtgccattgcactccagcctgggcgacagagtgagactccgtctcaaaaaaaaaaaaaaaaaaagacaaaaactgaggtcccaattcaaagcagttaggaggaaatcccccctttctttgattctggagtcctgggggagcttcagcctttttgttctattcagaccttcaactgatggaatgggacccacccacattgggaaggacagtctgctttgctagtctgcctgtccaagtgctaatctcatccaaaaacagcaccgtagacccacccagaacaatgtttggcgaaacgcgtgtggcccagtgaagttgacacaaaaaattaaccatcatcctcataaaatacctagtacaatctgaataaaatgtgtaccattgttggttctttagttgtgacagattgcactatataaagtaagctattaacaataggggaaaatgagaaggcatatgggaactctgtgtgctgtcttctcaacttttccattaagtctaaaattctccagtggtttattttttaaaataataaattcaaaataaaattatgttttaggcatgttacattttaggtgacagtggacattcaaagtgaatacattaagaaactgaaaatacatatgtcagaaggctgaagatgaaaaatgaagtcttcatcaatagagacatgatacgaagacgtaatctcggtgggaatgagtaatgaagaaaaagcaggcaaagaattaagttctaagaatgtctagaattagaagggaagaagagatccaagactatctgcatatttcactctctaaaattaagatgagagaggtttgaggaggagagagcctggcctaaagaggacagaggattaaggaagagttatatttttatttgactgtatttgtgttgtcccctgcccccccatcgcccctcctcccccagccttaccctcaccttttctagagacaggatctccctctgtcacccaggctggagtgcagtggtgtgatcatagcttgctgcagcctcaaactcctgggctcaaacgatcctcctgccctcagcctcctgagtagcttggattacagttgcacaccaccatgcccagctaagtttttttttttttaaacagcaggaagcctaaagatgggtaaaaaggattacttctgatagtaaaagtcatatgaagcaggaaataaggaaatgtactcagatacctcgtttaaaaaataaaaggccaggcccagtggttcaggcctgtaatccctgtactttaggaggctgtggcaggaagactgcgtgaagcctggagttcatgaccagcctgggcaacatagcaaaaaaatctaaaaaatgagtcacacatagtgggatacacctatagtcccagctgctcaggaggctgaggtgggagaattgcttgagcccagttctgggatgcagtaagctatgtctgtgtgactgcattccagcctgggtgacggagtgagaccccgtctctaagaaaatataaaaagtaaaaagaagatgtacagtctgtgacaaaataggtaatagaattaggttaaattttattttattgtaagccataattaaatgtttgaagacagattgaaacatttatctgcccttctcttttcttctgactattctaatccaccatgaaactcgtagggtcaaaatagttaatataggaaactttccgcatcctttgggggtaagaaataagttacaaaaaaattttaaagctaaaaataaaattggagatttcttcacattttctaaaaatgtcttaaggttctcaagtcctgaaatttacaaatgtgtgtgtatccatggaaacatgggcgaaagccatgcaggttaaagtcagactcaaatgttgtaaagcaggtgctcagcgagttaacaaatattataaaatcctaaattatacttaacctttttggtataatcttcagtaatacagttcaaacatttgtgcacacactttcattttattatccattattcataattgagcacatggaaggctggcttaacacctgaaagcaatctgttacattgagatgcttctttttgctgatactaacacttgcattttcccccaaatccaataaaatactctaataatttcacagagatgcatcaatgtggtgatactgccaaaagtgaaatgttggtgagccagtaccaccttcactcagtagctcaaaagtttgtcagctggtgaacacaaaatataaaatccacattgaaaagcctcttaggtacataagtatataatatatgaaaatcagactgtgaaagttgaagaccatctgtgaataaaaatgcaaatattttaaatttttaactacctacagtttcagggttttactgctttccttatgtgtgtgtctagcatttaaaatttttctattttgttcagcatatgttctttacaaatgagtggtatgtcttccataaaaaaggactcattatcccctcagcacaatcttcaagacaggacactttctatggccaggcctggtggctcacgcctgtaatcccagcactttgggagctgaggcagatggattacttgaacccaggagttgaagaccagcctagaaagcatggtgaaaccccaaccctaccaaaaaaaaaaaagacacacaggacactttctaccaaggaaccagctggctgcttccagatagctgcaccagacttctttcagatgcttctgggatatggtcttctgaccatgttctttagcctcctttgcttcctgttacctgctcagtctcaagagctcctgactcaggcttttggtctgttttcctgaaatcttctgcgtctggactagtatctgaattaactatgcctagagttttggcctactagtatctgcaaagcattctcacttccacctgctcacactcttgggctaagtggtcacccataagtaagcctatgctctggcccctccccagacctaaagagagcttcttgcctctccccagacctaaagagagcttcttgcctattttgctatctaaagacctctatgattaaaattttcctttaattgagtctcacagctttacttcagcacacttactattacatagtaatggataagcaggaaataaagatctacaaaagtcaaacaaatcatatatagttatagaaacatttgtaatatttgaggtaaggatttacaaagctgttttatcaaaggtcctgggtttcttctagtttacttagctctttatacaatgattgtaataaccacaaactttttgctaaccccacaccaattaggggtgctgttgaaactggtcagatgcaaaaatataaagattctttctactgcttatctttaatgtatggggagtaaatcttcctcctgccaaattataaagtacttcactgttcctgagcagtgaaaattagaatatattttatttatgagaatgcatttaaataattgctgtattatttaaaagctatattattagagttgttcttatcagcctacatatggaaatagtctgtaaacagactgttacacagtttcagctattctcttactcattggctaaagactattaggttgtaataataatattattttatatatttttattagtaataatatttattataatatatatatttgagacagagcaagaccttgtctcaaaattatgtatatataaaataataaaaaaataataatattattccaacctgccacccaggttggaatgcagtggtataatcctagctcactgcagcctctgatggctaggcttaagcattcctcacacctctgcctccccagtagctgagaccacaggcatgaaccaccacgcccagctgactattttatttgtagaggcattgtctcaccaggttgccccagagtgtattagattattttgtgtataatctgtatatttcatactaaagttggtttaaataaattgtttgggttagccccaaacaaaaccaaaaattttatggaaagaggtccatttttcctagtcaaagaactttaaattttctagtaaagtatttaaagtcatgatttattgtaaaatggtaagataatcaatagctacttactgttgcttgtttccagcacctaactgtatatcttattgtaatggatctttcctgtaggactatttcactttgttatagtaagagtaagagggacattttgtgatttaggaatttgtaattaactgttaactgtaatataaagtaggcgatttattcttaccagtggctcatgcctataatcccagcactttgagaggctaaggtgggagcattgcttgagcccaggagctggagactagctcaggcaacatagtgagacccttctctacaaaaaaattaaaaattggcctcatgtgatggcatgtgcctgtagtcccagggattcaggaagctgaggcgggaggattgcttgagcccagaagagtgaggctgcagcgagccatgatcgtgccactacacttcaccctgggtgatacagcgagaccaagaccctgtctcaaaagaaaaagaaaaaaaaaaagatgaattatcaccagctataattgtctttgtgtgacttagtgacttgatttttccacagaaatcttttaaatcttaggctaattgttcctgaaacccagcatgtttcttttctttctttcctttttcttcttttctttagagacagggatctctctctgttgcccaggctggagcacaatggaggagtcacagctcactgtagccttgaattcctggcttaagtgatcctcctgccccagcctcccaagcagctaggactacaggcacacaccaccacacctggccaatcttttaatatttttttgtagagatgaggtctctctgtgttgcccaggctggtcttgaactcctgggctcaagcagttgtcttgcctcagcctcccaaaatgctgggattataggtgtgagccaccgcacccagcctggaatcccattttaaatgtactgatggagttgacaatgtcaaggaaacttgcgttaatttttaaattttgttttttgtgtagtggatcctttcacaacatgaataattgcccaattttatgttctgtcaatctaggacagaccactagataagacaagattataatttggggagttggctttcttgatcagttttcagtgaaggaaaagttacaatttgtaaacttatttttaacaccaccatagtgatcatttgatcagtttgtgagaatggcccatctggtgggtatctccaagcacagttacaactgttttttcttttttcccgttttatcacaaagtcttataaactgaaggcaattatatgtttttattatttatttattttagacacagggttttgctcagtcgctcaggttggagggcagtggtgagattatagctcattgcagcctcaaactcctgggttctggcaatcctcacacctcagtctcctaaagcactgggactatacgtgcatgccaccatgtttggctgcagttacatctttttatgttagtgtgtgatctttatttgggcatctgtcagtaggtccactgttgaacagagaactagttaaagtgacaaacaatgatgtcatttgctttgcaagttgaggaaatgaatattaattagatatatccaccaaaatgtaattttattcatgcactttaccaaagttcctttctatacaatagttcttttcttggctgttcattttcatcgtgatttaatgaagtcccatctgctcaatttaagtgaccatcttacatttagccagaatatattgagaaaagtgctggaatccctctcatttttttatttttcttttttgagatggagtctttttctgtcacccaggctggagtgcagtgatgcaatctgctcactgcaacctctgcttcctgggatgaagtgattgtcctgcctcagcctcccgagtacctggggttacaggcgcccaccaccgcgcctagctaatttttgtatttttagtagagatggggtttcactatgttgaccaggctggtctggatctcctgacttcaagtgatccgtccgcctcggccccgcaaagttctgagattacaggcgtgagtcacggcgcctggctctcctcccatttattgaggaaatcctgtcttaaatcattttgtaacaaagtagggtttaaataaataattctgaggaattgtacacattgtatttttttttcctgactgattttgtgcgaaaggtaattccctagttatctcccatagatgactatattttgtgttgtacctggttcttaaatactcagtcactgagatttacttaggccatggttgagaatgttgaaagcttacgctttggttgagaattttaaatgatctcataaatctagattgacaaattgtatttttgcatatgtgagttgtgctattgtcagatagctacttctattaaagagctgattaccaagttatggagtttggatatgcagtgaaaattcagcttttagaagccacaagaagaccaaaatgatagcagaatacaataactgaagttgcaactgctatgaagtctatactattttaaagaatgttccatggcctggcacggtggctcaagcctgtaatcccagcactttgggaggccgaggcgggtggatcacgaggtcaggagatcgagaccatcctggctaacatggtgaaaccccgtctctactaaaagtacagaaaaattagccgggcgtggtggcaggcacctgtagtcccagctactcgggaggctgaggcaggagaatggtgtgaacccgggaagcggagctggcagtgagccgagatcgtgccactgcactccagcctgggcgacagagcgagactccgtttcaaaaaaaaaaaaaaaaaaaaaccgaaacaaaaccaaaaaaagaatgttccagaaaattgccatttatttatctaatatgtactgttaagctagaatctgtcagaatagtcaaattttgaagaaaatagtagccgagcatggtggtgtgcacccatgattccagctccttgggaggctaaagcagaagcatcacttgaccccaggaattcaagaccagcatgggcaacatagcgagaccctgtctttaaaaaaaatttttttttttttttttgagacagagtttgctcttgttgcccaggttggagtgcagtggcgtgatctcagctcactgcaacctccgcctcccaggttcaggtgattcttctgcctcagcctcccgagtagctgagattacaggcgcctgccgccacacccgactaattttttgtatttttagtaaagacagggtttcatcatgttggccaggctggtctcaaacttctgacctcaagtgatccgctcgcctctgcctcccaaagtgcagggattacaagcgtgagccactgcgcctggccaaaaacaagttttttttaaaaaaagtaaaataagggcctgtgacacaactgaacttcaatataaattgtttccaaaactagggaagacattcagaatcaaaccacaggttaaacactggcttaagcagaaggacctgcatttttttttctgtctataagtttattcaatgcaaaataatcctctccagttttactgaggtcactgaccacacccacaaccaaatctgcttctaaactggaatttggttgctgacccaaccccagcctcggctttctcatcggaccaggggacacagcactctgtctgtgggtgtcttttggcttccccttttgtgagctttgcgggttgctcaccctccagacctttaggccaaagcctgccagtctctggatgactgtggtatagggtggaaggcacagtctcacggggcagatggaggtaatcagagatactggatacagtcgttggtaaggtaccagtagaaatgtctccagacaaaccgttccttcatgtagccttaagacttgagagactgcatggccttcatgatgtgaaggttgggcacattcttgtcttctgccaggtctgggtacttaggaaggtggacatccttcttggccaccatgactccctccttaaaaaggagttcatagatggcaatcccgttcttcttaggcatcagcatcttggtggctgcagggcccaggtccggggctggagagacctgcaacttaacagagatcgcatcttccaagtcaggacatttgaaggaagagatgctaatccatcccgtagaagacaatattgtgtctctggtaaatgttggatgtgcttttgattactcagaaaaatttttatataacctattttccacatcccccaaactagatcatagcagtggggcttaaagggtatgcaaacttcaaactttttagattaaacttaactcttcggtaggaaaggtgaaggactggtaggaaaaggaaaactagaaagatatttgccgttttcttccgtttataattaactccctattctagactaccttctgttgtatctacttggactaatggcgaagacgtttaaggatctgcaggtgcaaaaagtatcttaaaaagataccttccccacttcccttctctttcttctccccagtaattctccttgtacatttgaaatgggctgtatgacatcatcatagcctttggtaatgacacctaaaggcaggtccccctccccccatacactgacacccacacctcttcccaaattagccaactgacactttaaagttgtattttcttttatttaaaaaaaaaaaaataagggctgggcatggtggctcattccagcactttgggaggccgaggtggacagattgcttgagctcaggagttcgagaccagcatggccaacatggcaagacgcccgtctctactaaaaattaaaaaaaaaaaaaaaaaaatagccagacatggtggtgtgcgcctgtggtccccagctatttaggaggctgagagaggaggattgcttgagctgaggtgggggttggggctaaggttgcagtgagccgaaatcacaccactgcactccaccctgggtgacagaacgagaccttgtctcaaaaaataaataaataaaataagatatagcacttgctttatatgaagcagttcataaaacccattttgccagctcaggactaatgaaaaactatttttattatgtataattaacctaatttaggaaaaagaagcagacttacgggaaaggctagcactgagacaaggaagctcaaaaattgctttcctgagattagtattaccagccccagtatagcatttgaaattgttattagaattcttgaacctagttgctcaaatctagggctgagtttgtaagggttaaataagttgtccgttagattcaacatgaatatttccagggttgctctaacttcagacattagatcagcttatttgataggctggaggtgtgttattgtacaaaatttggaatggtggctcgagaggaataagagattccatcccactgatactgcctctcagcttctcacatctactgcccttgttcagcattatcaaaatgtagcattccaaaagctgtttctgtatatttcacctttatatttatagtatcactaaaaaaagatttcatttaaatctctaaattttttttttcagaagattgctgccaagcttgtccccctcttgacttttgcatctttgtcttatttcacacactgagaacagttacctaattgagtcttaagattataaaatccagtataaaaacatcttacaattaaaaaatactctttaatttaaaaaattatgttttaaatttagagcttatcacgtttcatggcccaaaatagcacattgagtttttggcatcttctcgcctgcccatgccaatgaaagccacaccatatggtatgactgctgttactttaggaaacccacacacggcggacacattgccaggcatgaagctgaggctctgctctcatatgcttatctttgtaagccaacatattgaccaggatatattaggattccagtacatcatggtcttctatcaattgagacttcgagctctttctccaacagctttaacatttggccacataatgaaaacacatattctaaacatcatggactctcttactcaacttcaggaagaagcttttgaatgacagctgcaagaaaggaaagcacaatcaataagtattttagtgccccttaagttctagcacccgtccaccactgtgccctttctttttatattatttttattttagagatcttgctctgttgctcaggctggagtgcaatggtgtgatcatggctcattgcagcctcaactttccccagctcaagcagtcttgtcctctcaacctcccaagtagctgggaatacaggtgctcccaccacgcccggctaacttttttttttctttttggcacatttggggttttgctatgttgcccaggctggtcttgaacacctgggcttgagtgatccccctgccttagcctcctacagtggtgggattacaggcgtgagccaccacgctcagccccttttcctgttgtttattttccattttatagagcagtcatttagttcattgtggacttcatccaaacttttctcaaggttataaaattactattaaggctttttaatataaaattagcaaattctcctgaaaataaaaggtgtacagattttgttcaccagctttgtctagtcatacttggagcaaatattgaacgtgctatgctagctgtgctaggcactatgtataaaaagatggagaagactggccaggcgcagcggctcacgcctgtaatcttggcaccttgggaagctgaggcgggcggatcacgaggtcaggagatcaagaccatcctggctaacacagtgaaaccccgtctctactaaaaatacaagaagttagccgggcgtggtggcgggcgcctgtagtcctcaggaggctgaggcaggagaatggcgtgaacccaggaggcggagcttacagtgagctgagattgcatcactgcacttcagcctgggcaacagagcaagactccatatcaaaaaaaaagatggagaagacaaaattccacctgcaaggaatatgtaaacaggttataatacagtacattactttactagagagatagaaagcatactgtggtcatatcttgaagtgactcataaaattaaactcaaaaggaaaatattaaatttttgcagaagtgcttattagtgttattgcctgatccatcaagaaatgcttaaagctcagagaggaatgtataagattgattcattgaaccaacattggttcatttgctgattggcaaatgactgaaaaattaagtgttgtttggtattactattattttttttttggtgatggagtctctgtcaccctggctggagtgcagtgaggtgatctcagctcgctgcaacctccacctcctgggttcaagtgattctcctgcctcagcctcctgaatagctgggattacaggtgcctgccaccacgcccagctaattcttctatttttagtagagacgaggtttcaccatattggccaggctggtcttgaactcctgaccttatgtgatccgcttgtctcagcctcacaaagtgctgggattacaggcctgagctactgtacctggccctgtttggtattatgtctaagaattgatcatctaatagtcttatgggaatttttagagaattgagatttaaattgaggctaaaagtcctgaaaaattgtccacgaaggaagttgtttgggagaagctgttgatgtcagtttgaccccagtaagctgtttttggaagcctagatgtcagatttctgtcaaccagataacatatggaatgccagtgaatgcctagaattgtgtggtaggccaagctgtggttactgccttcaaagaactttcttaaatataagtgtctggactgttatcttaagaagaaaacttctgccagaggctacagaggttctgtgatcaaccaaggatttttcatttgaattcagatattttcgggaagaatttaaagatagctataatttggagccagatttatgccagcaaaatcatttatgccgttgcctgctttgtgatgttatggttttaccaagtaagaattggaacacaggttcagaatacttattttctggtgtcctatggcagatatttttagaatgcagagcagctaaagtgctcgttgtgagtcaagttcttacccagaaatagatattgactattgactttacaaaaaaatagtagctgggcttggtggcgcacgcctattatcccagctactcgggaggctgaggcaggagaatcgtttgaatgcagaggtggaagttgcagtgagccgcgactgagccactctgctccagcctgggcgacagagcgagactccatctcaaaacaaacaaacaactttggattttttatttctgaattcttctgttctgaaaatactgttttaagccatcatcagtggattaaatgaatactttatatcaaaaggatacagcttttggtatcagagacagtggaaatgatccctctatggaagtggaaatttgtcacagatgtcaacgttgtgagttggtgattatgctatcagagtttgtcagaggggtttggaaagataggactctaatttttatgggagaaaggttgaaaaaaatgtattttttctctcttcatcatagctcaaattcaaagcactttcattcaaagcattttcatgcaattaatgattggcttcttccaaaacatagcacaaattaactggtagaacaggaattagaatgaacaattccatagtcttaccctgtgagttgtttcctcactattccaaaagaatgctaaatgtgaaaaaatatatactttgtcataaatagaaactgagccttaagccaatacacagatgcaagacacttttgttgtgtctgatctattttggaggcaattacttatgtaagctagatctgcttaatcttaaattctaaagcgaaatgtgattagtcatctttggaaaaaggatctactcttcattttttctgtttttgtttttctgagctttaaggacaggatgtataattgtattaaataagttattggtaaagtaaggaaaagatcgatgaggtgatttacatttatagaaattgtttttgtttaattgaggcactacctctacatcccccttggaggcaagggaacacaacaaaaccagaaaagtttaggaatttgttatggccccaaaatgatataataaaagactgtcttaaaccagggaagtcaacttcctattcttatgcaccatttctttgttctggaagcggggacagttctagcaaccagttgagtaaattattttgctaggtctagtgttgtgatcctttgctcagtgataagcctttggggaaggaaggcttctctctcttttcaaacttcattaaaatggtgggtccaaattatcacatgttacccacttctagtcagggatcctttttttttttttttttttgagatggagtctcactctgtcgcccaggatggagtgcagtggcatgatctcagctcactgcaacctccgcttcccaggttcaagtgattctcctgcctcagcctcccaagtagcggggattacaggtgcctgccaccacgcctggctaacttttgtatttttagtagagacggggtttcactatgttgaccaagctggtctcaaactcctgacctgaggtgatccgccttgccttggcctcccaaagtgctggggttacaggtgtgagccaccacgcctggcctagtcagggatccttctaatcataaattcttacctttgtttatggcctacactaaagtttcagaagtcttaaatcaaagccttgtattttatttaattaattaatttgttaagacagagtcttactttgtgacccaggctgcagtgctgtggtgcgatctctgcttactgcaatctctatctcctgggctcaagcgatccttccacctcagcgccccccacccaaggagctgggactacaggcacatgccaccacacctggctaacttttgtattttttgtagagacagggtttcgccatgttgctcaggatggtctggaattcctgggctcaagcagtctgcccacctcagcttcccagagtgctgagattacaggcatgagctacaaagccttgtgttttagacattagatttcccagtactctcctgaagaacagtaattatgattatgaagatttcaaagatactatggtaagatctgatcgtctttgaaagaattatagtaatgtagctcaggacttccttttatactgctttgtactacctgttcacaggtgactgtcaggtgatttcagtaacaaactcagacaaatgcatgacatttaaactgagttattgaagtcattgatcttgctttattaaagttgaccggttggtaacaaacatttacttttacaaaattaatcaacatgagtttgatgtgatgagagaattatattgactggaagtggtaggcatgaaacatttcctaagtaaaacttagaaaagagaccttagttaaccaataccctcttggtttgtttgcatgttaaaagatgtctgcatctgagcagttgaacttaaatataaagttgagctcagatacaaaggttctttagaactttaaaagacatgggtgaacaaaacccaaactaatcctctgatgtttacttagaaacaaaaacctaaatgaaattcaaaatagatatctgaatttaaatttgtgtataaacattagattgaaagactagggtctggaacagacagaaattccacacatacttttctgggcttcgaaaacttggtggagtgggtcaggcatggtgtggctcatgctggtaatcccagcactttgggaggctgaggtgtgtggatcccttgagcctaggagtgcgagaccagcctgggcaacatggtgaaaccccatctctacaaaatacacaaaaattaaccaggtgtagtggcatgcacctgtagtcccaactactagggaggctgaggtgagagggtcacttgaggctgggaggttgaggcttcagtgaactgagattgtaccactgcactctagcctgggtgacagagcgagaccctgtctcaacaaaaacaagaatacttggtggagtgatttaaatcctgtttttccattaggattagatctttccaccagaatttcctgaatttattccttttttctagtttatcctaatgtgattgatgtaatttaaaccgaagttgccttcctgtagccagaatctacatatctgcaaacttattcctgaagttgaggctttaatagaacacttcttttgtatttttttcttatttttgagattgatttattttgggattggggcaatgcagaattaacactcttctagaagtatgcaataattattattataattatagattatatttattacatacttactactagcattgtgctaggtgctttaagtattttgctccacttaggcttacagatgttaaataatggccgggcgcggtggctcacacctgtaatccctgcactttgggaggccgaggtgggagggtcacaaggtcaagagattgagaccatcctggcccaaatggccaaaccctgtctctactataaagtacaaaaattagctgggcgtggtggcacgcgcctgtaatcataagactaagtaaggcaagagggtcgcctaaacctgggaggcggaggttacagtgagccgtgatcacgctattgcactccagcctgggcaacagagtgagactccatttcaaaaaaccaaccaaacaaacaacaacaaaaaacaaaattagccaggcttggtggcacatgccaccacgcctgcatgtgcaggagattctcacacgaagcaggagattcgcgtgaacctaggaggtggaggttgtggtgagccgagattgtgccattgcagtccagcctgggcaacaagagtgaaactctgtctcaaaacaacaaaacaaaacaaaaacatgttaaataatttttccaagatcttgcagctagtacctggaagagcccaaatttgttcccagatctctttccaaaatttgtgctgcatagccagacctatagattgtatagtaatgaatgcttagaagtacttaggagtcttctttgtttttccgttaatggagatgaacattctttattagggagctaatacattttcaaccattgacatacctatgagatgttttaaaacagtaattctaaaaggatctgcatctgttctgcccatctcctttcacttctccaagccatttctataacaatattttcccttccttggaaaggtagtcatctgtttttctggaatcatattagatttgcaatcaattggagtcaagctgtcttgctttttatcccatctcccccctattctcactgaagcacagggaattagaatttgttcaggtcgtgtggtgatcactggctcaggtggagtaccatcagcaggattctcccggtcttttgtactttgtactttgttttcaaaatcagttaatttcataacagaaaattagcactttaaaaggcacagatgtgatttggagattatgggtaatttttagattgcatctttgttaatatttagattagtttatcagtatttcccaaactataatatagtttgatatagtggtaattattgatgtataccttttttctaccaactgtagaatgatgttatctaagcaagaagaaatgtagggactttttgaggattttatcagatttttatgcacattactaacatttgcaaacccagaagatttcagttttttgtctgtttttttagaggtaagttctcactgtgttgtccaggctggagtgcagtagctattcacaggctctaacataacacattactgcctccaactcctggtcttaagaaagctgtccacctcagcctcccaagtagctgagactgcaggcatgtgccactgagcctggcctgattctgtttttaaaatatattaaatttttttcccaatttagccctggtctctttctttgagctacgcatctttcagaattgtgcagtgaagtgtgctgtcttaattcagatggaagtccacttcctgaatccaagctgtactcttcagaagcaccagtaatttgcactgggttatacagaaagagttcagcacattctggcagctcagccctatttgctcttgcttaggccagttcaagtaaacaatgcactcaccacgggtcagtatggaagagttgtggcatgtgcaggtactcgggtctggggtgtgagaaattatatttaatttcaggacttttttgcatcatgtaatcttacatccctcatttgtattttgttttcaaaattatagaagtaacaaagttggattggtagtatgagctgcattgacagaatcattccagatttactggttgtaaacattaatggtattgtcagatgtctggaaattttttcttttagtctagtttttccttccttccttccttccttccttccttccttccttccttccttccttccttccttccttccttccttcctcccttccttccttccttcccttcttcccttcctccctccctccttcccttcccttttttttttttgacagagtttcgcttttgtcacccaggctggagtgcaatgatgcaatctcggctcactgcaacttccgccttctgggttcaagcgattctcctgcctcagcctcccaaagtagctgggattacaggtacctgctaccatgcccagctaatttttttgtatttttaatagagatggggtttcaccacgttggccacgctggtcttggaactcctgacctcaggtgatccgcccgcctcagcctccgaaagtgctggaattacagacgtgagccaccgcgcccggcctagtctagttttcttctttgcatttggctatagtagctactgatttgacaaatttgtacctttgttcagctgttccaaatcatgtgacagggcaaagaaagaatataaaaggatgccatatcaaagttgataattctgttcattattcatacggtgcccttcagataatttttttcaccctgcattctaaaactcccatgtaaaagttagctatactattcaaaccagatcatcagatggttcatgtgcttttcttagagtagaactgtcagtctaggactctaagagggcagattgctacctgctgtgtcccagaggatgtaaatatatatttcctccctgccaccacccctttgaaatagacagtggaagggggaaaaataggaaaatatgaactgggaaaatgtatcattaaactcccctgctttcccagtcatgaagatgtattctaaatattttctgaggtgtctgtgtatatcctaaactggaatgaccttttttttccttttcttacacatggtataaaaattttaaagtgcaaagagtatgtagtaaaaataagcctttttaggtatcctttcagaaataacctatacacatacaataaaacatgtgtgtcatgtattttgaattcttattctttgcctgtatgaagcatggcctcttggatagcagtaacgtttttgttgtttaaaatggttagattttatacagagaatgaaaggctagtggtcgcatatatttgcaaagccttctataatatttgaaggccttctacataacttttctcctgatgcttataatagccccatgaggtaggtaaagcaggatttacctcttttatctacacaaaatttgaagcttaaagaatgttatgtgataaatgtgcagtggaactggaatcaaaacccaagtctttggctgttattccagaattcttgtttccattttgcctctcaaacatgatagcttgaggggatccgttatcttgtatcttcttttatgagatgtgaaaaataccatgagtagctgattttagacttttttttttttttttttttggagacagagccttgctctgctacctaggctggagtgtggtggtgtgatcttggctcactgcagcctctgcctcccaggttcaagtgattcttctgcctcagcctcccaagtagctgggactacaggcatgcgccaccacgcctggctaatctttgtatttttagtagagacagggtttcaccatattggccaggctggtctcgaacacctgaccttgtgatctgcccgcctcagcctcccaaagtgcagggattacagacgtgagccaccacacccggcagaagaatttttatactgtatttcggtagtagtagtgtggtagttacaacctcacagttcagaaatatgacctttttgatgtatttcctacaaagcagtttataaacattagcgccactttcattacatgtggacaccgtaactgactttattcaggcagctgagcagtgaaaacaaggccttttatctcttgatagctgtgtgcctgccgtggctaggagccaaagggataaacctgtccaaggttcttcccctcgatgccaaagtggaatctgaacaagcatttgatagagtgcctgactctgtttccttcccccataatttaggtaaaaatggttaacaccagcaccaaactgtattctagatttctaagtcatctcctagggagaaaaaatgagtggtgggaggaaaaaattttcagatagtagactgtcatggggatgatttttagtcccagcagacttaaaaactcttgtcattgcaagacaatccttacgtttcttaaatgttaggcagtcccagatgggaatttgatgaaaagattggttgagctctgtatatgaaaagaaatatctctaaatgtttccctaaagggatggcctatctcctatagtttatgagcaccttgtttctaattcctggtagtaaaataaatgggaaatataaggaaagaatttacatttttttatacacggtagaaaaaaattacatgtttttgtaatttacattttataaaatttacagtttatacttcaaaatttacatttaatactttataaaatttatgtatttttatattcatggattaataaatattataatccaatgtaaaagtcattacatttgccataatgtaatgattcagtttttgttcaataactaaattgctatatatatataatatattatatatataaaatatatataatatatatatataaaatatatataatatatatataaaatatatataatatatatatataaaatatatataatatatatataaaatatatataatatatatatataaaatatatatatataaaatatatatatatttgtatttgtttattttttcactcacaggtcaaccatgaactatattcttatttgttattttttatttcctgctttgggcatagaagatgagaaattatactaatttgagtgtttccacttggtcagtttaactagtgttagagttttcttaaaactaagatgtaatttgacttctcaaagtaaagtttggggcagagcatcttctctagagagatggatctttctgtcagggagtcaggagttactcagtcttttttgggagatggagggaggtcaaccattaggtccaaagcagtggttttgagtaattagcgattgctctgtgttttcatattttcagaatagggatataacctcactgaagatgacttaattagtacttgacaaagctaaaagtcctgtcagtatatttatacctatgtgtaagtatgctctctgagtcattctgctaattcccactgtaaaatacgtatacccttttattttattagaattaaagggctttgaggagatttttcattttaaaggtacaagacaagttttaacgtcaacatagcccactcactgttctatatttatgtgagaccttttaagaaccagggataaatgagctctaatttgtctgtgagggtctttccccgtctatctttaaaacttaacgtgttcctataggagtaactatataatatttgacaactgttatcccaccgtccacttgggaagcacacaagtaataaaagtaaatcaaattatgacactgtgtttagcatgacatcttaatttgaactatgagaaaccattattggaccaatgttggatttttactaaagacttgtagttgtcctagcacgtattaggagatgccaaatgaataagcctaggagtgattgtcatggggtccctcactttctcagccatcggcacagaatgtgccttttcaatgccacccacagcctagtgctccacctttcacagcctacctctcatctgcctcagcctgcacacagcatccttaaccaaaccacaaccgcctataagacttaattcaaatgtaccctccatgaaactttctctgactgactttattgccatactcatctcatagggttattggtgcttttttccttctttaaaatatcaagtcctcctttccccctaaaaactccacattcagccttgtatgatgattagatatgcacttgagagccagcttctgtatctcatgtctttttaagaaaaaaaaaaaaaaaaaaatctcaaaatctcccgttggacctgtacagtaactcctttttgaaaaggtagttgaatgctaaagacttaaataaaagcagctacaactctttagtgaatcagaacattgttggaaggcataaagcctgtgctgatcactgtccttttggaaaaacaatactcagccactatccctgggtacaaataagaaaaataaattctgatagagccagaataaggcactaagaggaaagcagttctaaacctgaggatcgagattgcatttagacttgctcaggagagtttcccgggggtaaaagattgggtttattttgttagagaccagctacattatcttcattgtcattggggctttggacaaggttaataaatgaagtgttcgtgtgatgggaagttactgggttcttaatgaataaactcccagaagacttgacttaatactgcagcagagtgtctccaattgaaaggaggcattaggttatcgcgtgacttcaaatttttctaaggctgtaaaagcactgatactgttggcatcttttgtttgttttctcctgagggattcaaaaacaaagttggttgtcacttaatttagtaccagttatcttagaaaaaggaccctattcctttatgtgatctgatgtagttcagcttcagtggaaactgtagaatgttccatattttagacaacatccaactcccaagcatttctgtttcagaaactgggacaccttccaagatagctttatgaatcctttaatttctccttccagactcattaactcagcctgttcaccttggggaaatcatagttccagactttctgtaaaaaccttcctcctaagtgaatgcggtagttgatttgagaacattcagactcaagcttttcagtagtttattctgaaacctgtttgttgtgactttgactaggagagattaaggtgaaacagtagtaaccatcataatatacaaattatctgcattaaaaaaacttgaaattcagtaagtacatttttaaattccacatctcagattttatggactcataaagctggaaagaaccgcaaccaatgtttgaccagtatttcttaattttttcttgtctcgtggatctttttgagatggtgatagctgttgtggatattcttctcagaaaaatatacatacacacaaatgcttgcgttcaatttcaggatatctcagactcccaaagcctgttcatggattcccactctagttcaaagcctgttgttaggggtttagagaagttaagtgatgtacctaaagtcacacacttctattgctaactactatagaaaagtggcagggttcttttttgttttctgttttttgtgaggttttttgttttgttttttaaccatttcctgatacactcatcatgttctttattgaagtcaagcaggtgtctccaagtacttggtgcttttccctttactgcctttgtttgctgtatcatttatacagcattacccaagttccttctctgttttagtcactgatgcattgggatggggatgtgctaaattctcttcattttctcattcttctgtttataatagtttacttattgatactaatatatgcaatgtcaggaatcatttctctcatatttggtcattaaattagcagctatttattatacttttcataactttttttcttacagttttccatagtaagaggacagttttatttccaatgagtaaatacttgatgtaagagatccttctttttgaagcccagacttctatctccagataaggagtagctgataatgtgacatagctcagcttctaatttgatgcctccacaggctaggagccagcactttgcccctggtttgaagaatgcaggtagaggtaggaatcttaatgatgagaagaagtttttttcctctatcttggtcatgttcttcctatcatttgaaaaatcagtaaccattcccccagtagatacatactcataaaatattagttacacccatgttatatgcattataaaaatacgttaaaacataaattaaaggataagcttttttaaaaacagaagctctgttattttcttcctgacccccaagggatcatgtaacttcttccttgaggaatcactccactcctttttggagatcactcttctaattctttaggcctatctcaagtccctcctcttgcttgtttgatttcgctattttaactgtataactggattgtaaacaacttgagattagagaccagatagaatgttgtctttgtatcctgcaacaatgcctagcacaattttgagttcatcatcattattcaatatatacttgttggctaatttcttgggatcatctcagagcattatttcactaattattaccaaagaggaagaaaaaaaatcctcagttttatcttattttagtaattatgggtgttattcctcatgctattcatcttctaggattagagacaagtgagcctgtctgcacttaaagttttgtggaaatagatgtactatatctgatgaagtggtttaattgggacataatgagaatggtgcagtatgagaaccaaacccgaatcagcacctgcatctgttttcgttccttgagatttctgttcattggttctttatcacatgactgagtgctgaagcatagtgttttctttttatttatttattatttttatttactttctcgagttcatttattctgacattattgatgcacccaccattccccgggtagtataaaatactcctttgtattttatatttcgttctctctcttctcttcctctaaatcaccactgtgttcttggattctaaaaacccctctaaatttctgaaattaattgtcacaattatgcttaacaattcttcatagcgatttggttccatgaatctcaaagacctaacatcataaccttgtttttacggcattcctattctgtcatcttttctttctgcatagagaaactaaacctaggaaaaagctgggcatactggctcatgcctgcagtcccagcactttgggcaggtgaggcaggaagatcacttgagaccagaagttgagatcagcctaggcaacatagcgagacccggtctgtacaataaaattttaaaaaattaaccagctatcatggcacatacctttagtctcagctactagggaggctgaggcaggaggatcagttaagcccaagaggtggacgctgtattgagccataatggtgccactgcccttcagcctggcaacagaacaagactctatctcaaaactaaatgaatgaatgaatgcaaaaataagacgcatttatagtcagttgcaaatcaagatagcaaaagagatgaaaagcaagcactggtgtccagatttgcacttttgtgtctccatggattatgtcatttcttcatgaaaggtacagtagtgctctgtgctttccaatataattcactaattttagatcatagctgttacaggttctaatttaaaggctttgatatttttattttatttgtttgatagatatattagtcattttttcttcataacagacaccctcaaactttcatgggcttaactcgaggcttgtttttctttcccatgggttattcgagatggctttgcttcaggctacaggttgagggttaagttcaggtctgctccacatgtctcttttctttgtactaccatgttctcatggggaatggcaggggtgcaggaatacaggccaaactacccaggcacatttaaatcctctgctcatattgtatctcctaaaactccattggcctgagcatgtcagtggcctatattatattatgttacattaacagtattactaagcacacagtactgcacctcttaggaaggaatgacatcatccatggagactcaattaactgcaaatgtggactgcagtgcttgcttttcatctcttttgctatcttgatttgctcaacgtcagcggagccgggtgtatactcagtttatagcaggaggcggtacagacttacaaaacagaggatctggatgtaaaatcctatgcaagtgaaaaattgggagaaataatccagtctcccgctgtagggaagcaagtcattaaaacagtaattaatttgctaatatagtcctgtggactctaaacatgacaatacatttctttctatggggagcttacatcttatttgacattattttgaaaattctccaatgctctaaatttctttcaagaatgcacctttaatccaaatttgttgtttagtagaaatgagtataagtagagaagattgtgatattaattgccttccatcccttgtttgagaaagagctagaattgctaattgattgggaaaacttaaaggatagattttaaaaggatagtgtagaaaactgtctaagaaaaagcattcttgtaaataaactattaagagatataagttaaacttcagattgaggtggtgggaacagagttaagctaggtcgactcagcatggaggctgatttctgagactgagaaaggcaccttaaaaaggcattaaagtatctgctattagacaagtagggagaaagttcaaaagtactgtgttatataatagaatcttatgattacctagcaacctaattaaagtcaattttaatatatgttgtaagtataaaaatgagtttgtatgttgctaatgcctactgaattctgcagtggaattaataattccatagggaaacctttttcttcttgaaataatgctaggtgtggctacttgatgtgttctattttctttattgccttttctttatccttggatagaaaacatctgtttattttaaaactagcatgttttgctacctaaattgataatatttaagttataggcacacagaattcactttatataaacagattcgaatactatggaaactcaaaataaattatgctttttttttgagatggaatctcgctctgttgcccaggctggagtgcaatgacacaatctcagatcactgcaatctctgtttcctaggttcaagcaattcttccacttcagcctcctgagtaggtgggactataggcgcgtgccaccacgcctggctaatttttgtatttttactggagacggggtttcatcatgttggccaggctagtcttgaacccctgacctcaagtgatctgcctgcctcggcctcccaaagtgctgggattacaggtgtgagccactgcactcacccaggaaatggtgccgccttatggtgtgttttattgcagttgtgtctcctttgaaggcacgaacaaggaaactaaaggagttatgtattgcaaagctatgtaatactacgtgaaacctagtccacactttttttctgtcatggaattgaaagttttgttttgttttgttttttgttttttgagacggagtctcgctctgtggcccaggccggagtgcagtggtgcgatctcggttcactgcaagctccgcctcccgggttcatgcgattctcctgcctctgcctccagagtagctgggactacaggcgcctgccaccacgcccggctaatttttttgtatttttagtagggacagggtttcactgtgttagccaggatggtctcgatctcctgaccttgtgatccgcccacctcagcctcccaaagtgctgggattacaggcgtgagccaccgtgccctgcctgaaagttcattttatctctggtatgtgtatctggctttacaaagcaaatgtatccataggaatatatttccaaatgttttttttaaaaaactttttgttatgaattatagactcacaggaagtttcaaaaacagtacctagagatcttacatacccatcacatagcttcccccaatagcagcattaggccaatttaaaaatcattgatgggggctgggaacggtaattcacatctgtaatcccagctgtttgggaagctcaggtgggtggatcacttgagccaagagttgtacaccagcctgggcaacatagtgaaaccccgtctctataaataataccaaaaaaattagctgggcttggtgacattgcgcctgtagtcccagctactcgggagcctgaggccagaggatcacctgagcctgggaggttgaggctgccatgagccatgattgcgccactgcatggcagcctgggtgacagagtgagaccctgtctcaaaaaaaataaaaaataaataaataaaaattgagcgactttctctgcactctataataagtgaattataaagtgtcctgtaggagtccttatgtcattgttgctttatttattgctttagcatattcttctccattctccccatcttcacattgcaccatcgggaaggggttaagtctcatgtacctttctggtacatttctccccaacagcctaaaagatatgcaagctccattttactccttatgttgaagaagcatatttggttgaatattcagatttcttgttttgagtttattttggtggtgtttgaaaacttgaaaggttctctatatatatatatatatatttttttttttacatcatctcttcttttttttctcttctagcctgaaaatgaaatttcttcagactgcaatcatgtaagtatggattttctgtgatgcgccatatgtgctttatagatacgatgacagatttcgggatgctcttcctgttgttctgggaagtgctatgttttcttacagtcttaatcttaaaaggatgacaaactttaaggatgctggtaaaatcaacaaataacccttcattgtagaagcctgcaggttctcccaaataatatttacgtacttaagtttttcttcagttacagctaccatgtgaaaataattctctgcttatcaagtttacaactttagaatttcctgttttaaagttttctcatttacttatcacacagtcatcttctttttgccaaacgctatagtagcacattaaaaggagactgatgtgaaatcaactctgtgcaaaaagtattgggtgctttggtagaagtctatacagaagacactggagacacaaaaatgaattttgtccaggtgagttgatgtcagaaaaggcttaataatggagatgaggccgggcatggtggttcacacctgtaatcccacctgtttgggaggctgaggcaggtagatcacttgagaccaggagtttgagaccagcccagccaacatggagaatcctgtctccactaaaaaaaaacaaaaaacaaaaattagctgggcatggcggtgcatgcctttaatcccagctactctggaggctgaggcaggagaattgcttgaacccaggaggcggaggtttcattgagccgagatggtgccactgcactccagcctgggcaacagagcaagactttgtcttaaataaatcaataaataaaagaggtgacacttgatctgggtcttagaagaggcatctatatgtggcaaaagtcactctatcacattatagaaggtagatgggaccggaggctgtataagcagagacagattggctatttaggttaactacttactcttacgaaaacctaggtaagtcaagtacaaaataaaactagaagaatactagaagattagagggaaggcttttctaaatatgacacaaccccaaatgatgttttaaaaatatatatctgcatctatatctgattacattgaaagttttctccccaaaaaatgttttgtaaaaaagtattcacaatgcagatgaaaaggactatatttgttaatagaaaatgctattaataaacataacagacatgaatagaatgttcacaggaaaagaaaaaggtgtccaataaacagtaaaaagtttattctccctcagaatcaaaagcataaaaattcagcaaaaaatgagtgcactgttgtcatccatttgattagcaaatatcaaaaatttgataaatgggttcgcacctgtactcccaactactcgggaggctgaggctggaggaccccttgagccaggagttcgaggtagcagtgacctacgatcacaaaactgcactgcagcctgggtaacaaagtgagccccccatctcttaaaaagaaaaaaaaaaaaaggataaatacacagtattgataaggatgtgtgtatttaagcattctctagcccatagatcaaaaaactacaacacttaggccaaatccagtctactacctgtttttatacataaaattttattgaaacagccacaccatttatttatgtattgccagtggctgcttttcacactaggatggcaaagttgagtaactgcaacagtgactacagttccctgagaactgttactttctggctctctgcagaagaagttggctgaaccctgttcaagcctatgtatgggaataaaaacaagctataaaacagtcaacctaaaatgcatatgttttgacccagcatttctacttctatgaatttatggatagttaaaagaatggatagagatgtgtctataaaaggatatttgttgtggcattatttataaagcaaaggattaggggaaaacctcaaaatccatcaatagactgaatctgacagaagagaaacccagaaaaaagttgatgtgtgccttggaactctcaaagagccagccgggcgcagtagtccacacctgtaatcccagaattttggaaggctgggtggatcacctgaggtcgggagtttgagaccagcctggccaacatagtgaaacccctctactaaaaataaaaaaattagccaggcgtcgtggcacacccctgtaatcctggctactcaggagtctgaaacaggaaaatcgcttgaaccggggagatagaagttgcagtgagatcgtgccactgccctccagtctgggtgacagagtgagactccgtcacaaaaaaaaaaaaaaaaaaaaaagaactctcaaagagccaaggaataggaaggatacgatactgctgaaaatgggggacaaatagtatccaaaaaacaggagatttggtggaaggtctatgtaagaagcagtcaggactctttagagaacaattatataacccagaaattctataatatagccattcataatgtcccgcatgctatcagaaatggctggatatgagaagaagcaggaagatatcaagagataaagtagccaacagagagagatccagagaagaggtaattcatatattggaattattaatagcagacaaggacttcaaataactaataaaatagaggaaaataaaatattttcctataaataaaatagaggaaaataaaatattttcctataaatagaggaaaattaaaatggatgaaaatatgaagtatttcaaccgagaattagtctttattaagaaaatcaattagacatttttggactaaatgtaatttcagaaattaagaacttatgggtagttttaaaagacagctttagtggacataaaaacagattcatggccaggtgcggtggttcacgcctgtaatcccagcaccttgggaggtcaagacaggtggattacttgaggtcaggagttcgagaccagcctgttcaacacggtaaaaaaccccatatctactaaaaattacaaaatcagctgggtgtggtggcaggtgcctgtaatcccagctactcaagagactgaggcgggagaattgcttgaatctgggaggtggaggttgcagtgaaccactatcgtaccactgcactccagcctgggcaacagagcgagattctgtctcaaaaaaaaaaaaaaggcagacagaatgggatagaagcagtattcgaagaaataatggccaagatgttttccaaatctaatgagaggcattaacccataaattcaacgaacttagtgaacctcaagagaaatccatactcacctaacaatttttttttttttttttttttttttgagacagaatctcgctctgtcactgaggctgcagtgcaatggtgtgatctcggctcactgaaacttccgcctctggggttgaagtgattctcctgcctcagcctcctgagtagctgggattacaggtgcccacaaccacgcccagctaacttttgtatttttagtagggacagggtttcaccatgttggtcaggctggtctcgaactcctgacctcaggtgatccacccgcctcgacttgccaaagtactgggattataggtgtgagccaccacacctagcctagacacattattaacaatctgccaaaacgaaaagataaaaagaaaactcaacaagcaggcagagaaaaagagacattctcttgagggaaggaaaatgacagctggcttctcaacaaagcaagcagtagaaactagagcaaatgaaacaataaatgtaaaatgctgagagaaaatgccaacatggaattctatatccagcaaaaaatacccctttaaaaaatgaaaataggccaggcaccgtggctcacccctgtaatcccagcattttgggaggtagaggcaggcagatcgcttgaggctaggagttgaagaccagcctggccaacatggtgaaatcctgtctctattaaaaatacaaaaatggccaggttttgtggctcacgcctgtaaacccagcaggcagatcactaggtcaggagatcgagaccatcctggctaacacggtgaaaccccatctctactaaaaatacaaaaaagctagccaggtgtggtggtgggcatctgtagtcccagctgctcgggaggctgaggcaggagaatggtgtgaccctgggaggtggagctggcagtgagccgagactgcaccactgcacttcagcctgggtgacagaacgagactccatctcaaaaaaaaaaaaaaaaagaattaaccaccgcacctgtaatcccatctacttgggaggctgaggcataagaatcacttgaactggggaggaagaggtcgcagtgagctgagatcccgccacggcactcacccctggccgacagagcaagactctatctcaaaaaaaataaaataggtgttatcagacaagcgaaagctgagaatattcatctcccacatttgcacactgtgagaaatcctaaattcttgaaggtaaaaggatcacaaattgaagcagagaagtaggagcactagaagagaaaaataattgatacgtatgactattattctttcatgctttaagataactgacttggccaggcgtggtggctcacgcctgtaatcccagcactttgggaggctgaggtgggtggatcacctcaggtcaggagttcgagaccagcctggccaacatggtgaaaccccatctccactaaaaatataaaaattagttgggtgtggtggtgcacaccagtaatcccagctactcaggaggccaaggcgtgagaatcacttgaatctgggaggtagaggttgcagtgagccgagatagcgccattgcactccatcctgggcaaaaagagcaaaactccatctcaaaaaaaaaaaaaaaaaaaaagaactgacttaagccaaaacaataacagtatactttcagattataacatgtagaataaaatatatgacaacagtagcacaaagggtgggtaggaataaaaatataattttactttggaatattcttatattgtgtatgaggtagcataatatcaattcaatttcgactgtgaccaagttaaggatgtataatcaggatacagatttgtttcacataatgattgttcagttaatggtatttagccatcatgacccttacaggttgatagcactttacccaaaacacagattatgccctgagacattattgttctaagcaaatttgcgtgtagcgacttactcaacactagtcagactatcacatggaacaaatttgaattctacctcatagttaggagtgctaaaggagtgatagcaggaagtgatcaagtagcatcttctgttcctcttcagtgtgtcttgcacatacagtatttctccatgtcaaaaagtggtttttggtgttggttttgttttgctttttgagacaaggtcttggtctgtcacgcaggctggagtgtagttgtgtgatcacggctcactccagcttcagtctcccaggctcaagtgatcctcccacctcagcctcctgagtagctgggactacagatgcacaccaccatgccctgctaatttttgtattttttgtagagatggggtttcactttgttgcccaggctgacctctaacttctgggctcaagcaatccaaccttctcagcctcacaaagtgttaggactacaggtgtaagctgctatacccggcccaaagtgtattttttaaatctcaaagattcatctacaggtaatgtcatgaatctttccacatcagttttttctaagtgccaaagttctaaggaaaagaattaccataaaatatgtcttcatactgatactgaatgcctgcctcatagtcagtcatctgattttacattactttccagagaatgattccctcataccctgcctttaccaaccatcaccaactctcaagtcttctctttctcccttggagagtacaatgaccttccattatgttatattttatgtacaagttatattttactttaaaactgtttgttacttatatactattttcatttttcaattgatacttctctctcggaaaattgtttgggtatctggccagcctgaataacttctatttatttatttatttatttttgagatggagtcttgctctgtctctattttgtagagatgggggtcttgctctgtggcccaggctggtatccatctcctggcctcaagtgatctgcctgcctcagcctcccaaagtgctgggattacaggcatgagccactgcgcctgaccagataacttgaacttcatcacaattaaaaacttttgtgcatcagacactatcaagaaagttgaatggcagcctatacaatgagagaaaatacttacaaatcatatatctgataaagggtctagtattgagatcatacaaaaactcttccaactctagaataaaaagcaaattttaaaacgggcaatggatttgaataggcatttctcagaagaaaatatacagatagccagttacacatgaaaagatgctcaacatcattgtcattaaggaaatgcagggctgggtggggtggctcatacctttaatcccagcagtttggaaagttaataccggaggatagtttgaggccaggagttcaagaccaacctgggcaacatacggagaccccctatctctacaaagaagaattttaaaaatgtagccaggcacggtggtatgatcatgccacagcctgggcaacatagtgagaccctgtctctttaaaaagcaaacaaaaaaaggaaatgtgtatcctaaccacaatgagatattacttcacgctcattaggaaggatgggtgtaatcaaaaaggtggacaattaacaaatgttggtgtgagtctagagaaattgctggtggaatgtgaaatagtgcagccactgtggaagacagattagcagttcttcagaaagttaaatagagttactatatgacccatgagttcccctgctagatgtatacccaagagagctgacacattttcacacaaaaatgtgtacataagtgttcatagcagcattattagtaaaagctcaaaaatggaaacagcccaaatgcctattaactgattaatggataaataaaacatgatgtggccatacagtgaaatatcagtttgcaaaaaaatgaagtactaatacatgttacaacatggatgaacctcaataactggactcaaaagatcacaaaaaggacacaaagacagaaagaaggttagtggtttccaggaactcagagaagtggggaatggtaggtgactgctaatagatacagagtttcttttggggaaatattctggaattagtggtgatgattgtacaaccataacctctgagttgtgctctggaagggcgaattttacaatgtaaattctatctcaacagagtagtataaccagcccccatggaatcaccatacagcttcaaatattaattcagattggtactgtgtcatttatatccttatgtacttcccctccctttgtattcatttgaagcataaccgagacatcatatcatgtcatctgttaatatttcagtaaatactctaaaggataaggactttaaaaaaaaaaaaagaccatagtactgttgtcatatcttaaaataccataattctttaacatcatcaaatatcaaattagcattcaaatttccaattttagcacccaccctagaagggaatttatttaatctgataaaacgtgtctataaaaaggcctacagcaagcatcgtacttcatggtgaaatattaacagctttctacccaagattggcaacaagacatagttacttattatcgtagaggtcctagccagtgcagtaaggcaagaaaaaagaaaacaggtaataattaaaaaggaaaaaattgagctgtcattttttttattctttttttttgttttgagatgaagtgtcgctctgtcacccaggctggagtgtagtggctcaatctcggctcactgcagtctccacctcctgggttcaagtgattctcctgcctcagccacctgagtgctgggattacaggcacataccacacccagctagtttttgtattttcagtagagatggggttttaccatgttggccaggctagtctcaaactcctgacctcaggtgatgtgcccacctcagcctcccaaagtgctgggattacacaggcgtgagccaccgcgcctggcctattattttttttaaaatgcactatcagcagaatcataaattgtcattatttacagatgaggtaattatataaatagaaaatccaaaagaatttataaatggaccagcaagtacttaacagatgaacttagtaaagtctcatgatagaaggtcagtatgtaaaatttaattgtacttttatatattattaacaagccaattttaaaaatatattaaaaattaatattattttaaagtaacatgtaaagcatcaaatacttaagaataaatctaacaaaaatgtgtaagaccactctacagataagtgtaaaatattattaagagaaatttgaaggcctttaaataaataaatgagcagttgtgctcatgagttggaagacttggtgttataaaaaatgtgaatgctcattacattgactatagattctgtgcaatcccatatttattgttagcaaaattgccacgtgattttaaaatttatgtggaaacacagagtacctgtaacagccaaagcgatcttgaagaaccaagcagagagactgtactacctggtggaagagttaccgtaaagcagcggtaattaaggcagtgtggtagaagcagattcatacataaatggatacttgaataaagaatcttaacccttaatgtatgccattcatggaaaatccattctgaatgccctgcagatccaaatgtgaaaagtaaaacagtaaaatttctaaataggaaaatatcttcatgacttggagattggcaaagatttcttaaatggttgtgtgcctcttttaaagtatctcttgtgctccataaatatatacacctactatgtacccagaaattaaaaatttaagttttcttaattgggaaacaaaaagcactaagtataaagcaaaaagactgataaattggttacttaaaaatctgtttcattaaagacagtattgctgggttccgtggctctggcctgtaatcccagcactttgggaggccagagtgagaggactgcatgagcccagagtttgagaccagcctgagcaacatggtgaaactctgtctctacaaaaaatatgaaaaattagctgggtgtggtgatgcaggcctgtggtcccagctactttggagactgaggcgagaggatcgcttgagcccaggagcttcaggctgcagtgagccatgttcacgccactgcactccaggctgggtgacagagcaaggtcctgtctcaaataaataaataaacaagcatacaatattaagagtatgaactggcaaaccatggaaaagtaaaaaaattgataatacatacgtctgacagtgtatccagaatatgtaaagaagtcacacagagcaacaaagaaaagccagtggaataaaaaaaaatatgtaagatacttaatctgccatgtctcaaagatgacgtctgaatgaactaaaaacaatgaaaaggtgcttaacttcgcttagtaatcagggacgtgaaaatgaaaatctcagtgagataccagtaccttgacagtgccaataccgagtatctgtgtgaatgtggaacaacggtgatagttagcacagctagtgctttcaaagctggcttggcagtattagctaaagcatagcaaatgatacagccattttacttctaggtgtttaccctacacaaatacttgtaaatctgcccaaaagggctaaatatttgtagcagctcgcaacagccctatgagtaaaaggttagcaaagcccttttcccattttcataagtatttgaattctattaacttcttaatttccctttcccttaacctaatgagagcaaaatatcaactaaatgcctaggcagcattgtttataattaaaatgaccctgattggtaaattttagatgggctgtgaagagctgttaatgaattataaatgcccaatcgggatgccgtactttcatgctttgctgaatgtggtgactcataagcctggatgtatcctttgcagggaccctggaaactctgcccagagcgttgttacaaaggatattggttcccatggggcctgaggcttctgagccaaggcacctcctttccatgcccctgtgactagacaatagtcacaacggccatggggagaaaatgcctccagatggctccatgaactgctgccaggacttacattgaggagggacagttgatgctgtcctcctggcaatttgttgttattgtcttttttcagcccagacctttccatagaacctcagactttagctgctgattccacatttctactttgtctaatagtcatttccagaacgaaactcttgatttttctgcccctaaaccttctcttcctgtagtcttccccatccccactagtggctcctctattcttctggttgctcaaatcagaaaccttgattcttctcctcttacacttcacattcaatccattagtaatcttctggctgctccttgaaatatatcctgaatttggccattttcactgctattgccctgatacaagtcatcatcatgtctctccgggacttctgtgttggcctcctaagcagtctccctcctgcttagtctatcctacagctggaatgatccctctatcatgttagttcatattactgctctgtccaaaaacccctaaaacttttttctcactgattaaactcccaaatctttgtgccctgcaagcgtgcaaataccaactctctgacctcttctcctacgaccgttgccccttgccacctctacttaagccacagtgtcctccttgctattcttcagatactcagaaaatgttcctgactcgggacttttgcattcgctattctttccacatggaacattcatctttcgtggctattcattttccttctcttactctcttatggaaaatagtaccccattcccctactttcaattcaccttgccctagcttatcacctgacacatttacttgataatttgtgccttatctttctctctttcatagaatgtaaactccttgaaggctgttgtcctttttgctcactgctgcctgtcggtaaaatttcacaatcctgagaataaacaaaataccttaaagctttcagagagaagaaaaacccaggtcaaaatcaaagtagtggcaatttgagtaatatacttcccattagcattcctagaagctagaagacagtggacaagtgcttaccgaaaaatgatatccagtcaaagtaatataaagatatttctggcatgcagttcttccaaacatttatgactcatgcatatttgttgttgttgttgttgtcgtttgagatggagtttcgctcttgttgtccgggctggagtgcaatggtgtgatcttggctcactgcaaccaccgccccctgggttcaagcgattctcctgcctcagcctcccaagtagctgggattacaggcatgcgccaccacgcccagctaattttgtattcttagtagagatagggtttctacatgttggtcaggctggtcttgaactcctgacctcaggtaatccacacacctcggcctcccaaagtgctaggattacaggtgtgagccaccgtctccggccacgtgtttttaaataaagcccctggaggatgtgcttaaagaaaatgagggaatacaccaaggcagagaaagattaagaacccagtgactaatgaatcagcctgagagaaaagcaaaggaaattctgaggatgctggagaaggatgatgcatgtacagagaaaatagccagtccctgatggaaacaggaaaatgaaaagactgcaagatgaatgtctcactggacacagcagaacattttgagaggagatttacatttctagtaaagagattgaggattaattaataatgggtgtataggaaaataggcctatgaaataagtgacttaactatagagcaaactaaaagtcgtataggaaaataaatacaatattctgtgtctcagtatatataactttttacatagtcaataatgtgaatactgagtatctaacaacatgatgatttaactgtatggggaggagtgggaccaggaagatgggtatgagaattcattcctcatcttttatagtgtaagttactacagaatatctaaaagtgacaagtcaagaaatgacagtttaagcatgtagtttaaaaatatggaggtaattaacgtaagcaaaaagaattgaaagtgcccgcttctggggagtgggtggggctttggacagggaatttcttgttttgattttttaaactaactttatagaaccgtttgactcaacatagctttgacttaaaattttaagggtgaataaaagaggaagtagattaaacgagctatagactaaattttctttttttttttcaaaaaccagtaacatagtcatttattatcaatatcaagtatgtattgcacataatcgtatgtactatacttttttttaattattatactttaagttatgggttacatatgcagaacgtacagttttgttacataggtatacatgtgccatggtgctttgctgcacccatcaacctgtcacctacattaggtatttctcctaatgttatccctcccctagccccccacccccaaaaggccccagtgtgtgatgttcccctccctgtgaccatgtgttgtcattgttcaactaccacgtatgagtgagaacatgtggtgcttggttttctgatcttgtgatagtttgctgagaatgatggtttccagcttcatccatgtccctgcaaaagacatgaactcatccttttttatggctgcatagtattccacagtgtatatgtgccacattttcttaatccagtctatcattgatggacatttgggttggttccaagtctttgctattgtgaatagtgccacaataaatatacatgtgcatgtgtctttatcatataatgatttataatcctttaggtatatgcctagtgatgggattgctgggtcaaatggtatttctagttctagatccttgaggaatcatcacagtgtcttccacaatggttgaactaatttacactcccaccaacagtgtaaaagcattgctatttttccacaacctctttagcatctgttgtttcttgacttaatggatattagccctttgtcacatggatagattgcaaaaatgttctcccattctgtaggttgcctgttcactctgatgatagtttcttttgctgtgcagaagctctttagttgaattagatcccatatgtcaattttggtttttgttgccattgcttttggtgccattgctttgcccatgcctatgtcctgaatggtattaatacagcccaggttttcttctaggatttttatcatcctaggtcttacgtttaagcctttgatccatcttgagtttatttttgtataaggtgtaaggaacgggtccagtttcagttttctgcatatggctagccagttttcccaacaccatttattaaatagggaatcttttccccattgtttacgtgtgtcaggtttgtcaaagatcagatggtggtagacatctggtgatatttttgaggactccattctgttccattggcctgtatatctgttttggtaccagtaccacgctgttttggttactttagccttgtagtatagttcgaagtcgggtagcatgatgcctccaactttgtgcttcttgcccaagattttcttggctatgctagctcttttttggctccatatgaagtttaaagtcgtttttaccaattctgtgaagaaagtcagtggcagcttgatgaggatagcattgactctataaattactttgggtagtaaggccattttcacgatattgattcttctatccacgagcatggaatgtttttgcatttgtttgtgtcctctcttatttccttgagcagtggtttgtagttctccttgaagaggtccttcacagccattgtgagttggattcctaggtattttattatttttgaagcaattgtgaatgggagttcactcatgattgggctctctgtttgtctgttattgatttataggaatgcttgtgatttttacacactgattttgtatcctgagactttgctgaagttgcttatcagcttaaggagattttgggctgagatgacgggcttttctaaatatacagtcatgtcatctacaaagagggacaatttgacttcttctcttcctatttgaataccctttattgctttctcttgcctgattgccctggcctgaacttccaatactatgttgaataggagtggtgagagagggcatccttgtcttttgctggttttcaaagggaatgcttctagtttttgcccattcagtatgatattggctgtgggtttgtcataaatagctcttagtatgttgcgatatgttccatcgataccgagtttattgagagtttttagtttgcaaggctgttgaagtttgtcaaaggccttttctgcatctattgtgataatcatgtggtttttattactgattctgtttatgtgatggattacgtttattgatttgcatatgttgaaccagccttgcatcccagggatgaagccaacttgatggtggtggataagctttttgatgtgctgctggatttggtttgccagtattttattgaggattttcagctagatgttgatcagggatattggtctaaaattccctttttttgttgtgtgccaagctttggtatcaggatgatgctgacctcataaaatgagttagggaggattctctctttttctattgattggaatagtttcagaaggaatggtaccagctcctctttgtacctctggtagaattcggccgtgagtccacctggtcctggactttttttggttgataggctattaattattgcctcaatttcagaacctgttattagtctattcagagattcaacttcttcctggtttagtcttgggagggtgtatgtgtccaggaatttatccatttcttctagattttctagtttatttgcatagaggtgtttatagtattttctgatggtagtttgtatttctgtgggatcggtggtgatagcccctttattattttttattgtgtctatttgattcttgtctcttctttattagtcttgctagcagtctatctattttgttgatcttttcaaaaaaacagctcctggattcattggtttattttgaagggttttttgtgtctctgtctccttcagttctgctccgatcttagttacttcttgtcttttgctagcttttgaaattgtttgctcttgcttctctagttcttttaattatgatgttagggtgtcaattttagatctttcctgctttctcttgtgggcatttagtgctgtaaatttccctctacacactgctttgaatgtgtcccagagattctggtgtgttgtgtctttgttctcattggtttcaaagaacatccttatttctgccttcatttcgttatgtacccagtagtcattcaggagcaggttgttcagtttccatgtagttgagcaagtttgagtgagtttcttaatcctgagttctagtttgattgcactgtggtctgagagacagtttgttacaatttctgttcttttacatttgctgaggagtgctttacttccaactatgtggtcagttttggaataggtgtggtgtggtgctgaaaagaatgtatattctgttgatctggggtggagagttctgtagatgtctattaggtctgcttggtgcagagctgagttcaattcctggatatccttcttaactttctgtctcgttgatctgtctaatgttgacagtgtggtgttaaagtctcccattattattgtgtgagagtctaagtctctttgtaggtctctaagaacttgctttatgaatctgggtgctcctgtattgggtgcatatatgtttaggatagttagctcttcttgttgaattgatccctttaccgttatgtaatggctttctttgtctcttttgatctttgttggtttaggtttagagtctgttttatcagagactaggattgcaacccctgcctttttttgttttccatttgcttggtagatcttcctccatccctttattttgagactatgtgtgtctctgcacgtgagaggggtttcctgaatacagcacactgatgggtcttgactctttatccagtttgccaatctgtgtcttttaattggagcatttagcccctttacattttttaaaattatactttaagttttagggtacatgtacacaacgtgtaggttagttacatatgtatacatgtgccatgttggtgtgctgcacccattaacttgtcatttaacattaggtatatctcctaatgctatccctgccttcatttcgttatttacccagtagtcattcaggagcaggttgttcagtttccatgtagttgtgcggttttgagtgagatatttaatcctgagttctactttgattgcactgtggtctgagagacagtttgttgtgatttctcctcttttacatttgttgaggagtgttctacttccaattatgtgataaattttagaataagtgcaatgtggtgctgagaagaatgtatattctgttgatttggggtggagagttctgtagatgtctattaggtctgcccgctccagagctgagttcaagtcctggatatccttgttaattttctgtctcgttgatatgtctattattgatggtggggtgttaaagtctcccattattattgtgtgagagtctaagtctctttgtaggtctctaagaacttgctttatgaatctgggtgctcctgtattgggtgcatatatatttaggatagttagctcttcttgttgaattgatccctttaccattatgtaatggctttctttgtctcttttgatctttgttggtttaaagtctgttttatcagagaccaggattgcaacccctgcttttttttttcttttgctttccatttgcttggtagatcttccttcatccctttattttgagcctatgtgtgtctttgcacatgagatgcgtctcctgaatacagcatactgatgggtcttgactctatgcagtttgccagtttgtgtcttttaactggggcatttagcccatttacatttaaggttaatattgttatgtgtgaatttgatcctgtcattatgatgctagctggttatttcgaccgttaattgatgcagtctcttcatagtgtcaatggtctttacaatttggcatgtttttgcagtggctggtaccggttgttcctatccatgtttagtgcttccttcgggagttcttgtaaggcaggcctggtggtgacagaagctctcagcatttgcttgtctgtaaagtattttatttctccttcacttatgaagcttagtttggctggatatgaaattctgggttgaaaattcttttctttaagaatgttgaatattggcccccactctcgtcttgcttgtagggtttctgcaaagagatctgctgttagtctgttgggcttccctttgtgggtaacccgacctttctctctggctgcccttaacatttttgccttcatttcaaccttggtgaatctgacaattatgtgtcttggggttgctcttcttgatgagtatctttgtggtgttctctgtatttcctgaatttgaatgttggcctgccttgctaggttggagaagttctcctggataatatcctgaagattgttttctaacttggttccattctccctgtcactttcaggtataccaatcaaatgcagatttggtcttttcacatagtgccatatttcttggaggttttgttcgtttcttttcactctttttttatctaatcttgtcttctggctttatttcattcatttgatcttcaatcactgatcatttcttccgcttgatcaaatcgactattgaagcttacgtatgcttcacgaagttctcgtactgtggttttcagctccatcaggtcatttaagctcttctctacactggttattctagttagccatttgtctaaccttttttcaaggtttttagcttccttttgatgggttagaacatgctcgttaagctcagagaagtttgttattaccgaccttctgaagcctacttctgtcaacttgtcaaattcgttctccttccagttttgttcccttgctggtgaggagttgtgttcctttggagaagaggcattctggtttttggaattttcagcctttctgctctggtttctccccatcttctacctttggtctttgatgttggtgacctacgaatggggtcttggtgtggatgtcctttttgttgatgttgatgttgatgctattcctttctgtttgttagttttccttctaagagacaggcccctcagctgcaggtctgttggagtttgctggaagtccattccagaccctgtttgcctgggtatcaccagcggaggctgcagaacagcaaatattgctgcctgattcttcctctggaagcttcgtcccagaggggcacctgcctgtatgagatatctgttggcccctactgggaggtgtctcccagtaggctgactatattttcaaggagcttgactgaaggaaatttttcccttcatcccctagcccacaccctaatcctgtaattactttattctaagtatctcaagtatatcccatcttttttcattcaaataagttcttgcctcttggtctactaacctccctaaatcctgcccttctccagtgtaatcagatgtgatcttttgagttctttggtcaaaattatccattaaccttccatttcctttaagataaaattcaaaacctttaatatgaactgcggtattcaatgtgatctgacccctgcgccccatctcatctttcataccttcaactccagctattctgaactctgtttccataggttatcatttattctttgtgtcctttctacttttgtacacttagaagcccaatctccgtcagttcatctgactaaattgcttcttatccctgaggatcaagcccaggatgactggactgctaccaagactccctgtccctcctcttaccactcaccaaaatgtgttcttcctttgtgttctgtaaaatctcctgcatgcttgttatcacatttatcacactatatttttattgtttattccctttccaacctgactcttccttcttttgtcctcctgtggttgagcttcttgacttgctgagacaatggtctttttttttttttccttccttcacctttctcatccccattacctagaaggatgtccagattatagtagttactcattacacgtttgggatggatgaacagatagattcatggatggatgtcttaagatttgaggccaggcgcgatgactcacgtctgtaattccagcactttgggaggctggaagccagcagatcacgaggtcaggagatcgagaccatcctggccaacatggtgaaaccccatctctactaaaaattcaaaaatgtagctggatgtggtggcgcacacctgtaatcccagctagtacggaggctgaggcaggagaattgcttgaacccggggggcggaggttgcagtgagccgagatcacacttgcatcactgtacttctagcctgggcaaaaatttttttttttttttttaatatggattctcgctctgtcacccaggcggaggcttcagtgagtcgagatcgcgccactgcacttcagcctgggtgacagagcaagactccgtctgagaaaaaaaaaaaaaagaaataaaagaccagaaagtagattaatggttgccagaagatgagggtagagaggataaagtgtgacagaatgggtgtgggcttctgtttggggtgataatgttctataattaggcaatggtggttgttgcccatccttgtgaataaagtaaaaaaccactgaattgtacactttagagaggtaaattttatggtatatgaattatatatcaatttgaaatgaacaaaaaaaagatgagatacagtaaaatgtttagcatttgacaatactgtcatggttcttagggaagagacttgttcataaggaaatttatgcctgtcagaacaagtaagttttcaaattaaaaggtgaagacattcaaaaaatctaaatggtcatctaaacgtctgttggcggaaaatctatttctagctcaattgtaggacatctgactttgcattcgataaaatagtaaggaaatattctgcttatagttttaatttttctggcttttgttactgtttgtcctaaatttttgtgataccagaaagcttttcttttctttctttctttctttctttttttttttttttttaaaaaaaaaaggttcaagttattctcctgcctcagcctccagagtagctgggattacaggcatgcaccaccacgcctggctaatttttatatttttagtagagaccgggtttccccatgttagccagaccagtcttgaactcctgacctcaggttatccacctaccttggcctcccaaagtgctggcattacaggcatgagccaccatgcccagcctaaaaactcagttattgatggtagccgagagatgagagcttttactcatatttttgtttttgaggagggaggagaagaaatcctacccatcctttgtgttttcttcagatcttcctcagcactcatacagaattaactgcatgcttccatgtcatttctaatgtactttttatatgcctctgtccttctaaaaagcagatctggtcgtgtcaccccctactttctcttctgcgattccccgttattcttgggttaaagttcagtcatggcttacaaaggctttctgatctggcctggcttgaggctcctcggtcagtcctccattggacttctggttccctccaccccttgcttccatggatgcggtgtcatctgcctaaaaaagtcttctccctacccttgaatctggctaactgcttctagcctttcaggtttcatcttagcattttctatggtaaatcttccctgaccaaactccccatccctccccagtttggaatattcctcccctatactgctgtggtacccagtgatgccattagccaattacttgatcatactccctgccattgactgtagctgccactggacagtctttgtccttctccttatgttttatccaccagttcctaacactgtgtctggaacacagtatgtactcagtaaacatttgcttgtttcttctaatagcctatctgtgaaacgcattgccaagcagatatttaactgaatcagtgattgatgactgtatttttttgtctaggagtatatagtagccagagaggaatgtacccccctccaaaaatgaatatatacatacatcttcatgttctacatcatcccaagtctctgctctatctcaccaactgaacaatttaaggctcatttttgcttagtttcagaaattggatcacttatcaaaatatttttatggaagcttcaaaaataaagtaatatttagtcattatctgcaagaataggctttagatattttctagtgtaacatgtgttaaaacagttgtataaagtggaccttatgggctgggtgcagtggctcactcttgtaatgccagcactttgggaagccaaggtgggtggatcacctgagggcaggagttcaagaccagcctgaccaacatggagaaaccccatctctactaaaaatacaaaattagccaggcatggtggcacatgcctgtaatcccagctactcgggaggccgaggcaggagaattgcttgaacctgggaggcagaggttgtggtgagccgagatcgcgccattgcactgcagcctgggcaataagagggaaactctgtctcaaaaaaaaaaaaaaaaagtagaccttatagtgtatgtgtcaagtgttttaagggaatcaagaggctgggcatgctggctcgcacttgtaatcccagcactttgggaggccaaggcaggggaattgcttgaggccaggagttcaagaccagcctggcagcacagtgagatcccatctctacaaatttttttttttttttttgagacagagtcttgctctgttgcccatcctggagtgcagtggcgctatctcggctcactgcaacctctgcctacggtgttcacgccgttctcctgcctcagtctcccgagtagctgggactgcaggcgcctgccaccacgccggctaattttttgtattttttagtagaaacggggtttcactgtgttagccaggatggtctcgatctcctgacctcgtgatccgcccgcctctgcctcccaaagtgctgggattacaggcgtcagccaccgcgcctggcaatttttttttaaatgaatgaatgaatgaagataaatatgcctagaaactagaacctgggcgactctcctccatgaaaccgatctatgaaagcactgttgattgtgagatctgagactgaatccaccaaatctgagcttctggattagactttttggttcaagcagaatttagctcatataacctatttatattttccttgaaaaccttaccaaggatcttaatttttcattttttcttgactttttaatggtttttaatttatagctctaaaaaaattgtcatttaagaatcgcttgaacccgagaggtggaggttgcagtgagccacgatcacgccgttgcactccagcctgggcaacaagagtgaaactctgtctcaaaaaaaaaaaaaaaaaaaaaaaaaattgtcctttagtaaaaacgacaaaaatatatctgaatagtcatccttttatttggcttgcatttttttccttttatctaggaatgtgatggcattttatcctactttgtttgttatctgatgtgaatatgctttgtctgactctgtataattggcttttgtcatttaacgttgataataaatttcgtactgttctaactggagtttttctttgtttttttttttcctctcctatctagttgttgtggaattataagctgaacctaactacagatcccaaatttgaatctgtggccagagaggtttgcaaatctactataacagaggtaagttgtcaaagaattttgtagacaactaatggcttagaggagaaaattaccagaccagcccttatgagaagaatgactcagttacattacttttcttagaattcacatctgtcttggttgaaaattaggaagttggggggtgtaattagactctttttgttaatgtccacctacgcttacattaggatactattgattgaggcagttggaaatcaggttctattggtctcaaaacagcaagtaaaagtgctgaggtatcagtgctactctcacacattggacaacatgctgtgtctgaagcatatcagcctggttacaggaggtctgtcagcattcctgttttggctatgcagctggatcaattgacccacagaggtatatacttcaaataataggagttagtgttaaaaaggttaagattttaaaaattatttatcttggcccagtgtaaacaacaaataatattagtgaaaattgtggtactttaaatttcttttttttttaacggttttttttttttttgaatcaataatagaaactccaggaagccagagtttctgcatactgaaatatgagaatcacagagaaaacagttgctatttttccaccccagaattaacagtcatagatctcacaccatactaattgtcctcaagctggccctattgatgaattaagtcagggccacattcttcagagctcttaaggaagaccctgtctcatccagataaaccatcagcctgtgttccttgtgtcattatggggactcgtagaacctgttttctcaaactttctaatactagatcagttatgttttattcttttaaagcagtgacccctcatatttaccttggggcttccgagcagaaaggcatatcgttgaaaaatttatctttagctcctagctttaatattctacatctcaaactcccttagctagctataggactaaacctctaactttaaaatatcaagggcaaagatgtttgcttaataactgaactaaatactaacaaattattcctaggcttgaactttaaatgtttgtattttccctctatattgtggtactatacaattgtaagtagatttttttttttgagatggagtcttgctctgtcgcccacgctggagtgcagtggtgccaccttggctctctgcaacctctgcctcctgggttcaagcagttctcctgcctcagcctcccaagtaactgggattacaggcacatgccaccaggactggctaatttttgtatttttagtagagacagggttttgccatgttggccaggctggtctcaaatcctgacctcatgtgatccacccacctcaacctcccaaagtgctgggattacaggcatgagtcaccgtgcccggccataagtagtttttttttaaaaaacacattggagagatacatatatatatacccgcatatgtttgttttgccccattttgtgtcccattaaatacataccagtttgattggcccagggaaatttagttgagtatgtacatattcactagaataatttcactctttgcattaggctggtttccatataatgtgtgtatcacgatggtcctctgtgaccttttggggtgttctagttttgtaaaagattagcattaacaaggacacttctccctcccacaggaagattatactggagtcagggaaattaaatatcaggaagaacacagtctccagcaaaacatttcattctgtattttcattctatcatctttcttaattttggaatcctacttccagggagaaaaacaacatcacaagaatacctgtaaactattaatacaaaccaaacttaatctccaggattgagctaaatcctgcctgctttccttctggctccagtcaaaaaatagagtgactgcagcattttgctcatggtaccttttcaatctgctccccagccacttcagagtttactcctattcttaaatatgttgatgatgatttagtgccccttttttgctgttcatcttagaagtttagtaagatagaaggaaaaagtgctatccagcagaatgaagaaacatgcaaacttctcattctaacaccacgccctgttgtaatggatagtgagctgaaaaatgagtaggtgccacatctctgtttcagtaaaatctcaagtgattgaagctaaaatttacatttagtttcttattgaggctacagttcaaaatgtgctcctggtttctcttgagtttttttttttttttttttttttgagacggagtcttgctctgtaacccaggctggagtgcagtggcgcgatctctgctcgctgcaagctccgcctcccaggttcatgccattctcctgcctcagcctcccaagtagctgggactacaggcacctgctaccacacatggctaattttttttttgtatttttagtagagatggggtttcactgtgttagccaggatggtctcagtctcctgacctcgtgatccgcccgcctgggcctcccaaagtgccgggattacaggtgtgagccaccgctcctggcctcttgagatgttttaaaacttttggttgctcaatattagggcctggaaaaatgtttctctgtttcattaagtgggtgtctgccactagtcttgttttgtatccagtgtttttctgtggttgaattacaagtgctgggattttcaagcatctattcctcctttcacttttcaaacttaagtctgttttgttcggcaaaaaaaaaaaaaaaaaaaaatcttttccaggaaatacagtcctggccctcttttttttttttttttttttttaagatggagtctctcattgtcaccggggctgaagtgcagtggtgcaatcttggctcactgcaacctccacctcctgggttcaagcaattctcctgcctcagcctcccaagtagctgggactacagatgcgtggcaccacactcagctaattttgggttttttgtttatttgtttagagaagtagtctcgctctgttgcccagggtggaatgcaatggctcaatctcagctcactgcaacctccgcctgccgggttctagcaattctcctgcctcagccttccaagtagctgggactacaggcgcacgccgccacacctggctaattttttgtattttattagagacaggctttcaccgtgttgcccaggctggtctcgaactcctgagctccggcagtccacctgcctcagcctcccaaagtgctaggattacaggcatgagccaccgcacctggccaatttttgtatttttagtagagatggggtttcgccatgttggcgaggctggtctcaaactcctaacttcaagtgatccacccccctcggtcttccaaagtgatgggattacggacatgagccaccgtgcccagccatggccctcttttaggcatcacaaaaacttacttggggttaaactgaaagaatttcattcatcttgactgttgaaaatctctgctgtctctgaaaccagtgtgagactattatttactaaattcccaagtttgcccctttagaagtaaacacaactttcttttctgaactgagttatttacgtggtctggatttgatactggagttagaggtgaagacaacctgttgcctataggataattcctcggtggtgtgtccttcatccagcaccttttggaagaggagattgtgtttgttttgccctatgggcatgcttgtgatagataggcctaatggggagaatgctctctattgcattcaaaggacaaataaagcactgtttcttgtttatattcaaaataaacattcccatttaactccttcctcttgtcagaattgccacttcagtttgtcttaatttccccaaatgcaataggctcttttccaaacacccttctctgttttataatttaagcttataattctattattaggttttacttttgcctgaatttcagcatttgggggctagtttgctttattagcattttgtggtttggaatgcactttgcaggaacaccaccatgcagaatcactctgtgcctgatccactagatcatatgtctaaaccatccaaactaggttccccttcccaaacttcttgctaaactgcactgaacattattttaaacatgtttcccagaccacatgtgtcccagaccacagcggttaagtttggattctactgatttcaaaaacacatgttcaatccatagttaatttagaacacattaatgtcatgtcaagaagtaggccaggtgaggtggctcacgcttataatcccagcactttgggaagccaaggtgggtgggtcacgtggggtcaggagttcgagaccagcctggccaacatgacaaaactccgtctctactaaaaatacaaaaattagcctggcatggaggtgagctcctataatcctagctactcaggaagctgaggcaggagaatcacttgaacctgggtgccaggggtttcagtgagccgagatcatgtcattccactccagcctgggcgacagagcaaggctctgcctcaaaagataaataataataatgtcatgtcaagaagtaatattacaccttccctcctgtctctccttggcccttaggtttgcctaacaataatagttttctgtgtagcttggcttagggtatgcagctggacttcacttttgcacctgtttgtcaaatcttcctccctagattcatcccctcgctgtctcctgcattttttgcatggttacaaggacttcataggaccatgccaaagctgtagatgttaacagctcttttcactgcatttagaagtgagcattacctaagcatttgatatgtaggtattcttttgcaaaacacattaatcaggtttttctagaaggcacaacagtctgagtagggatgacactatttttctttaaaatgaatgtattcctaaatgttttccttggatatatttctaagcatttttctttttttcttccaagtaaagaattaggaaatcaacaggaaaatttcagacatttttctctttgataaatattgtttgatacgagcatggaacacttttgtaaaacagctactttattttgagcagattaaagaatgtgctgatgaaccggttggaaaaggttacatggtttcctgcttggtggatcaccgaggcaacatcactgagtatcagtgtcaccagtacattaccaagatgacggccatcatttttagtgattaccgtttaatctgtggcttcatggatgactgcaaaaatgacatcaacattctgaaatgtggcagtattcggcttggagaaaaggtatctaatactacgttagcttcaacaaaggggtcttaaaatttggtgtatgaaaagctttgtataactgacatgggaaaaatttaggactggagtgaccttaagttgaaattgaagaaacttgtccagacagccctaagagctaaggctggttgacaatgtatttcatgtgtttgtagcaaaatttttcagtactgtatgggaagcagaggaattaatacctgcaaagagtggtgttatcttcacaatattagaccagctgctggttacctgtaatgtgcctctggcaaaggagagacctgagttctctaatattttttttttgaaacagagtctccctctgtttcccaggctggagtacagtggtgggatttccgctcattgcagcctcagcctcctgggttcaagtgattctcctgcctcagcctcctgagtagctggaactacaggcatgcaccaccacgcctggctaatttttgtatttttaatagagctggggtttcgccatgtcggccaggctgatcttgaactcctgacctcaagtgatctgcccgcctcggcctccgaaagtgctgggattacagacgtgagccaccggtcccggccaagttcagtaatctttctctgcatatgtcccactgttagtataaaaaaaattactggccgggcgcggtggctcatgcctgtaatcccaacactttgggaggctgaggtgggcagatcacgaggtcaggagatcaagaccatcctggctaacacggtgaaaccccgtctctactaaaaatacaaaaaaaaaaaaaaaaaaaaaccaaaaacaaaattagccgggcgtggtggcaggtgtctgtagtcccagctacttgggaggctgaggcagaagaaaggcatgaacccaggaagtggagcttgcagtgagccgagatcgcgccactgcactccagcctgggagacagagtgagactccgtctcaaaaaaaacaaaaaaaaaaattacttagcacactggctgctgtccatctataaaatatcagaaaattttaagatatgtgaaggtacttctagttagttggaagaaaagtcctctctaaatgtgatatattattaatcttcatctcagaagaactgattttagtaaagacaggaaagaaaataactacctagctagtttcttcttccacagttatatctgatcttattttttgacttagtctgctgaacagaaggtcacaatagagatctggccaggtttattctgaatttgtttgctcagcaaaaatgaaaaaaactcctgaaaagtaatggatgccagtgggagagggaccctgagacctgtggcatcacctattagttgctgctgctcattaatctactgttcaggaaatatgatggaaaataaaacccatttgtccctttgccctctatttgttcatggttggcaggcgtctatcactgacaaaggggacatggtgttaggatcctggaactgagcacaccgttcaaatgaagggtttcttgctgtgtattgtctggctgtcaccaaagccctgatgccctttccttaatatgagcacagggcctgatcccttatccgagtgtaccactgagttggtcttgaaaaactctgtggcttggcataaatctttcaggcaaataaagaaaggacagctttaataaagaacgcagtgttttccttcccagcagactctcaaaatgacacaaaagcacttaagtcactgatgattcaggaagctcttctgactttatttaggatgttgaaaattatatccaattccaaacctggctccttttaaagtctccacagggttccaaacatacttttcaggaatcagaaatgaggctttttcaccctcgtgatgagtgctccatgcagtaaagccaagcgtttcagtccctctgtggagtagttcttgcctggtaaccaccaaggtagcagctgattagcctccttctagctctctgaattgtcacctccatgtatgagttactaagtctgtagtgactgaaacgattgcagaaaatagtactgctggagccaaaaggcacgacaggattgtttattcacttagataaaataataaaaattgttcctatggactaaagatagaaatgacacttttgtcatttaatctttcagtatgtctaccagttgggtgaaatttcagtttataccaggtcactacaccagcatcaaaggctttcttgtattttggggacggtgagatagactcacacatgaacttctgaaaaaacaccttccttcctatatcattcactctgtactacagccaaatttaaaaaagagggaggcatgttctcagctcttctctgcctttttctaaaacccgtagtttgcttttctgaagccagttattcagatagaaaacttatactgaaaattaacaaagcagcttctgaacacagaaaacaacaggcttgtcagtttcaaatttgctgccactgaagcttgaaactcttctatgactggctttgacttggcctcctccagaggaccgaggagaggattcatggttaatctgtttgtaccttgcctttgtatgaacacataaatgtcatgatttcaaaactatgattttttcaaatgttaatataaattttagaacaaagaagatacattaataaaggctttagaattttatataataataaatgttgtcaaaatgaaagggcagatttccaaaagtaaagatataaatgatttacatcatctgaagaaaaagactgtggctgccaacaaaggaacttaattgcggacatgtgccacagtattagtacttttatgcttttctctcggtagctgtatcatttattatttattatttcatttattatttcctgcttttaaccagttaatttgagtaattctaatattcctttttcctttatctagtgaggtagattacagaagacagcagaaggattgaaatagagaatggtttatagcagagataaaaactgagttctcgcctactatttagagattagtgttagcatctgttgttggtttttttttttgtttttttttgtgggggccgttgttgttaaaggacacggaatatggggaagaaaaatactgcctatcaaacttctaaaaacggatcaaggcaatggcagtagattttaagcagatgtttttctaccataataaagttaacaaaaaattattgtaagttcatttataggataatttattactcatatgccaagcctgtgtattaataactttttaaacctaaatgagcttattttctcataatgtgcaggtgtgtagttcacctcactttaattaatgtttggtaactaaccatgcagtcttcgctgtcaaatatttatatgcctttcagttataaactccaatgcactaaaagctcagagactccgaggaactcctgaaatacccttatttgaaaaaaatatttatctgaaagttacaatgaatggaaacatctagtagagaagtattgtttttttttattttggtgttgttgttgagacggagtctcactctgtcgcccaggctggagtgcagtggcacaatctcggctcactgcaagttccgcctcccaggttcatgccattctcctgcctcagcctcctgagtggctgggactacaggtgcctgccaccatgcccggctaattttttgtatttttagtagagacggggtttcacagtgttagccaggatggtctctatctcctgaccttgtgatccacctgcctcggcctcccaaagcgctgggattacaggcgtgagccaccgtgcccagccagaagtgttgttatgacctaatgccagtgtagttacatttagtcacacgttgcttatcgatgaggatacaatgagaataccaggacacgttctgagaaatgtgttgttaggcaagttgatcactgtgtgagtatcatagagtatagcctactacacacctaggctatgtagtatagcctattgctcctaggctacaaacctgtacagcatgtggctatgctgaaatactggagacatttataacacaagtatagtatttgtgtatataagtacatataaacataggaaaggtacagtaaaaaacacagtgttccatagctgagggtggtggtgtgtgcttctagtcccagctgcttgggaggctgagtcaggagaatcacttgagcccaggagcttgggactgcagtgagctgtgatccctccactgcactccagcctgggcaacagagcaagaccctgtctcttaaataaataaaaatgaaagttaaacaacaacaacaaacaagttttaggagttttatagactccacccactcacccagattaaccccataaataaataatggactgttagctagacacttcatgttctacaactcaaatgagttagttaactcctctgagcctctgttcattcatgtccgcagtagatatcagagctgtgtcctttcttcatatgtgtgttaggagataacacgaaagctttcatggaaacacttggaaattaaggtgctatagacaaatcctttaattaaaatagaaaaaaatacattctttggttgatttgaaattttgtctgaagtagatgttacgctacttggttttaggaatctttttttttttttttttttttgcctgagacggagttcactcttgttgtctatgctggagtgcagtggcactaactcagctcactgcaacctccgcctcccagattcaagcaattctctcgcctcagcttcctgagtagctggggttataggtacgtgtcaccacacccacctaatttttgaatttttagtagagacagggtttcaccatgttggccaggctggtctcgaactcctgacctcagatgatccacccgcctcggcctcccaaagtgctgggattacaggcatgagccaccacgcctggccagaatctttttattatatgcagattatttcatagataggtattttattataacaagattttaattgcgtgtgtataaatgatagcactatatataaaatatatatataaaatataatatatatatatatatatacttttttttttttttgagacagagccttgcactgcacctcccagtctggagtgcagtggtgcaatctcggctccctgcaacctctacctcctgggttcaagcgattctccttcctcagcttcccgaatagctgggattacaggtgcacaccaccacatccagctgatattttgtatttttagtagagacagggtttcactgtgttggccagactggtcttgaactcttgacctcgtgatccgcccaccttggcctcccaaagtgctaggattacaggcatgagccatcgtgccgggctaatagcactatattttaagatgctttggtttgctatattagtggttataccttaaattgttgaaacatatcttgtaagtatagattaggactcttgaatagaaaatatttaggggaactatctcatattttgcatgaatgaatgtttgtggttgctatggggatgatgaagtgtacaattaaagataattggatggtttttaagaaaactctcagaagcgttttgtgtaaacagtggtaatcttgttaaatcccattaagataaatccagaacatcaacgtgagtattaaacaacagattctacatattgggatgtttgtggacaccacagagtagggaaaggagcaagaaagtctctaacttcttagtggattatgtggtttgttggtttttaacttgactgaaagcactgttggccgggcgcagtggctcacgccagtaatcccagcactttgggaggccgaggcgggcggatcacgaggtcaggagatcgagaccatcctggctaacacggtgaaaccccgtctctattaaaaacacaaaaaattagccgggcgtggtggcgggcgcctgtggtcccagctactcaggagactgaggcaggagaatagagtgaacccgggagtgggagcgtgcagtgagccgagatagcgccactgcagtccagcctgggcgaaagagcgagactccgtctcaaaaaaaaaaaaaaaaaaaaagcaagcactgttatttgggaaatgcctggtttttagagacaaatgaacagagatttcagcagtgtaatttcagtcttgacatgaactatgaccagaactttgagccgatgtggttttttgtgtgtgtgtgtgtgtgtgtgttttttttacagagtttctgtcttgtcgcccaggctggagtgcagtggcacgatctcggctcactgcaacctccgcctactgggttcaagtgattctcctgcctcagcctcctgagtagctgggattacaggcgcacaccaccatgcctggctaattttttgtatttttagtatttttagtacagatgggccttcaccatgttggccaggctggtctcgaactcctgacctcaggtgatccacctgcctcggccttccaaagtgctgaaattacagacatgagccaccatgcctggccctgttgtgtttcttatgaatttttgacattttaaatttttaaaaattcaggttcttatttctagtgctaactaaactataatacttaaactttccaggatctctgtttccatttgtagcatgcaagtattatattctaactgaagattattgagagcattttctttaacttccacaatgtggttggttcttacttgatttcttggtagaacgttaataagtcaactctatgatggggttttattactttgtgtgtgtgtgtgtgtgtgtgtgtgtgtgtgtgtagccaaatgttgtttatttgaaacccatgtgataaaagttttaaaatattaatatcctcgctattttaggatgcacattcacaaggtgaggtggtatcatgcttggagaaaggcctggtgaaagaagcagaagaaagagaacccaagattcaagtttctgaactctgcaagaaagccattctccgggtggctgagctgtcatcggatgactttcacttagaccggcatttatattttgcttgccgagatgatcgggagcgtttttgtgaaaatgtgagtcagctcagaaactgttcttttcttccttttatttttacacatatataattttgttttaattaatttaattgtgttgttttttgagagattgagtcttgctatgttgcccaggctggtcacgaacttctgacctgaagcagtgctccagctcagcctccccaatttttgagacaggatcttgctgtggtgcccaggctggagtgcagtggtgtgatcatggctcactgcagcctccaacttctgggttcaagcgattcttctgcctcagcctcccaagtagctaaaaccataggcaagcaccatcttgcctggccaatttttttaaaaattttttgtagagatggggcattgctgtattgcccggactggtcttgaacccctggcctgaggtgatctcctccctctgtctctgaaagtactaggattataggcacgagccactgtgacttaaatattttttaatactctattctaacgtaaaataagccatcaagaaacctcacatgtagaaaagccacagaaatggaagaagaaattggtcccagtatagcagaaagtggtaactggatgctcaaccttgatgactgaacatttggttaacagctggcttctaatgatctccacttagtattttttctgctttatctcacttctcaatttcagttcttggaagtctgttttatctataggaattttattttacccaggatcttatttacatctattcaatggctaaaactttgacgcattatatatttatgtgtttttggctaaggtgaagaaaacagcaggtggctaatctttaaaaccaaatccttgattaccacctgctgactctacagaacagccttctaagtctttaaatagaatggtctctccatccttacaacaaagtactgaaagtaacttgtgtacacttccactctgcctgctggtttgcattaacagctttaaccatcagagccactgatgtaagagtttcgttaactctagcatacacttgtaagaaagaagactcagaggctgggtgcggcggctcacgcctgtaatcccagcactttgggaggccgaggcaggcagatcacttgaggtcaggagttcgagaccagcctgaccaatatggtgaaaccccatctctactaaaaataaaaaaattagttgggcagggtggcgggggcctgtaatcccagctacttggggctctgaggcaggagaattgcttgaacccaggaggcagaggttgcaccgagctaagattgtgccactgcactccagcctgggcaacagagcaagactgactctatctcaaaaaaaaaaaaaaaaaaaaagactcagactctaacacttctcttggttccctaattaacaaaatacatctgagaacaaatgacaaactccaaatatcatgggaatatttttttcgtctttactgcagtcactgtttttgttaaaagcctattaaattttataaatggaagcgctgtttgtccaaaggtatgtacgattataatcgtttaatagaaagctctatatgagattgtggataatgttcagcataactatttagctaaagtaataataatgtgtatgttccatcttatagacacaagctggtgagggcagagtgtataagtgcctctttaaccataaatttgaagaatccatgagtgaaaaggtaagtattattttgaaactaatgaatgttttatttgttttttaaaagctttctcagccagacacggtggctcacgcctgtaatcccagcactttgggaggctgaggcaggtggatcacgaggtcaggagttcaagaccagcctggccaagatggtgaaacgccgtctctactaaaaatacaaaaattagtcggccgtggtggtgggcgcctgtaatcccagctactcgggaggctgaagcaggaaaatcacttgaacccaggaggtggaggttgcagtgagctgagatcgcaccactgcactccagcctgggtgacagagtgagactctgtctcaaaaaaaaaaaaaaaaaaaaagctttctcaatttctctgaaacaatatttcttataatcttataccgaaacgtaaatgactgataaagctcaccgctttcagaggtgaggtacttgggttttaagcatatttggctgaaaccaagaaaatgaaaccctgattgtgatatctagatagtgagaagccaagtagggttctcactgtggtggtttttttaggtgtttttgttttgttttgtttttgtttttttttgagtggagtctttctctgtcacccaggctggggtgcagtggcatgattcggctcactgtagcctctgcctgccgggttcaagcaagtctcctgcctcagcctccctagtagctatgactacaggcacctgacaacacgcccagctaatttttgtatttttagtagagacggggtttcaccatgttggccaagctgctctcaaactcctgacctcaggtgatccacccgcctctcactgtggttttatataaaatcctcagtgtgattttatataaaattctcagatattactttgtttggggagtaaaatcagagaattttatataaaaccacactaaggccagccctgcctcctcaagaagtttaggttaaccaaatcaatgtgctttctaggcaattagctatttaatttttcagcagctatatcattaagcatcctcttttagttctttgtccctgaatgaatgcaagaatagttgatggcttttgaaataattaattttgctatcttgtcatttactttcctgtgtagctgaagaaatgtttctcatttcctttttcttgtatcatttgaacaatcttattcaaatcttattattcagatgatatagaataattgaataattgtattttaaagcattgaacagaatatcccaaatgttatgttagttgccagtttgatgctagtgaaatttatgttcggggtattgttaaagtggaaaagaatgctgtgtgtcaagttaacatattgggatctgtgagatatttacatgttttggatagctgctattgcagcaacaactagcaagtgactacagaatttctaggttccccacccacttacccctgtctcatgccacactagtttagctcaattgtgaacattttaaccaaacttaaagatagatatgttggtaataactgcagttgttgacatgtacttggctgagtcgctgtgctcatcttagtggtacacgtcaacagtaaagttacatgagtggtctcacggctgttgctgtactctttcctcagtgtcgagaagcacttacaacccgccaaaagctgattgcccaggattataaagtcagttattcattggccaaatcctgtaaaagtgacttgaagaaataccggtgcaatgtggaaaaccttccgcgatcgcgtgaagccaggctctcctacttgttaatgtgcctggagtcagctgtacacagaggtagcattcatattttttttttaattatcatttctgttcctttttggattcacactctaaagctttatatatataaacgttagtttcctcccatatttgcttctttgagtatttttcttttttttttttttttcttgagacggagtctctcgctctgtcgcccaggctggagggcagtggcgcaatctcggctcactgcaagctccgccttccgtgttcacgccattctcctgcctcagcctcccaagtagctgggattacaggcgagtgccactgcgcctggctaattcttgtatttttagtagagatggggtttcaccatgttggtcaggctggtctcgaactcccaaacttaggtgatccgcccaccttggcctctcaaagtgcttggattataggtgtgagccaccgcacctagcaatttttttttttttttaatagagatgaggttttgccacgttggcatcccgggtctcaaaactcctgccctcacgtgatcctcccaccttagctcccagagtgctaggattacaggcgtgagccactgtgcccagctgaatagttttcttgtcttttcttttttttttttttgagacagagtctcgctttgtcaccaggctgtagtgcagtggcacaatctcagctcactgctacctccgactccctagttcagcctctggaatagcttggattacaggcacgcaccactatgcccagctaatttttgtatttttagtagagatgggatttcaccatgttggccatgatagtctcgatctcctgacctcgtgatctgcctgcctcggcctcccaaagtgctgggattacaggcgtgagccactgcgcctggcctagttttcatttttgaaatacacattgtgcaacattttgaggagactcagggtagcatgatttagcacatgggtcagacttggcttcaaattttggctttatcactaaacaaaccgtctgggtgacctgtttttgttttgttttgttttgttttaatctttttgttttaagttttcctggccaggcgcggtggctcacgcttgtaatcccagcactttgggaggccgaggtaggcagatcacgaggtcaggagatcgagaccacggtgaaaccccgtctctactgaaaatacaaaaaaattagccgggcgtggtggcaggcgcctgtagtcccagctacttggagaggctgaggcaggagaatggcgtgaacccaagagacggagcttgcagtgagccgagatcgcgcgctgcactccagcctgggtgacacagtgagactccgtctcaaaaaaaaaaaaaaaaaaaagttttccccattggcatttacagctcaaagaagttgggggagcttatagtgaatatcttaaatgtagtcttttctaaaagctttaattgtgtaggccaatggagattgttctttggctttcatttttaccctaatagttatcttattgataggatttccatgggcaaagcatttgcattattagtgcagtagtataaaacctgtttcatgcagaacagtgacaggagaagcctgaatatctggagtctaagcctattttatgctgctaaagcttttgctaattctaaacttttcagatgttagcatgtctgataggtatattgtattacagatagaaatatgtacttttaataggtggtgatttctgatgctaatacatagcatcacccttcgtaatgttatgacttacatcctaacttagggcgacaagtcagcagtgagtgccagggggagatgctggattaccgacgcatgttgatggaagacttttctctgagccctgagatcatcctaagctgtcggggggagattgaacaccattgttccggattacatcgaaaagggcggaccctacactgtctgatgaaagtagttcgaggggagaaggggaaccttggaatgaactgccagcaggcggtaaggagacattgctattgccattttgaatgtcacatttatcagctgaagagcctcttcctgatgctgtcccaccttgctttatatggatcatctgtggtatcacattgaacattaggtactaatgatcagagactgaacgttgcttcttcaggcatatcttagtaagaatgtgacatttgctacagagcaaaagtttgagctcataatcaataaaaagaattgtcttcttagatagatagaatgcattatttgctagagttcctaaagaaagggcagcttgctagactggatttcctaaactcagaatcaaggcaaaccaggttccaatcaatgacgacaggccctctaccaagagagaatttgcctgttgtaatagatttgattgagttgaggctgaaaaagagttgatatgaattgaaattttttctaagtttctaaattttttctgttactaatttaccgcatggcatgaattcctggcctgaaggatcaagagagcatgtcatttttgaaatcacactatcttttcttcatatactagggcaactatgcatggaagagccattttctttttaatttaatttaatgttaagttccaggatacatgtgcaggtttgttacatgggtaaacgtgtgccatggtgggagtcctttttctatcactaaacctcacagttagcatactttgcttggggagataaagttcttcttgatctagcgtttataaacagttgaataactgtaggtcaggtacaaaacacaagttaatgtattagagatttagtacatccctttcattcctgttgtccatgttgattactttttactggataggagtcttagagcaacttaacgtaccatgtgcaccagtgtgccctgtgcagtgaactttcctttggggagcacaagagatagtttcgctttatatcctagaatagtagaaacttgaggctctcctccctcagtgtaactttagaaagccacaatcagtctattattttatagttagcatttttattaaaaactggatatcaactcgaattttattttcctgataatcgtgtaaaatcagatttttacagtctgaaacaaaactttgcggtctgaaacacaacagttttacagaatttggatgtggagtaaaattatgtcttagctttagttactcaccttgacccagagtagacaccagtgcatgtgtgcacgtgtgtctgtgtgtgtgtgtgcgcacgcatgcgtgtctatgcatcccatggtgggaaaacagacaaatgtaacttctttaaaataccaacctgggcaggagggaaggcttctggaatctgccgtttgattttgccacagtgttgtttctagggtgcagttgttactggtgacttccttgggaaacctctgtgccagtgtgggtcctgggacccagaccaaaaatgaatcaggagacagcctatatttgcacttcatccttaaagcagcacagaaaggttgttgtggcgggggttaggaatgaacctaccttttttttttttgagacagagtctcactcttgttgcccaggctggagtgtaatggcgcaacctctgctcatagcagcatccacctcccgggttcaaatgattctcctgcctcaacctcctgagtagctgggattacagttgcccaccaccacacccagctaatttttgtatttttagtagagatggggtttcatcatgttggctaggctggtctcaaactctggacctcaggtgatcttcccgcctcagcctcccaaagtgctgggattacaggtgtaagccaccatgcccggcctaaacctgtctttttactgaggctacacttgtagtaagggatacagaaaaaagaaaatagactggtttgactttatttcgaggcacctaattcacacccagggctttttaaaatgtagcttgttgaaagaactagtgactcagcttgaaagatacataagtacttcccacatcaccctgtgtgtccagaagaaaagtactttccaaatctagagggtggcttcaagtagtgaaacatatggttttgcccatattaaatttagccaagtgaggctgggcatggtggctcacacctgtaatcccagaactttgggaggccaaggcaggcagatcacttgaggtcaggagttcatgaccagcctggccaacatggtgaaactcagtctctatgaaaaatacgaaattagccgggcgtggtggcatgcacctgtagtcccagctactcgggaggctgaggtaggagaatcgcttgaacctgggaagcagaggttacagtaagctgagatcacactactgcactccagcctgggcaatagagcaagactccacctcaaaaaataaaaaattaaaacattaaaataaaataaaaaataaatttagccaagtagggaagaagcgctttatttttatttttatggacccagggtttttagcttttgcccacaaaaattgaaggcctaaatgatccaaagggagaaaaatgtccttagtgttctactacagtagccatccccagtcaaattgacgaatgttttaaagtaattcattttgggggagcttatttttatttcttttttgttgttttgttttttaagtgatggggtctcgccgtgttgcccaggctgttctcaaactactgggctcaagcagtctgcccgttttggcctcccaaactgctgggattacaggcatgagccactgttcctggccccttttttctttctttttcaaatttttcttcctaatacagcagacttccatacctgtctgtggttgaccattagttttccctgttctctgcttggtgattgatttagtgatttctcagcaggtagtaagctgtaaagcgtaagcataattatcatcttgttcagtacttactctcccaaatgcaccataatcatgaactgtgaaattctcttcgttcatggctgagtaagtgtgggcccaggctctcctaggccaaagataactgccagtcttattctctagtcatctctctgaagcattttcccaggttttcctaggcatgccaggggctggaataggtgtataatcatgtagcagttcacattttcagtgtttatttcccacgctactgtcactaaattccagagtggcaatgataatgatccctggagctgttagcccactaggctctagagggcattcattttcgcctgtaaatatttgcagtctagtgcatgtattgtttcttgacgtttgcctgtcagtcatggatatttaactgatacagttcttgcagagacttgcagactcccatgttgcttccaacttttctcagaaaaagatgtaaatgctttggtctttgtcaacaaatgtcataagtaacattggtaatcattcgatagtaattttcctaccagctaaccacagcattttgtaggtttcccaaattgccaccaataatttttggtataaataacttctatcgtagaatattggaaatctttcatgtttctctcttctggattaccagcttctttcaggataatagaagtttgtggttttttcctttatttccttttgattatggttctctgataaatttgtgatctaacctatgatcccacaggtgctccagtgaaggccctgtgggatcataggttagatgtataaggatcagaggacaaatcagtgacacaacagggttccagttttttaacttggcaaaagggaacgcaaaccagtaaggattatagttttcaaattcgctttctattattaaagatttctaccccaggtctgggtgtggtggcttacgcctgtaatcccagcactttgggagttcgaggtgggcggatcacttgagttcaagaccagcctggccaacgtggcgaaacctcatccccactaaaaatacaaaagttagccgggagtggtggtacatgcccgtagtcccagctacttaggaggctgaggcaggagaatcacttgaacccgggaagtggaggttgcagtgagcagagatcatgccactgcactccagcctgggtgacagagcgaaactctgtctcgggggggaaaaaaaaaagatttctaccccaaaacaccatctgctacttatctgtagtaataatcatctttcatgtctgtaaaatgctttgcagtttacctaatattctcccatatattattatttcttacaattttctgcagttaaagaaactaaaacttagaggtaatcaatttgtccatgttctcaaagctaatctgtcagagccagaactattaatagaactcagttcttttgattttaatttagagctttttcatctatgccccaagtgccttaaaggcaggaaaaaaaatgtgaagtacctattctcctgtctttcctttgttccatgacaagatggaaaagtaaatgataaagaatatagtctcatttccagctgcataatgacaagtatttttctatgtacttagaatgagcaagctctggtttacctcttggttatagaaaaatagttgaggaaaatgggaaattataaataccataatcctgttttttgtaattgatatttctgcaagttaaatgaaattgcacatctgcttttaataaagcacagcacacttgacttaataccagtgtctttgcagcaaaattcaaattctagattcttatgacccaattaggtctctaagtgaaaatgttctttatttactcttttccacttaaatctggctttgccgggagcaccaggtttagtaatctgattaacaagtaggcagatgaaagcaaagaggcagccttcatattcatgttgtaaagacctccagggattactgagaacaaagataagcagtccccatcaatgactcaaacagaaaaacctgcagtcaaggtagagaaaccagttggaaaagtatttggcaaatgctcttgagcttggctagtgacaactgtagacaactttattggagtacattgtggtaaataggactgagcaactgaatgtatgaagacactgctcttacctagcacctaagtgactttctttcttccttcttaatttattttaattcagcttcaaacactgattcaggagactgaccctggtgcagattaccgcattgatcgagctttgaatgaagcttgtgaatctgtaatccagacagcctgcaaacatataagatctggagacccaatgtaagttatcttctccatggtatttatccatattgtatttcatttggcagcacagggaacattccttcaaatgacttttgggtggttgttgacatcttaactgaaattttgttgaacaagttgaacatacaccaacttttattaaaactagtattggaatgaaaacctaggatctgcctcatccatgatatagagacacctagacccaatattgtgatggtgtttacggacaatgactgagcatatatggacctatatattaggttactgaataattttatatcacgatcaaattaaaatgaaagagagaaacactcaggataggtggtacatactttggcactctgtacttttcatcctagttgtatattgactcattgtatacattgactacctggtaatcatcagaaaatacttgaaacagaaaatagaaatagaaaacaaaatgtggtagttgaagggagtagtaatggacaaaatgaatactaaagttgcaaccaagatctagaaaagctgaataaatgctatattaaagtattctcattctttagttttattttttatgatgtaaaaacagctcttaaaccatggccggatgcagtagctcatgcctgtaattgtagtgctttgggaggccgaggtgagaggatcacttgaagctacgagtttgaaaccagcctgggcaatatagcaaggcaacataaaagtttttaaaatcagctggcgtggtggtgcatgcctgtagtcccatccccttgggaggttgatgtgggaagattgcttgagcccaggagttcaaggttacagtgagttatgatcataccactgcactccagcccagatgacagagcaaaaccctgtctcaaaaaaccaaaccaagccaggcgtggtggctcacacctgtaatcccagcaccttgggaggctgaggctggcggatcacgtgaggtccagagttcgagatgagcctctaaccaacatggagaaaccccgtctctactaaaaatacaatttatttttatttttatttttagacagaatcttgctctgtagcccaggctggagtacagtggcgcaatctcgcttagtgctgcctctgcctcccggatcccagttcaagcagttctcctggctcagcctcccgagtagctgggattgcaggcacatgacaccatgcccagctaatttttgtgtttttagtagagacagggttttaccatgttggttaggctggtcttgaactcctgacctcatgacccacccgcctcggcctcccaaagtgttgggattacaggtgtgagccaccacgcccggccaaaaatacaaaattagtggggtgttggtggcgcatacctgtaatcccagttactcgggagtctgaggcaggtgaagccaagatcgtgccattgcattccagcctgggcaacgaggaaaactcgatctcaaaaaaaacaaaaacaaaaacaaaaaaaaacagttgcaagtaagagcagctttcccattctgcaaaaatctttatagcctgcatttggccatacccaacaacaaagtgagtatagtccatgtttatctcatgctgctatgcaagaactcctgctgttcatgctgtgctagagaattagaaaatcatattcttcctcaaagctttctgtgtggttaaactaattaggaatatttacagtgtaaaaataaccacatcaagcaaagagggggcaggggagagggaagaaggaagaactgctacagatgaaaatacatttaagatacttatcagttaaccttttctggatcctgatttgaacaaacttgtgaaaaaaaaagataattgaaaatatctgggccgggcacggtggctcacgcctgtaatcccagcactttgggaggccgaggcgggcagatcacgaggtcaggagatcgagaccatcctggctaacacagtgaaaccccatctctactaaaaatacaaaaaaaattagccgggcgtggtggtgggtgcctgtagtcccagctactcgggaggctgaggcaggagaatggtgtgaacctgggaggcggagcttgcgtgagccaaggttgcgccactgcactccagcctgggcgacagagcgagactccatctcaaaaaaaaaaaaagaaaagaaaagaaaggaaaatatttgaaaactaacagggtattacatgatagtaaagcttttaaaataattgcttagtggtgtgataatggtattaagtccttatattttaaagaaacatgctgaaatatttacaaatgaaatgatggagtatctgggattttgctttaaaatatcagcaaagaggcctagagttaaaacagacttggccacagattgataaagttatggggagggaaggtggctgttacattattctctacttctttgtgtgttggaaagttttcataaccagttaaaaatacagcagctgcacactgcccttgtgcatgcatagtcttcagtgctgagtggctctgaagttgatcgaaggtataaccactgtcaggttcagttaatttgagtgattcttagaaaaataaatctgattgccctaagaaaataactaaaagccgccttctacagaccagggaaatactatattgacatagagttctgaacacttctctcttgttacaattttacacatttaatggctaggatcttgtcgtgcctgatggaacatttatacacagagaagatggtagaagactgtgaacaccgtctcttagagctgcagtatttcatctcccgggattggaagtgagtattttgaagccaaagtaaatgtattgcctcagcctcttctcctgtgtagtcataattacctgtatttattaaaataatcagtaggaaactctttttgttcagttctgggacagctaacacactccaatcccctgaaaaactattctttatcactttcagaacattatctaaaagcagagtcagcccactaccagcctgtaccacacatccttgttcaccacgactttggaagtcagggtcaaaatgtttctgatactacaaagatctgtctagtaagaagtatggcacctgtgggggtggcaaaagcgccttcagatatgtctctaagaagataatagtgcagttgtatttttattgatttgcagtggatatggtaattggcttttatttatttattcagagttactgaattaagtctgtcttaaggggtttttgtcaataagtgacaacttgattatctaatttccctctcattctgttaacaaaaagcggtgggggtgggaggatgaactaggagaaggatccgtattacagccagaatcactgagttcattggctgtcattcccctcctctttccgcatcttgctttctctccccacctccaaagcagccagtgctggatccaactgcttctctagcttttcaagttcagtggcttctccattcggttgttaagccaccatggtgtggtagttaattttttttggtgattaatatatattttggccaggcacagtggctcacacctataatcccagcagtttgggaggcctaggcagggggatagcttgaggccaggagtttaaggccagcctggtcaacatagcaagaccttgtctctataaaaactaaaaaaaaatcagccaggtatggtagtgtgcacctgtagtcctagctacctgagaggctgaagcaggagattcacttgaaccgggcgcggtggctcacgcctgtaatcccagcactttgggagtccgaggtgggaggagaacaagggcaggagttcgagaccatcctggctaacacggtgaaaccccatctctactaaaaatacaaaaaaaattagccgggcgtaggtggtgcatgcctgtagtcccagctactcgggaggctgaggcaggagaatggtgtaaaacccgggaggcggaggttgccctgagccgatatcgcgccactgccctccagcctgggagacagagcgagactccgtctcaaaaaaaaaaggagattcacttgagcccaggagctgtaggttacagtgagctgtgatcatgccactgcatgttaacggtgagaccctatctcaaaagacgtgtgtgtgtgcatgtgttttgcccacatactttttctagaaagagattacttgaagattcaatatattcttatttctattccttcagattagctctggaaaggactacagaaagctgggctgtaatttccctttgcttactcaggccatctcaacctaaatagtctactgagtgtattgccttaatcaaaatcacgttttctcctctttaattccttcccccataataaaaaaaaaagtgctgcatagttactcattaaatattagttcttaatagttactcattaaatattagcttttttctcccattaactagccatctaccaaagttgacaatataatatggacagaattaagcatgccctggtctgatgtggagaagaagcaggctcattgtctaatccactgtctccagattcagagttaaatgtcaagtctcataaattgataagcacactcaagtaaccaaaaagataaccaccttacctggcacaggaagaagagagaaaactgaataggagactatttatcttgccatttcctgatcttactgaatctaatacattacataggattgaacttcattcctacttagaaaaaggtatttagtaaaaagtattaagtaaaaagttgtgaattgcctggtggtggctataactctagttttctgttttcacccagggcatgtgagtgctgtctattaaaatgttaggtatctaacaaagccaagatatctttgagagagactttaaatcttctgtagaaggttaacaaacttctatagaaagttattctcctgcctaggcctcccacagtgctgactactgtgtgttcattaagaacaaaattcacggctgggtgcagtgccttatgcctgtaatcccagcactttgagaggccaaggcaggctgattgcttgagctcaggagtttgagacctgcctggacaacatggcgagactctgttctaccaaaaatatcaaaaaagagcctggtgtgtgcctgttgcctcaactgcttgggaggctgaggtgggaggattgccttcaagccccgggggacggaggttccagtgagtcaagatagcaccactgcactccagcctgggtgacagattgagagatcctgtgtcaaaaaaaaaaaacaaaagaacaaaattcaggaatatacttttacatatcttctgtctccacgcccctggaagtgattatcaatgagtatacaagcaaacacctcataaaaaccctgagcctgtgttagaaggaaatgtctattaattagtggttatcttttaactcttaaccttataggctggaccctgtcctgtaccgcaagtgccagggagacgcttctcgtctttgccacacccacggttggaatgagaccagtgaatttatgcctcagggagctgtgttctcttgtttatacagacacgcctaccgcactgaggaacagggaaggagggtatgcagtgaatatcgacttcatttcttcttcttgtcatttgttttttaaattgtttgctgtatattcttctgatttcagtcatattaggaaaactttttagactattttgtggggagaagattgctgcacttctagaaacttcttccttccgtgagtgcacttagagttgccctaccagcttctatcatctgattttatgtttttaacaaagtgggtgggggaagatttccagatttttttttttaattcccaaaatctgaatcacaaatggacagttaaattctgctgtcctaactttatttaggtttaaggatccattagaagcttttagccaggctacaaatggattttaggcttctcctcttggcagctgaacacatttgcattgtctgcccatggactggttggagcagaaacctccatacctcagtctcttggtatttgtctgccccaactgctgctttttgttgggatgtttgtgtgtgctggggtctcggcagcatcggctgcttcccggtgcgcactgacatgcacttgttctccacgatggctttctctaccttctgagatgctccattatcagtcctgcctttgttccggagagttgagatggtatcacttctcatccatccttagaaataccccttctgagcttaatgcaaaagcctggctatctcaaatccagaatgaggggactcagaaggaaatggcatacatcagttgctgctccctaacccagtgtttatactgctgtgtgagaaaacgtgggaatttgttttttttttttttttctctccatataatgagcctctcattaaccatgggggctcccacatcccggcatctttctggtcactatagtgactagggggtaggaggtttattctcttttaaataagaaagagttggagtctgtggtgctggttttcttttctttttttttttaaattgaggtgaaattcacataacataaaattaaccttttttttttttttttttgagacaaagcctcactcttgaatgtgtctcactgcaccccaggctggagtgcagtggtgtgatcttggctcactgcaacctcttcctcctggctcaagtgattctcctgcctcagcctcccgagtagctgggattacgggtgcctgccgtcatgcctggctttttttttttttttttttttttttttggatttttaatagagacggggtttctccatgttggccaggttggtcttgaactcctgacctcaggtgatccactcacctgggcctcccaaagtgctgggattagaggtgtgagccactgcgcctggccaaaataaccccccccttttttttttttttgagacggagtttcactcttgttggcccaggctggagtgcagtggtgtgatctcggctcaccacaatctccgcctcctgcctcaccctccagattagctgggattacaggcatgcgccactacgcccggctaatttttgtatttttagtagagatggggtttctccatattggtcaggctggtctcgaactccagacctcaggtgatctgcccgcctcagcctcccaaagagctgggattacaggtgtgagccaccgctcctggtcttaaccattttaaagagaaaaattcagtgacatttagtacatttacagtgttgtgtggtcatcatgtctgtctagtttcaaaacactccatgactccaaaaggaaaccctgtgttcattaaacagttactttccatccctcctgccccaggtatgctggcttttttttctttttttgcaagagagactaactgtatctgtcaataacagctttgtcatggcccttggaaaaatactagttttcacctgctttaccctctgctaattcttcatagctcatctagaagagtccagtcctatctcataatgttatatctacattttcctgctttttctgatttaggtcaatttgaactcatttctcctgagtcaagtgtatatgctctcttgaattggatctgaccttctacctggtgttcatagactgacacattagttttgctaagcaaaacaacaaacacaaaactttccaactaacctagtctgaatgaagccagttcacttttatcaggatactgtcataaaagaatgttgtttatatagtatattagaaactgctgaatatgtataatcgcattgctaaagatatgggcttttcgaagcctcttgcacattttatttatttatttatttatttatttatttatttatttttttgagacggagtttcgctcttgttgcccaggctggagtgcagtagtgcaatctcagctcaccacaatgtccacctcccgggttcaagcgattcttctgcctcagcctcccgagtagctaggattacaggcatgtgccaccatgcctggctaattttgtgtgtttagtagagacagggtttctccatgtaggtcaggctggtctcaaactcccgacctcaggtgatccgcccgcctcgacctcccaaagtgctgggattacatgcgtgagccaccgcacctggccgcaacatttaatttttattctggaagatatttgaggtataaaatttgggagataaaatacagggttatttgttagtttcctcatagcaggtttatctcatatctttgtgtttttgttttgttacctttcaagtatttagctcattttttctcatgcagctctcacgggagtgccgagctgaagtccaaaggatcctacaccagcgtgccatggatgtcaagctggatcctgccctccaggataagtgcctgattgatctgggaaaatggtgcagtgagaaaacagagactggacaggtaggtgacatcgctttctgtttgtcttacaataatgatgatgttaatgtttaacattttatgcagagtacaaacaccataaaatccatctctctttaccttacagatgtgatttgttgtattgttcaatattttctctggaagaaattctcaggaaaattttctctctggtctttgtatcaggaatagttggcagtgagtttgtgtttgcattatagttattgtattttgtaattgattattttccctcttcctgttgcttattaaaacttctagagccaatggtatggcctgcctcttacaggtatataagatttcatggtaggcatttttgtagaaagcttactactggctccatttcacatcctctttcctttcctttttgtttctcttctttattcattttactcatttttaattcattttctccattaagtccttttgagataagcagggtgtaaatctgtgcgtatgtgagtactggtctgcatgaatagtgggcatgccctagaacagtcccaaaaaacatgtagaaatggaattttttctcacctggttgacaaattgaagctcagagaagttaagtgtatacattcccttacctaaaattcagttcagttcattatatagcctctccatctaggaagcagagggaaggagcagcccccaaaaattccctgagtgctgtgattggctccttaggattgtgtcccagtttaagggaaagaaggaaagatgcatgactgcaggtcatgtgggaagctagctgtcttccatctgaatgcaggatactcagcagtaggaatactgcgtgtttaaagccacataaataaggagtgaactcaggtttctgggttccatttgtaccactacaaaaccccctctggaagtacagtatgaaaaagtcacacgtacaggaattggacattttaaaggagaaacatggttgcctactcaggtctgttgagcataggactatcatgttcagcagtctgtttcctgagcctgctacagttctgttgggtatattgttagaaaatgcttatagttgagctttctgttgcctctgtccaatgaaacaagggatatggtgatttggaatcccagaaaatagtttcctttagaaccccgagtaaagtaaactttagaaagctgcactacattgcagcccgtcatggagaagctaaacttaagaattcttttttttttttattttgagacagtttcactttgtcacccatgctggagtgcagtggcacgatctcggctcactgcaacctctgcctcccgggttcaagcaattcttgtgccccagactccttagtaactgggattacaggcacctgccaccacacccacctgattttttgtattttagtagagacagggtttcaccatgttacccatgctggtctctaactcctgagctcaggcaatccacctgtcttggcctcccaaagtgctaggattacaggtgtgagccactgagaccagccaggattctattaataggatgtttctcttagccatttattttactcccaaaagtttggggtattttcctttagcttttttatttcttcttcttcttccattctggctgttgtataattcctacaactcctctcttcccctcacattctaattctgaaacagagagattcttgcagaatagtaagttaaacttgatcctttaacagagcactttgctaagaaatagctgttgatatgctttgtgaaagtgagctgatattatacttgaaacctctaaacctgtaaacctctagaaggaatagtaatagactaatgctacagatagctccagctcggtttccaaagcccacacaagatagcttttaagtacccaaaccctagtgtgttcacttgtttttcttcagaggacccttttgatgtgtactggagttagaatcccagatctgacttgcaggagctatcagttgtatcctgtgttccagacccctggttcccaattactttgccaataaagagtcttaaaataatctgtgctcttcactgtgaatttgtctgatgatcattattaaagtgcatatttaaaatgagagatgagaaattatcaaagcacagattgaaaatagaatcaaggcctgataaggtttttagactttgaggacacttgaagattgattctccttgcacttgtagatttggtcttctgagggatttgcacagctcttttttttttttttttttttttttgagacggagtttcactcttgttgcccaggctgcagtgcagtggcacgatcctggcttactgcagcccccgcctcctgggttcaagcaattctcctgccttagcctcctgagttgctgggattacaggcacccaccaccacacccgggtaatttttgtatttttagtagggatggggtttcactgtgttggccaggctggtctcgaactcctgaccccaggtgatctgcccacttcagcctcccaaagtgctgggatcaaaggtgtgagccatcatgcccagcctttgcatggctcttgtgcccacttggccctcataaccaacctgctacatgaagtaattatcttttcaacaatctcagtctggggaattaaacaaagcttttgtgtcctgttcagtgaggtaattttaaaaagaagagaaaggaggaccactgaaaagggaagtgtcatgacgctgatatctccccttgccttgttcatgtatgtgactgataaatgccagtggcttgcctttatatttgcaggagctggagtgccttcaggaccatctggatgacttggtggtggagtgtagagatatagttggcaacctcactgagttagaatcagaggtaagtggtatgcagcttactcattggaggagagtggctgccagcatcctggccttttgtgtttgattctactgtttctagactcctgagagtgcagattttctgtcaatcaaaagaaacctgatcaaattttccatgtttgctttataaagaagtatattgtgttgctttgtgagctccttccctcatttctctagaacaacactctatacagccctttggttttcttcataaattaggtttatcatagtcattagacttgcctctgtttctcccttaagatagcagctgtacggccgggagcggtggctcacgccttgaatcccagcactttgagaggccgaggcaggcggatctcgaggtcaggagttcgagaccagcttgccaaacatagtgaaaccccgtctctactaaaaatacaaaaattagctgggtgtggtgaaacacgcctgtagtgccacgtacttgggaggctgaggcaggagaatcacttgaacccgggaggcggaggttgcagtaagcctagattgcgccactgtactccagcctgggcaacagagtgggagactgtgtttcaaaaaaaaaaaaaaaatagcagcagtacttcacatcacagtcacattcaagagcaatctacacattcccgttctctcatccctcgctcttttagttaggtcatttggtaatgtttgtgtgtttcagaacataaaagctgaggacttccagctaagcatggaagattgaatacgtatgtttatccctgttccatcctgaaacccactaaaatattttaaaaatgggattagaggccaggtgcagtggctcacacctgtaatcccagcactttgggaggcgaggcgggcggatcacaaggtcaggagatcgagaccatcctggctaacacggtgaaaccccgtctgtactaaaaatacaaaaaaattagtcaggtgtggtggcgggtgcctgtagtcccagctactcgggaggctgaggcaggagagtggcgtgaacccgggaggcggagcttccagtgagccgagatcacgccactgcactccagcccgagcaacagagcgagactctatgtctcaaaaaaaaaaaaaaaaaaggtcaagaccatcctggccaacatggtgaaaccccgtttctactaaaaatacaaaaattagctgggcgtggtaaaacatgcctgtagtgccaggtacttgggaggctgaggcaggaggatcacttgaacccgggaggcggaggttgcagtgagccgagattgcaccattgcactcccgcctgggccacagagccagactccgtctcaataaaaagaaaaaaaaaaagggggattagaaaccctcataaagcactgggatgttatttagaaatacagaggagggcagctaaacatgttaaagttattttgtggggccagaaatcagagaagtggggaactaccattttgtcttaaaccttttagtactctatttgaattgtcataatgtaaaattacgtttctcaaccagttcttttttgctttctagttttcagaagttcattgccttctctcatttcgtcgtcatctctcacattatcattgtcatcatggacttatgagagcagtctgggtgtatagctctttaaaggaaggtgttttttcaggagctagtgttgcacgggtttctctctttaaaggcattattagtatgtgttccccagtaacagtggtttggcatctgctttgagggcagtgctctggcttatgagcttataaactgaagatggatatcagttacccctgttttcattttgaactacttagcattttgggaaaatctgcaaaggctttgcatactctaatgttattgctacatgtgtttttacctcacttttcttaattctgccttctcatttgttcaggccgaaagggaatatgtctttaaaaatttgcctttcaaagtataacggaggagcagttctatatttattctggggctatctacttcaaatactagaatcgtttccaaaagtatgtattagattatttgcccatcagatattactgattcagaaagagaaactgctcctcctccaccctggctctttctaaagcagaagtattaatatatttaattttctacaggatattcaaatagaagccttgctgatgagagcctgtgagcccataattcagaacttctgccacgtaagtgatgtctggaggagcaagggttaaaaacagaaacaaattgacagggactctcccctgagtatctcagactcacctctgtctgcagcatgtattactcttgagtgttagccagctttgacaagttaaaattaaaaatgtaaacaggccgggtgtggtgaccaatacctgtaatcccagcactttgaagccaaggaggagcacttgagcccaggatttcaagaccagcctgggcaacatggcaaaactctgtctctacaaaaaatagaaaaaattagctgggcgtggtggtacacacctgtagttccagttacctagggggcagaggtgggaggatcacttgagctcaggaggtcgaggctgcagtgagccgtgattgtgccactgcactccagcctaagcaacagagtgagaccctgtctaaaaaagaaaaagtaaacaagatcgagagagagatgctaccatcctggaacctgtgtttgattagcttttgtaggtaaaaacaggtatgtggccagcagcagttactgagttgccctttttaagaagagatggaacagggaaacccccattagtatgcagggttgattccagtacatcagcctaggaattgttagcatctgcccaggaattgttagcagtaatagtggctccttcttccaactgtctcctagtacctcaatattgagtgaattctgactatttcatattcatttactgaactatttaaattgtgggagtgaaacatacccaggaaccattaggatctgacagttgggaggctatgttagatattgtcccaaaagccagctgcttttcggaaagtgaaaaaaaaagcgtatatcatgtcttatacggaacacagtgctgtgttagttttatgccactgaatgtataccattgtgattcttcaggcttattttgattacaatttatggtgtgtcttttttttgtgagggcttctagaactaaccttgcttgcatttgtttcggactgggctacaagttttgttcattaattgttaccaatgaagtgtaaatgcatgctgtcttccccaggatgtggcagataaccagatagactctggggacctgatggagtgtctgatacagaacaaacaccagaaggacatgaacgagaagtgtgccatcggagttacccacttccagctggtcagtgacacctggctgccaatatcccatcatagctgcctggatgttgactgaatcctttccttttttggaacatcagagcacctctgatgttctgttaaaagtcatttttttccagccaggcgtggtggctcacacctgtaatcccagcactttgggaggctgaggtgggtggatcacttgaggccaggagttcaagaccaacctgagcaacatggtgaaactccgtctctactgaaaatacaaaattagccaggcatggtggcacacacctgtaatcccagctgtttcaaaggctgaggcaggagaattgcttgaacctgggaggcggaggttgtagtgagccgagatcgccactgcgctccagcctgggcaacagagcaagattccatctcaacagcaacaacaaaaaaatcattttttccagccgggcatggtggctcacgcctgtaattccagcactttgggaggctgtggcaggctgatcacctgaggtcaggaactcgagaccaacctggctaacatggtgaaaccctgtctctacaaaaaatacaaaattagcctggcgtgatggcgggtgcctgtaatcccagctactcgggagactgaggcaggagaatcacttgaacccgggaggcagaggttgcagtgagccgagatcgcacaactgcactccagcctggatgacaagagagaggctctgtcaaaaaaaaaaaaaaaaaaaaattacaaatatatgtcctatttttatttaggatggatggatggaaggagggagggaaggaaggaaggagggagggaaggaaggaaggagggaaggaaggaaggagggaaggaaagaaggaaaggaaggaaggagggagggagggaaggaaggaaggaaaggaaggaaggagggagggagggaaggaaggaaggaagcctgcctgttgtagggggagtactggagagatgagcaggtcgtgatgtctcacgtgtgggtcaagccatgcagggtcttgtaaacaggcttgtgagagctatatgaaaaagtgcgccctaccactactgaccacaagttgccacaaaacttctgactttctttctctttacctttcaggtgcagatgaaggattttcggttttcttacaagtttaaaatggcctgcaaggaggacgtgttgaagctttgcccaaacataaaaaagaagtatgtagcttgtagttgtttcattccactttcccgaagttcctcttagctccggaatgagtatgcgagatgttaggcagccctcctgctgcctcgtggggttagccctggaggcctcccgcatctctcctttgattagcgtggcaaacactcggactgtctggacagagcatctggcgatggtagttctcacatggaggtcccataggctaaaggagcatttttaatttttccaggtcaggccatctaactgaccaagtagggctggattgtgtacttagagaagcagggtgcagtgtgagtgaaagaggcgaactgacctcttccctgcgtcgtcccgttatgtcatctcatctaagatgcagcagtttttgtattggattagatatttagtgaagaaacagaatctttattcatttaagaattaagtctttttgaggaaactgatgagctttttcagcgtgactgtccaaattcttccatgttgctctttgaaaggaccatttctagaacacttgccctcatacaaaccaaattcccaatttgctcaggtttctctacctttcaggagtgagtttcacagtaggtcaaaagtacagtcctagagttaagagcagcattcctctgtggtcacatgtttttaacacagatgttgaactgtcgttgcacacatgtgccctgtgtggcttccccttctgtcaggaatgtagtcagcattcatgctgctgcctgcctttcatgacacccacagtcaaattgcagcttttagcaccctgaaaaaaaatacagtgagccttacaggaaagacattcccccaaagggcatcttgaattcttaatggtgtgaccccccccaagcccagctctcaggccatctgcccttgtgtggccccagccagcctcaagcttctttcgtctgcagggtggacgtggtgatctgcctgagcacgaccgtgcgcaatgacactctgcaggaagccaaggagcacagggtgtccctgaagtgccgcaggcagctccgtgtggaggagctggagatggtaatgcctcccagcctctgctcccagaaaccacagtgggccagggcttggaaagctggggagaggctagggcaagggggaggcattttatccactactgtgatggttaagacttgaagtcctgtgcaaaagttttaacatacgaccattagcttcctgtgtcattcttttgattttgaatgataaaacctttcttcccacatgtaactggaagtccagctgtaagacaggctctaactaagcatgtgatccaatcactggatcagtaatgtcctcaggggctgggtgctgtggctcatgcaggtaatcccagcactttgggaggccgaggcaggtggatcgcttgaggtcaggagttcaaaaccagcctggccaacgtgatgaaaccctgcctgtactaaaagagacttaggccagcgaggtggctcatgcctgtaattccagcactttgggaggcaaatgcggtcaaatcacttgaggtctgtaattcaagaccagcctggccaacatggcgacaccccatctctactaaaaatacaaaatttagccagctgtggtggcacatacctgtaatcccagctacttgagagactgaggcaggagaatcacttgaaccgggagatggagtttgcagtgagccgagatggtgccactgtactccagcctgggtgacagagcaagactctgtctccaaaaaaaaaaaaaaaaaaaaaaaaaaagacatttcaagctggaagatttggttccctaactttgagcctagctctttcattaaagtaataataaaagtagaactctacatttatataatggttttgactttccaaagtgattttcacatctcagcagtcctgtgaaggactaaataaggtgtttcagggtagacttggcattgtgttttgcaaagaaggtccaaggccatgcagctatttggtgacagaattgaaagtaaagcctgattctcttgctgcaaggcgactttgctatgtagaagccagggtcactagacaagatgcagtcaacaaataagtctccagaacatatgacatctccagcctaaaccaagctcacctttccatgctggctccctcatgcagacggaggacatccgcttggagccagatctatacgaagcctgcaagagtgacatcaaaaacttctgttccgctgtgcaatatggcaacgctcaggtaactttttgcttttcttttgtaattgtaaaagtaatgtgaaggtaatatttaatgttttctcaaaagctagtgcccataaggtaacattttagtcatgaattttttgctggtgagacaggacccatctcatcccttccaacctaatcccttcttaaactacatcaggctgcgtttccttgggttcttcacctgcactcctctctaactcattttcttccctctttcaggttacctcatccttccctaccttgtctgcctagtaagctcctaatgatccttcagatgcctcctcctctgtagcattctcaatgctctgcacctccaaaattaaccgttacttcactgtgttcccattgcacagaagttcttaactagacgtcacatcagaatcacctaggacacttttttttaatagacagaagcaggaccctatccagaattgtcaggagtgaagtacatacaaacaaatgatttttaaaaaaatgttctcgttactactcggctacctcttctagttaagggcattgccatggggcttcagcctttgagataattacttcattgtcctcttgtatcagactgttgctgatgcaaagtctgatgtcaatataagtctcattgctttgtagttaatctgtttctgataggttttagagtcttctctttgtctgtaatgatctgtagtttcagtgtgatgtggttaggtatggtttttgttttgtgtgtgtttccggttggctctttcaatctcacaatctatgtgttccttcagttctgggacattctcagtcattgctctttcacatactgctttccctttccttccttctggaactcgtgttaggcaattggagcatctgagtccgtcttccatgtctctttaactttttctttggtacttttcatttctttgtactacattttaggtaactcctcagttctctttcccagcatataatttattcttcagctttgtccattctgctccaggagaccaccaatcaagttttgtttttcatttcctagctttctcattgcttcttttcataactacctattcttgattcttatttactgttgtcttctgtgttgttctgaggattttaagtatattttaaaattctgttttgattgctctattacccctttccctcagtttttgactccttggttcattttatttatcatctttcttatgatattagtgttcctcaactagttagtgattcttggccatgccttgacgatttcccggaagtctcatggcttcctgcgatagccccagctgctgcaccttcccatctgctttccttctttcttttcatgatatctgaaggtttagggaagggaagatttcaggatatacttaattcactaccttaaaattcatttcatgacactttatgcttttgtattttgagtgataactcatctttttctaatcatagttacttgtttacataagtttgccctgtgtagctgtgaatttatcaggctgagaattgggtctgattcatatctagcatccagtagtctttctcaggtggtaaatagtgggttgaattgaacctcctggtttgtgcccactgtctagtcggagctgttgctctgggaaaatgcagagagcctatctccaaaatgaatgtggacaaggagcagctctggaaggcagaagaaaccagaaatcgtgggtgtgtttcttttccattaggctggagcacagcctgccagtcatcctgagtttttgtctagttgggtttgctgtcagctgtaaggttgtaaatccttatctttggtaaggaaatcctgattccgattgcctgggaatgagaaatggataaagaaatgggaggcacagtggagctgaatgtttcaatcagaacacatggatgagcagtctctgacatctctcaacttgactataactcttttgccatagattatcgaatgtctgaaagaaaacaagaagcagctaagcacccgctgccaccaaaaagtatttaagctgcaggagacagagatgatggacccagagctagactacaccctcatgagggtctgcaagcagatgataaaggtgagaagccgacaccaaaggccgagcacggatgaacaacaaaacaacaaagcacaaacaatggcagcaacttcctcaggctcagctttctcaaagtgtggtccctagacgagcagcagcagcagcaccccctgggagcctgcgggttcctgggcccccctccagatctgctgaatcagaaactctgggagtagagcacgaagtctgccttagctgcctccctagggggttctgatgcaggctcaagtttggaaaccacagagctgggataactgacctcactttgacctgaggcacaagtaaatggatgtgcaataaataaatgattggttttgaggacgattaatagtagctgtactaagaaagtcaccatctaatgtcctgatcatccatctggcacattcagaagatttttctgttttacaggttgttttgcttcattccctcctccagcaggtattccctgcagcagggctgacctgagtacctagatgtcagttccctgatctcgccacacatacattaaactcaaggttcggcagggcacggtggctcacgcctgtaatcccagcactttcagaggccaaggcgggaggatcacctgaggtcaggagttcgagaccagcctggccaacatggtgaaaccccgtctctactaaaaatacaaaaattagccgggtgtggtggcacatgcctgtagtcccagctattcaggaggctgaggcaagagaatcgctcctgggaggcgcaggctgcagtgagccaaggtcatgccactgcactccagcctgagcgacagagtaagactctgtctcaaaaaagaaaaaaaaaattttttttaaacttaaactaaaggttctagctcctttatttcagctttcctttaaagtaaaatgctactttttacactatcaaataaattctagagagaattttgaaagttagaatgtaagtctttttaactggcctgatgaaattgagtcatatgtaaaaatggaaatgtcaggctctgatgtgagagagctttggaaaattttctaaaagtcagtgaacaatccatgtctccataacaagatgtcagcaggttataatcacactctttagagaactagaaacagaactaggaagagaggctcagtgctcaagtgtctcaaccagagtttatcagacactgtgacacttgaagacttgcggattagcagaacggatagggagtttattactagtccacagctgatccctgacttaaaggacagcagtaagtgtacaggaccctaccctttactgcttggtaggattatagccctgtaattaagatgaaccaagtgggtccttagcccacatccttgttcacattggttagtggagaattcctaggtttccccactagagttgggtaggtagggcttgagggctgtacagccacctggtacagtgttacattcatgcttaaacaataagttcctcagatgccattaaacttaacatcaccctctagatagggaaccaatcctgtgtaagaaccagtgaggcagtagaaagaaatgtgagaaatagtagagaataagaaagaaaggggaagttggggtggggtgctctttcaggcctacctgctcctcttgtaccacgtgatgccttcaggctgctgctttcatcagcttttggatagatgttaagggtgaccacaggctggtccaagtgcggtgctgtttacaactaattgatcacagctacttacagatttatttgttcttctacattcctgttgcttcacttgactagccttaaaaaaaaaaaaagtggccaggcgtggtggctcatgcctgtaatcccagcactttgggaagcccaggtgggtggatcacctgataccaggagttcaagaccagcctggccaacatggtgaaacctcatctctgctaaaacaacaacaacaacaacaaaaaaaacacaaaaatgagctgggcgtggtgacgcacgcctgtaatccccgctactcaggaggctgacttgggaggctgaagcaggagaatcgcttgaactcgggaggcggaggttgcagtaagccgaattgcgccactgcactccagcctgggtgacacggtgagactccgtctccagaaaaaaaaaagtggtcgcagatggagttaatcgccatgtttagatagctgtttttatcaaactgtttctttgcagaggttctgtccggaagcagattctaaaaccatgttgcagtgcttgaagcaaaataaaaacagtgaattgatggatcccaaatgcaaacagatgataaccaagcgccagatcacccagaacacaggtaagatcttggcttggctctcctggccccgtggagtatctgaaaaggaattcagtggctgtagagtgacctgctcaaactcccagggctttgttgcctgggaattttaagggaggagtctgagtgtaagcagggccttcctcctttgaggagcatccagaaaaatggagggagagtcaggggagagaggaggccacaagaaccagaaaactgccctaaaagaacgttcagaaggaatcaggccggcagtccttggaaagaaaaatctagaaattcaataaaacttcatgagtgtgccaggagaatgtacgggtaatctgattcggaacagaaacatttcacctctgagttggaagacctcgtaagttaatggtcacagtgagttggatattgtatttctttttcagtgttctcaaaagtgtctgttatggggaaggttgctgatgtccccttgatttttctgaggactccttagagtattggagtctgcacaaaaccccgcagagtagaaagattcctgaggacctccagaagtactcgttaacaagtcatattgctgattaaaaacagtgtagtgagagctcagtaaatgtttattgaatagataaatccatggttgtagtcatgatcattgacataatatgctccctttaggaaggtggatatctaaaaatgtgtgaatcaggtggaatgttttgtcacatgctcactgctttctactctagattaccgcttaaaccccatgttaagaaaagcctgtaaagctgacattcctaaattctgtcacggtatcctgactaaggccaaggatgattcagaattagaaggacaagtcatctcttgcctgaagctgagatatgctgaccaggtaaactggcctgggctctccacaaaggtgtatttatggagcctctgtccctgggaattttctcttttgaaatccctagcttgctcccgttttcccaagacctttttcatatcttcccgaacctggggggctaaggggccagatcaaaagcaggcattttgttttttcttgttctttttgtttttttcttgttcttgtggttgttgttgtttgttttttttttcatgtcctgcttttgtagaaaagcttcgttttctgatcagcccatgtatcctccctttgtcacatgcagcgcctgtcttcagactgtgaagaccagatccgaatcattatccaggagtccgccctggactaccgcctggatcctcagctccagctgcactgctcagacgaggtgggatttgcgtgcaaaactggttacgcacagagctgctcagagaagtttccactggagaaaagttgtttactttctctcccttcagccgtgaatgatctggtgaattgaaggccatcttctaggctctccatggtctgcattcctgttctttgtaacactgaattcaacttggcattagtcctgacactctaaagcgttgttccatatttctctgttgaacaagggtgttctttcattatagctctctgtaaatttgttcttcccttcttcttattctggatggtaaacccaagacctgccagaaagataaaagtgctttcagctgggcacggtggctcacgcctgtaatcccaacactttgggaggccaaggagggtggatcatctgaggtcaggagttcaagaccagcctggctaacatggagaaatctgtctctactaaaaatacaaaaaattagccaggcgtggtggcgtgcaccagtaatctcagctactcaggaggctgaggcaggagaatcacttgaacccgggaggcggaggttgcagtgagctgagatcatgccactgcaccccagcctgggcgacagaggaagactctgtctcaaaaaaaaaaaaaaaaaaaaaagcccgggcgaggtggttcacccctgtaatcccatcacttagggaggctgaggcgggcagatcatgaggtcaggagattgagaccatcctggctaacacagtgaaatcccagctctactaaaaaaaaaaaacattagcccggcccggtggcgtatacctgtagtcccagctacccgggaggctaaggcaggagaatggcatgaacccaggaggcagagcttgcagtgagccgagattgcaccgctgcactccagcctgggcgacagagcgaggttccatctcaaaaaaaaaaaaaaaaagtaattctataatggccgtaaggaagtgcccatctttggagattattggacttcttagctagaaaaggccttgtggagagcgtgttcaacatatgttaatttcaggagctcataacaaaagctgttacaaaaaagctcactcataaaactgtccaaagaaacttaatatttttgtctttgctgtgggctgtgtttctcaactcctgtgtatgtgtgcgtgtgtgtgcgggtacgcgcgtgtgcacactttcaagttgagagtctggtttgaccctgaacctatgtgaatgtcaagcgtttgcttttcgtatttgatttggttatatataaccttgctcctgtggaatcaagtagcagccttctttttgacaagtcctgagatctgactcaagtctcagtgtttacagtgtaaagatatgacatttattgattttccactctgtgtgccagtccttgtgaagaatgaagcctggcatccaatataggaggaggggcacgaaacccccaggaaactgtttgtgatgagccctggcacaggtgtgggacgatcatcaaactgacatgtttagagaccaagggttctggtgatagcagtgctactgcccctggcttgtaaaacagcagtaggccagtgaagagggggcacagatcctgcggtgtccagagctgattggaatcaccggactcatctgcttttgaaactgtcagttcaggccgggtgtggtggctcatgcctataatcccagcactttgggaggccaaggtaggaggatcacctgaggtcaggagttcaagaccagcctggccaacatggcgaaaccccatctctactagaaatacaaaaatcaggccagttgcggtggctcatgccctgtaatcccagccctttgggaagccaaggtgggcaatcacctgagatcagaagttcgagaccagcctgactaacatggagaaactctgtctctactaaaagtacaaaattagctgggcatggtggtacatacctgtaattccagctactcaggaggctgaggcaggagaatcacttgaacatgagaggcagaggttgcggtgagccgagatcgtgccattgtacttcagcctgggcaacaagagcaagactctgtctaaaaaaaaaaaaaaaaatcagccaggcatggtagcacgcgcctgtagtcccagctactcaagaggctgaggcaggagaatcacttgaacctaggaggcagaggttgcagtgagccgagatcgcaccactgcactgcagcctgggtgacagagcttggctctgtttcaaaaaataaaaaaaaaaaagaagaaactgtcagttcatttctgtgctcagtggggtagctttgttttttgtgtctcctgaacagatctccagtctatgtgctgaagaagcagcagcccaagagcagacaggtcaggtggaggagtgcctcaaggtcaacctgctcaagatcaaaacagaattgtgtaaaaaggtaaccaccgtcaccttcttttcctcacttcatttctttttttttttttctcttcttccttttaatgctgtagtctgcctaccttggtaataaaaccaaaaatctcaaccttctgcccagcactcttttcttgctgttccttcttaccaaactttcatttgattttgactgctcatctcctataatgtgaatattcttttcttttctttgagacggagtctcgctctgttgcccaggctggagcgcagtggcgtgatctcactgcaacctctgcctcccgggttcacgccattctcctgcctcagcctcccaagtagctgggactataggcgcccgccaccacgcctgactaattttctgtatttttagtagagacgggggttcactgtgttagccagaatggtcttgatctcctgacctcgtgatccacccgcctcggccttccaaagtgctgggattacaggtgtgagccaccgcgcccagccaaaattaaccttttaaaaaagaatttcactgatgtcattattgaataattgagaacattgtgtgcacattttttcgtctgttaaaaatgtggaaagctagatccgtatattttcctttgcctcttttatcatcacatgatcccatataactttggggaggattttagaatattatttggcctttggtttttggtttttatttctcttactgttgttttatagggactagagtcttgtctggagcatactaacttttatttatggaaacatttctggcctatctttacctcccatagttcccttatgtataaatggagaatctgcagagttgatttcagttccatcatgttgatattcctctcattcaggacatctgtaaacacaaataagaattgctcttgtagtagatgttatgccctgtcctttctgtttttctttctgaggacaacagaggtaaagtagaacattttgtaaacaaatgtgcctttatctaattggtatttttttgtttttgtttttctttgagatagggtcacactttgtctcccaggatggagtgcagtggtgcagtcatagctcactggacctcaaactgggctcaagcagtcctcccacctcaacctcccaggtggctaggaccacagggcacacgattatgcccagctaatttttttttaaataattttctatagagatgggggtcttgctgtgttacccacacgggtctcagactcctacctcggcctcccaaagtgctgggattacaggcataagccaccacccccagtcccgattgagaattttaatatagcatattactctgattttaagatttcacgttttcatatttcttaaagtaacacagtaattgtatcacaccaataaaaatattaacgtttaggtattttaaaatgatacgacatgacatacgggaatgccaaaaacacaaatctgatcttacagtcacttacagtcccctgcttttttccaacacacagttttgtatccctaaaagtagttagttactcaattaaattctgcattctgtacatcatcaccaccttgcaacctgtcccaaagtggtctctgttgttagccctcaacttccccccttttttattagtatatgaagtatttacagacaacagatctgatgcatttccccttcaaaagctctgtctgcaatgaccctccctttccaggaagtgctaaacatgctgaaggaaagcaaagcagacatctttgttgacccggtacttcatactgcttgtgccctggacattaaacaccactgcgcagccatcacccctggccgcgggcgtcgtaagtctctgtgttcactcttgatcctgtctgaactctcttgggaagagcaaagactccctcttagacatcagttgcagctactgtggtctgtatggtctgtagttgtagcccagtcatagacaacattccctggggacctgggtgatgccaaaactagacctttatggcatcatgaatttaggaataagcctgcgagtttgaactggccttgtcatgactggagctaaagatttgatgaacagggagaattgaggtatttattagggaagcagaagttaaagtcatcatcatggtccttttcctggtgccgaaactagaagccagcttcacacacttccccggtgacgacagtggactcagtagacaggttctgtgtgaggagggagccaaggcaagtgtgagagttctttttgagccacgtatacccaataaaactaatagaagttgtttgtttgtatttttatttatttttttgagacagagtctcactctgtcacccaggctggagtgtggtggcatgatctcagctcactgcaacctccgcctcctgggttcaagtgattttcccaccttaacctcctgagtaactgagactacaggcacccaccaccatgcctggctcatttttgtattttttaagtacagacagggttttgccatgttggccaggctagtctcaaactcctgacttcaagtgatccacccacctcggcctcccaaagtgctgggattacaggcataagccactatgcccagcctgttttcgttttaattttttgaaacaaggtcttactataatgtagtctcaaagtcgtgggctcaagggatcctcctgcctcagcttcccaagtatctgggattacaggtgtttgccaccacacctggctctaaaaataaggaggttttaagagaggcttcggacgccaaccctggaggttacatatcatttctctccattgttggatcctggatcaagtttcctagtatgtatttaactttgttgagcctgcagatctgaattctctggtggttgtgcaccctcttcctcatctttacagaaatttctctattctgtacagtttcaggttcttcttattattcatttcctcccacagaaatgtcctgtctcatggaagcactggaggataagcgggtgaggttacagcccgagtgcaaaaagcgcctcaatgaccggattgagatgtggagttacgcagcaaaggtaatgaccaagagaatctccttttttaaaaaaacaaaaaaatatggaacacttcaccaatttgcatgtcatccttgagcaaaggccatgccactctcctcgctgtggctgtccagcctcttttagatatcgcactggtcttgtccttattgtgagactagcaataagtgcgtttgaaaacgtggtcagggccgggcgcggtggctcgcgcctgtaatctcagcgttttgggaggccgaggcaggcagatcacgaggtcaggagatcgagaccaacctggccaacacggtgaaaccccgtctctactaaaaaacagtaaacatggtcagtgtgcttttagaattccttggctgcccgtgagcctggagccgtctccctgtgcatcgggctgtctgcaaggctttgccagggccctcctttctcatttcgcccactgttcaccgctgaaaagtgagtcacccaaagacaaaagagatgtcacacccatggcaaaagaaagaaatccagcctcgcctatgatgaagcttgcttttatcattttacagtctttaggagaaaaatacatatttgaggccagtactcatctggtctggaacatggagaagaaggggatgaagaaagactgtaggacactcatgaatgtgtatgatacccaggtagacttgggctaggggtaatttttcctacagaggttcagcctcagtgagaagaataacagttcttctcgtgcatacattgctttgtagtttacataacgctttggtggacgtattgcctgatttgaactttgaaaccctgtgaggtaagtataatgactgtttcgtcactttacagtgaaggaaactgacttcagaggtcacgacttgcccagagtccctctggtttttagagccatgcttttgtattgactcatattgggatagacatctgcagtggcctaagatcaagagagtaatcccaggaccacccctccttcctggccaattttatcacccttttacttccaagtcaagggtaacaagtcaagaggaacaatcagagaaagtcttcataggtcgacagcaggaaggtacaagggagggctcctgtctgtcacagtagtcaacactctcctcacccttctgccaagggaagaaagttgcctttaaagccggtggctcagggaagcggcagcaggagatgctgcgttacttcattctgcctcattgtgtccagtcctttgagctgtgtattattgcttcagagtgactcagagtaattcacggcttgttttgtgttggcaactattggagctcaaatctcattcatctcacgcctccctactctgttctgtgtacgtgatatgagcatagaaacagcccagatgcctctgggccacaccatctcagcagccaggctgggatgcaaaagaatggggacatgtgcacctggggacccttttggtcctgattctgccatagcaggctaccatcaaggtccgttagggaaagcagtggaaaactgaggatgaaagatagctgaggttaaattataaatgtccacaagtggagggcggttaaatatattctgtcaatataagtcttgtttgcggtgcagtggtgtgaacatggctcactgcagcctcgaactcctgggctcaagtgatcctccttgagtagctgggaccacaggtgcacgccaccacacccagctaattttataattttttgtggagacaaggtcttggctatgttgtccaggctggtctcggcctgcacattgtttttgatgtgggaaatgcttatgatataatggtgaatgaaaaaagtcaaaatacaggctgggtgcagtggctcacacctataatcccagcaccttgggagaccgaggcaggaggatcacttgagcccaggagttcgagaccagcttgggcaacatagggagaccccatctctaacaaaaaaaaaaattttttttttttttttttttttttttttttttttggggacggattctcgtcctgttgcccaggctggagtccagtagtgcagtcttggcacactgcaacctccgcctcccgggttcaagcaattatcctgcctcagcctccccagtagctgggattgcaggcgagcgccaccacgcccagctaacttttgtatttttagtagagacagggtttcaccatgttggccaggctggtcttgaactcctgacttcatggtccaccatctcagcctcccaaagtgctgggattacaggcgtgagccaccatgcctggccaaaaaaaattttttaattagccaggcatggtggtgcacttgtagtctcagctactcaggaggctgaggtaggaggatcccttgagctcaggagtttgaggttgtagtgagctgtgatcgcaccactgtacaccaacctgggcaacagcgcgagaccccaactcaatgaaaaaaaagccaaaatataaaatttagaaataatatagaatttacaaggccgggcgcagtggctcatgcctgtaatcccagcactttgggaggccgaggtgggcggatcacgaggtcaggagttcaagaccagcctgcccaacacagtgaaaccccgtctctactaaaaataccaaaaaaattagctgtgcatggtggcgtgcacctgtagtcccagctactcatgtgggtgagggaggagaatcgcttaaacctgagaggtagaggttgtggtgagctgacatcatgccactgcacaatgcctgggtaacagtaagactttgtctcaaaaaaaaaaaaaaatagaatttacaaaatatagaatatgtaaaacgatgtcaacttttatctttgttttttaaagaaaggcagcaaacgcatttaaagagcataaaccaaaagatagaagaacccatggccttatagaagtcatttaaccacactcacccctgggcactgattctccatccagagtatgggagtggtgaaatctgcttgctaggcttggtgtgagtgctaaatgagtgagggcagggggagcccttcgtccagggcccgacacatcttcagtgtcctggtgttagtggtgatcactgtgatggaattgtgggtgactgcaccactttgtctctttctgtatttctaattttgtgcagtagacgtgtgtatagttttatgatcaggaaaaagagttgtagctctgtgttgatttttcttatctcctgccctccctctccaaaagaaaagacataaattaaactaggaactgagagggataagttagacctagcactgccaccagcccagtgctctctcagagaatcacattgccttgtgtcattctaggtggccccagcagatggcttctctgatcttgccatgcaagtaatgacgtctccatctaagaactacattctctctgtgatcagtgggagcatctgtatattgttcctgattggcctgatgtgtggacggatcaccaagcgagtgacacgagagctcaaggacaggtagagccaccttgaccaccaaaggaactacctatccagtgcccagtttgtacagccctcttgtatagcatccccactcacctcgctcttctcagaagtgacaccaaccccgtgttagagcattagcagatgtccactgcgttgtcccatccagcctccactcgtgtccatggtgtcctcctcctcctcaccgtgcagcagcagcagctggtcgctggggttactgcctttgtttggcaaacttgggtttacctgcctgtagacaagtctctctcataccaacagaacttccggtacttccagaaccaactcacctgacctgcaactcaaaggcttttttaagaaaaccaccaaaaaaaaaaatttttttaaagaaaaaaatgtatatagtaacgcatctcctccaggcttgatttgggcaatggggttatgtctttcatatgactgtgtaaaacaaagacaggacttggaggggaagcacaccacccagtgtgccatgactgaggtgtctcgttcatctctcagaagcaccttggggcctcgccagggccgtggtcttcaccgaggcgtgggtgggcagccgttccccaggctgtgtggggtcctgctttcttctgctgagacagtgacgctttccagtttccaccctaatcagccactgctggtcacagccccacagccatgggtatttctgtggtctcctcgcttcattgaagcaaagcatgagccttcctagacaagggcagctggggaggggaagggaccggaagtttgtgaagttgaacagtccatccatctgcactgagaggctggatcctgagtcccggggcagcaggatcccaggaaccttcctcctccagggcagcacaggactcagccatgtctggaccggccctgctgaggctacagtcactctggaagctctgcgcttcatcaggaggcaggactgtggcgggaggggtccttgaagatgggtgtggggagcagtgggtcaggaagtgggagccagaggtttgactcactttgctttatttttcaggctacaatacaggtcagagacaatggcttataaaggtttagtgtggtctcaggatgtgacaggcagtccagcctgacctttctgcacactccagacaaacttcccagacaagctcctttgtgcctctacgtggagagggtgtggaaagttatcacattaaaagatggaggatttgctctgttttttttctttctgtccatttgctgcgtgtacccactctagtaggcattggctaaatgttgtattttggcgattcatcaacctttgcagaatatgggctttatagaagcaatattcttggccatcccgcctcattcctccagtgtggagatgacaagtctgggtgtgagagggaggggtccgggcatcatggttcagcgtggcactcctttggttgagtttggggcatgagatcacagtggctgcacaagagagcagtgtgtacagtaggagagacatttatgtaatatatattttattaacctgttagatgtccacaaagtattataaatcacgtgcctaaaactgtccatgtagaccaaggcctgccctcggcgccccccactcttgcctctgctctgcacagtccacgtgcactgcaggaccggagcgacacatgtcttccctgaagggtgttcagtacaaggcgtgtcagtttgtggatcagttgatccaagttactccttgtctaacctgactgacatatatttgaatactgtggttttctttcttttttttctatttgctgcccttcctggaggcagtgggttccagaagccaactgattgtccccctgccaagtcaccaagggaagctgctaagctgcttagtcccctcggtcctgcttgtagggtcttcctgattgtcaacagctgtctgggatgcttcagtctcctaaaactggaaacgcagggtgcgagcagcacacactgcctcccgccactgccagccggagtgagcggcccgagagtctctgcaggttcccctgggggctgggggccgctgaggcctaatatcaagagccaggaatgtcatgtacatggaggtgcctacggacgtgcctggtgtggtttgcaggtaggatggatgttcactgtttgaccgggtggggtatccttcctctctgcagtctccttcccagtatgcgtaaacacccttatagttctaattgtgttgatatttctgttctttctgaattgagagaaaatcccattcgttgtctgcagatttggaagtttgatgaggaatttggttcttgaaacatctgtctttttttttttttttgagacagagtatctctctgttgcccaggctgcagtgcagtggcgcgatctcagctccctgcaacctccacctcctgggttcaagcaattctctgcctcagcctcctgagtagctgggattccaggcacccgccaccacgcctggcttatttttgtatttttagtagagatggggtttcaccatcttggccaggctggtcttgaactcctgatctcatgatccacccgcctcagcttcccaaagtgctgggattacaggtgtgagccaccctgcctggccaaaacatttgtcatctttataaatggtcagaatagaaaagttagctctgccagtatcttcaattacttattacaagaatgtctttcatcatcttacttggagcattttccaatgactggctcttgagagccccaggcagggccccgagcaagtttttctaagtgccaaggccagcaaagtctgaactggccgcactcattaagtccctcatttggcaaaacaaaacagggcctggggcacccctggttcctggccttataggtcagtcaactggctgagaaatggtcaagaaaagaaacaatgacccttctgtggatgtgagtggatgatggactctggcctgtgtctactctcctgatgtgtagcccaccaacagtaatagaagtagagggtagggggttttgccaaggctaaggcttcaggtacttgctaacagttatagcagctgggtcactgtcatctggacttaccagttcatgccagtgtccctgtgacttatgcatagtgtgcgccacagccctctagaggtacctggagcccggactgccaggctggaggctctggggtactgaaggtgagctgtctgggcaaactattaagaacaagacgaactgttcacaatggagcttctcccacagatggggagctctgtgaggccttcacctgggtgcatgttggacttccattgctgttgctgttgtccctagacaagcccgttagcaagaagcaccggcaggggagccatgcactccataggcttgggatcacccccgggaaagcgatcttccccgggctaccacccccagctgcagttctgtgttagtgcatccttcaaagctaggagaattctagggtgaccagtgagctaatgttgagtgagcaggtattgacttgaacacactgcaggcctttggctgtctcatgctgtccttactcttcttgggaacagtgagtcactcagctggccagggtggggatgcatcctggtgaagagacagctttccctgaagatgctacagaaagttactgtcagatttcatttgtttctgtttcctgagatcaactaacagaagaatctaatggtgagagtgtcttcattcatgttttacgttttatcaaggcacactggaaagggaattatgtggctgacttcccttggccttcccaagagaagattctgttcttatgtcagtgtggcttctggaagtgtctcctatcctcccatcctccaggcctgtggtgtgacttctgccccgaagttcctactatagtgagtcatctggggagaggccactgaaaagaggccttcccttcccatttcctcccctgcctccttagaacacactctaagtcagaacttaatctaagaagaaggaagctggaccaggaaccttggaagtcagccagccctagaacagtcagcctaaattttggccgtaatggcttttttggttttttgttttgtttctgagatggagtctcactccgttgccaggctggagtgctgtggcgctatctcagcttaccgaatcctccgactccctggttcaagcgattgtcctgcctcagcctccggagtagctgggattacaggcatgcaccaccacacccagctaatttttgtatttttagtagagacggggtttcaccgtgttgtccaggatggtctccatctcctgacctcatgatgtgcccacttcggccttccaaagtggccgcaaagtggcccacttcggccaaagtgcacttcggccttccaaagtgcattacaggcgtgagccaccacgcccggcctggccttttttttttttttcttttgagacacagtttcactcgttgcccaggctggagtgcagtggcgcaatctcggctcactgcaacttctgcctcctaggttcaagcagttctcctgcctcagcctcccaagtagttgggattacgggcatgcaccaccatgcctggataattttttcttatttttagtagagacaggatttcatcatgttggccacgctggtttcgaactcctgaccacatgtggtccacccaccttggcctcaattatgtgcattttggtatatttacttgtatttcaacatcttgtgagtttgaaaaacctgaaaggccagaatgcttccttttatttctcaccatttgggcagcacctaagtggttttgtaaaatgcagcatctggtgctgtgggtctctctcaggccttgagggacacttccttcctccccactcgcctcctctccactagactttggttcctagagggcgtggggccgggtctgaggttcttgcctgccttccctcccattggtctttggttgctcatccctctaactgcaccccttcttggtccttcctccacagacttcagataatagataagtcattagcaaaccagaccgaatctttagggtgaagagctccccaaagccatctggtgaggtcattgtggggaccagggactgattatttgtcacctggatcacaaagatgggactgtctgctcaggctggtggtgacaggatcctgacccgtggtcctctcccgctccctctgctccaccaggacacatgtataggacactgtgctgtgtgcagtggagaaatctccctgggccaggggaaagttcagacagtgcctctagattgtgttttgcctcctccaatgtagagttgacatctggaccccagagcccagcagggctttctgtcagacatgctagggtggtagaaatgggccctccaggtccccctgcagtgcactgggcagagacctccggaaagccggcagcgggagcgcttcctgggcagcttcccccagcacagtgttcccaaaccagtccatccggaaaacagtctgtacagcaaatgctgtgtgagatcttaggcttttcactttttttgttttgttttgtttttgaaagaaagaaaaaaatacaattaacaagcctcttttgtaaatgggtttcctttctatgtataaaatcgtggtggtcccttgtttttacatgttcatgctgtgtaattttgagatgttactgagatatgttctgaacataatgtgcatttttttctgtacagatgaaatgggagaatttaataaagagtttgcaggtttttacttgttaaa

SEQ ID NO: 62 - DNA, 6136 bp, Homo sapiens
ggcagggcctcgcccacaccaaacctgtggacgccgacccgggaccgccgctggctggctgctggctcactcgaccgtcatggagaccctgggggcccttctggtgctggagtttctgctcctctccccggtggaggcccagcagggtaggtgcaggggggcgggagggggcgtcgcgggataggggagttggtcaggtgatcaccatctcccaattttccatggcgagaaaaaggagagggggcaggaagaaaaggaagagtggcttggaggcccttctcaacccccgcagtaccgcccggcctccctctcgctgggctctgccctcctctgtaagggaccccccaccgcccacccgagcctttcccctctccagcccttctgagcacacctggctgaaccccccgccttgagctcggccccactctgagctcgggcctcctttacaagcccctccccatctgagtccccgcctcttttgtgaaccgctccttctcactcctcctcctttataaacccctccccgagcccctcctcctctgtaagcccctcccctctgggctcctccttctttataagcccctccccctgagcctctgcctcctctataagcccctctccctctgagccccctagttcacaagcctctccccatccgagccccttcctcctttgtaagcacctccttctcactctccctcctttataaacccctccccgagtccctcctcctctgtaagcccctcccctctgagctcctccttctttataagcccctccccctgagcctctgcctcctctacaagcccctcccactctgagccccctagttcacaagcccctccccatctgagcctcttcctcctctgtaagcccctccttctcactcatcctttatagacccctccctgagcccctcgtctgttgtaagcccctcccctctgagctcctccttctttataagcccctcctcctgagcctctgccgcctttataagcccctcccactctgagaccctctccccttataagcacctcccctctgagctcctcctttataagcccctccctctaagcctctgcctccttttataagctccccccaacagctcctctgttgtaagccccaaccccccagactcttctttataagccctccccatctgagccacctcctccttcataagcccctcccctgagcttgttctcctttataaaccccacccctgagccactcctttgtcataagccccgcccttctgaggtccgcctttataagcccctccccctgagcctctgcctgcattataagccccgccccttctgagccctcctgatttgtaaactccgtcccctctaagccccccttcttttataagcccctcccctctctgggcccccaggctccctcccactctggtaaggtaccctccccctctctaaaccctcccgacccccctacgccatccaggtctctgaagctccgtccctttccaataccccctctgtcggagcacccccagtgaccttctctctctccttgctagggtggtgggggaagggggtcttctgaccttttcttcctctgagtcgaacctccccaacttcctgcagccacggagcatcgcctgaagccgtggctggtgggcctggctgcggtagtcggcttcctgttcatcgtctatttggtcttgctggccaaccgcctctggtgttccaaggccaggtgggtgcccgcccccaccccgctgcccccacagccctgcccccacccccagcttcccaaccctctctggtacccccatcaccagcctcaaagtccgaaggtctcccatttccctgctgctcctccaacctctactctcagagcccagatcccgggcttgcacccgcccgtctccccaagacaacgagccaggcagcccagcccttccttgcgtcctggggttcatgagccccggctgggaggttgggacagaggctgaggctgtcacaccgcttccttccctttaccgccccctttctcctctcccgcccccttccacctttccctttatctctgcagggctgaggacgaggaggagaccacgttcagaatggagtccaacctataccaggaccagaggtactatgcgtgcggatgctgggggtctgtgtgaacccctcctcggggtgggggaatgggtgtgcgcagatgaccttgctgtcctgaatccttcaaacacattcctgccctgggatcttcacctttcctgtatcttctggcagctccttctcctcctccagtccctagtcaggggtttccagcctggccaccagccttcctgacactgtccccagccccaagtctgattcatgcttatcaccagtggagctgtcttagttgttcactaattttgagacattacgtggtgccttccagttgtgtaggcaacttagcttttgtcctggctgtgtcctcatacccagcattgggcctggaacacaggaggtgcttaataaatacctgttgaagaagactgtggtgtaggattgtgtaggtgtctgtacaaggcctaggtatgggcgacccacctggactcagtgcctcctatggctctgactgcctcccaacctgaggattcccacagaggactcagggatgcagacctccatcttccatccacccatcacccactcatccacccactcacccattcatccactcacccattcacccactcacccaccatccatccatccatcatccactcatccacccactcacccattcacccactcacccatccacccactcacccattcacccactcacccatccatccatcacccaccatccatccatcacccaccatccatccatccatcacccacccatccacccactcacccatccacccactcacccattcacccactcacctatccacccactcacccatccacccactcacccatccatcacccattcacccactcacccatccacccactcacccatctacccactcacccatccatccatcacccaccatccatccatccatcatccatccatccatcatccattcatcacccatctgttcactcacccagctgcccacccacccatctattcacctaccacttatccacccactcacccatccattcatcaccccccatccattcatcacccatccacccatcacctacccatccacccacccaccatccatccacccaccatctgtctatcatccatccatccatccatccatccatccatccatccactcacccatcccccaacccatccattcaccaacccgtccacccactcacccatccattcatcactcatccatccatcacccacccccatccattcatcacctacccatccacccacccaccatccatccaccgaccatccatgatccatccatccatccatccatccatccatccatcacccatctattcactcacccaccccccgacctatccattcaccaatccatccacccactcacccatccacccacccactcatctgttcacacacccatccatctacccacccatctatccatcagccatccattcaccatccatccacccacccatctattcatccacccatcaatccatcatccatccacccacccacccatccacccatccatccatccatccatccatccatcacctatccatccatcacccatctattcactcattcatccacccacacagccatccatccacctacccatttatccatccatccatccttccatccatccatccatccatccatccagggctgggggctctgtcttgggcaaaggcttggggacaggagtaggagagtgggagctgggaggtgaccagcctggctgggagagtctcagctgagtccaagatgtgcctgagggagaggacctgagtggtggctttgtctaagacctggctcagccccagtaaaatatgattcctactcccaggatgtactgggggatctggatcccacctgtgcacctgtacctgtagcttcctttctgccttgttcaatcctccatccatccacccaaccatccacttgtacatccatctatcagtctgcccgtgcagtcctcaccctccaaccacccatccatcagtccacctacccattagcccattgatctgtccactcactgatacacgcacccacccacctatgcgtccatcgaactatgcagtcttcactctccaactgtccatccatcagtctatctatccattagctcattgatccatccacccacctacagtctcattcatcctccatctacctatccattggtatgtcattctcttcttcctccaattcatccattcatctacttattaatctgtccctccctccatgcaaccatcaattcacccaactgcttatctactcatccatccatccacctatacattcattcattgatctatacatccatctatactcccatccacccattctccattctgcatacccccatccactgatccatcagtctctccttcctgcaatgtattcatttatcttccaattcatttattcaacctccatgcagcagtccattcatgtaactacttatctactcatccatccacccacccatccatccattcatccaccaacccattcattcatccatccacccatccatctatcatccttccatccaccatccatcaatcacccagccatcatccgcccacccacacactcactcatccattcattcgccaactcagtcacccatctgttcacccacccattcattaattcatccacccactcatccatccattcatccacccattcacttatccacccacccacccatcaattcacccaccatccatccatcacctatccacctaccatccgtccacccactcaactatccactcacccatccacccacccacccattcatctgtctactcatccattcatcatccatctatccacccacccacccatccatccatccttccaaccactcacccacctagccatccacccgttcatccagtcatccatacccccatccatcatccatccacccacccactatccacccacctgtccactcatctacccatctattccctaacttctttacacacctacccacctatccatccatccatggagcagttgagtcttagttgcaatgatgatatgcagtgtgaacctccatatcatctgtccagccactgcacccagcctcaaaagcagcctcctttgccaggagtaaactgagtcccaagaggcaacagggagcctttggcttatgtccatccatccatccacccatccatccctccatggagcaattgagtcttagttgctgtctttgtgaaatggaaatcgtgaggccgcgtagttagggttattttgaagattcactgagataccgcttgtaaaatactcatcacatgggctggctcaagtgagtggccattaaataggagtgtctctgtttcttattatggtttggggcctttgtatccctacagtgaagacaagagagagaagaaagaggccaaggagaaagaagagaagaggaagaaggagaaaaagacagcaaaggaaggagagagcaacttgggactggatctggaggaaaaagagcccggagaccatgagagagcaaagagcacagtcatgtgaagattcctggctgcctcttccaggcagtcccccagagatgcctcttctgccccctaaaagcagtgccctggacttgaagcccgtgaaatgactccatctgggattcagaatacagtgttctcaagtgaagaaggcttggaacccaccccacctccctcattgggggctctctgggcaaacatggttttcatgcacccctcttcctgagcttggtccctgcctggtgattcttcttatactcggagagcatccctggttgaggagacacccgcaatcctccacgatctcatggctccacctgcttctccccactgcctgatttcttttctctctgcctgatgtctactgaacagaacttcccctctcccatgcacccactgccagctgagagctgcttcccaatggcctgcattaaagcattcgtaacagccctttg

SEQ ID NO: 63 - DNA, 24064 bp, Homo sapiens
ccgtgtccgcatgcgcgactgagccgggtggatggtactgctgcatccgggtgtctggaggctgtggccgttttgttttcttggctaaaatcgggggagtgaggcgggccggcgcggcgcgacaccgggctccggaaccactgcacgacggggctggacgtaagtgtcgggcggggagtgggggtaagagagtagcggccgcaggctggagaggcctcggagccggggccgtctgacgggctggtgcccacagcacaggctcgttgccgccaccctcccggaagccgcagacccgggctgagccgccgcggacctctcctctcctgggtccggcggcgccaggagaaggcgacggcgtccagaccccgccaagacggagaggggaccgcgccctcccccgggacaccccaggatccctggaaaatcccccgatcccccacttcacagctggacaagccgaagccccgagaaaggagcgtgacccggccagctccctcagcgaggggtgccccggctaaaggtggctcccccatcttccagcggcgtccctcgagacctaaaagtcccagagtttggagggcggggtctggcttgagcgtaccagtcgtcgtgcaaagaaaaatggattcggggtggggccattgggatgaaccgaaaataacacttattgaattgcagttcttcccggggaagaatcaaatgagtgaatttcctaaattgaacttgtcccaaaggcatcttagcattggctgtaatcatatattttaatatttaatttttaaaagagaagttaaaaatgggagacgttgctctattgtagggtgtcatatttttggacaaccataattgctggctacaaagtatcttaaggaagtcaagttcgctgtaggagtttgggtgttgttattcgcaagttatatgtatttcaggctttttcatactctgaaatagagataacatggctgtatctcaggtctctactgctcggcttacaggaatgttttatataatttgtaaagacagcttgggtcggctatatttaaatagcagttggatttttgtaatctgaattactattaaccacgattctgtgcttgcttttggctggaaacacccgttaggatcagagatagggatattaaagtggatgttctttatatagaaatgacaccaaaaggcaggcttgcagaaagaaaaataatgaatgaagtgaaaggaaatgatgtgggtagaggtaagaactgcagtgcagtgtttaatttcttgatttaggtgtgaagaaacacacgttctgtgataaaatatgtaaattagagaaatatttttcatttgaatctgtaattccactcagagccaaagtttatcacttgtctctctactaatgttagtgctcctggactgtaaatatcaaattcatttaataagtttggaatcaaaatgatacaaaagagctcctgtggattagtaatcatatacttggtattaaaagtaccacctaaactaatttaatacctacttagaaataataggatgtgacagattttcaggaggaggtcaaccagtagttaaaattttttcaatatttggagacccacctttgttaatactgcttaaatatatccaaaccatttatttctatttatttattattatttttgagacagagtcttgctctgtcgcccaggctggagtgcagtggcacgatctcggctcactgcaactttcgactcccaggttcaagcgattctcctgcctcagcctcccaagtagctgcgattacagacatgcgccaccacccccggctaatttttgtatttttagtagagatggggtttgccatgttggccaggctggtctcaaactcctgacctcaggtgacccacccacctcagcctcccaaattggtaggattacgggcatgaaccaccacgcccggcccccaaaccattttttacattaaaaaagatactaaatgaatccagatattactttccaaagttataatgtggaaattcatcaaaaactaaatcaaatattctgaagaagtatgtggaaccaaaataaagcatttgtaatttcacttttatctaattattcctgagctattaattatttttcgggcttgaagcaagtaaatggaagtacttatttaattgtttgtttgtttgtttttaagtgacctgaaaaaaatgtctggatttctagagggcttgagatgctcagaatgcattgactggggggaaaagcgcaatactattgcttccattgctgctggtgtactagtaagtgtcattgattatttgggccttattttttggtgcgtttgtgtttatgggttttgaattctgcaggatgttttaaaatatgtactatttattttatctttgaccactttgaccatgttgatattttgttgtttgtggagagttattagttccactttaagagtttatggtttaaaatttgattaacaagtggttgggttgttttaactgcatggtaaaaatggcataataaaacatttgttcattatatggattatatctccttttaatgagtatattaaggtacaaggaagtgtttaagacgcagtcaggtcaaaaccagtcaatagatgtgattgcatttctccataatccagttaactttcttctcagtctcagggaaaaaaaagtgctcgctttggcaacacatacactaagattggaataatacagagaagattagcatggccccttaaaatttttttttaaaaagcaaaaacaaaaaggaaactcattaaaatacattgtgtggaagtaatttacagaataaaattcttatttacacttcagatccctcaagggatctgctattagttttttatgatcatatggtgtcgtaggctctaaagagtaattttttatttttattttttgagatagagttttgctcttgtttttttgttgttgttgtttttgttttttttggttttttttgagacggagtctcagtctgtcgcccaggctggcgtgcagtggcgcaatctcagctcactgcaagctccgcttcccggggttcacgccattctcctgcttcagcctcccgagtagctgggactacaggcgcccgccactgcgcccggctaatttttttgtattttagtagagacggggtttcgccgtggtctcgatctcctgacctcgtgatccgcctgcctcggccttgcaaagtgctggaattacaggtgtgagccaccgcgcctggccttgctcttgttttagtagagacggggtttctccatgttggtcaagctggtcttgaactcccgacctcagatgatctgtctgcctcggcctcccaaagtgttgggattacaggcatgagccaccgcaccaagccattttttcttaagctttaagatttatttattttcgagacagggtctcactctgtctcccaggctggagtacagtggtgaaatcactgctcattgcaacctcgacctcccgggctcaggtgatcctcccacctcagcctccggagtagcctggaccacggatgaaggccaccacaccgggctaatttttgtttttttttttgtttgttttttttgtagagatgaggtctctccatgttgcccaggctggtctcctactcctgggctcaagtgattcactggccttggcctcccaaggtcctgagattacaggctattgcacctggccaaaaagctttgagtttttagtctatgaagaaaatatcttaaatacattgagctgagggtaaaaagaaaggcatatgtactcatgctagccattaaaaatgttattaatcgagtatggatctgtctgtaacctgataaaagtaatttgactagcctaaaattgttactttaaaataattgccagaagatgtcagttgccagagctaactgagtcagggtttggtgtggggataggaaaggaaagggggttacttttaaaatcttctaggctacttgtcagaatttggttaatataattttattgtaaatatctgctcagatgataaaaactgtttttgaagttttggcgttattttgttatacctttgcccttgataatatctagagccaaattcaattagataaattgtaatctggtgtttaaattaaatttaaaatcacacctgaaaccatatttagactgcactggaattcatcaaaagcagaacctcagagctgttatttcacaccaagaagatagctaaaattctgtgaacaatagttgttctccatattaatttgaatgcttttttcttgattttggggaatatttctctggaagtttatcatatatcaacaggacacttctgtcagttggaattggagtcacttttttcctttccccctccatgagataactggtttctagttcaccaaattagattacaaggctttattatgataaaaattaaataatgattgaagtaggcttagagaaaagttatgttaataaatataaattgctctcagatttaagggtacctaatcagttattaggccatgtgcaaattacatgtgggaaaaagctagaacatttttgaaatgtattaaaagggatctcctcacttaaataccttgcttttagccagtgagatacagaattgctatgatttctcattggtatcacctttgttttagttttttacaggctggtggattatcatagatgcagctgttatttatcccaccatgaaagatttcaaccactcataccatgcctgtggtgttatagcaaccatagccttcctaatgtaagtgtcatcgtaattggcattacttacatagcttgccacaaaataaaaatgtttcaaatatagttgcatagatttaaaattctaaatattatcagattaacacactggacatgatttaaaagtcacacagtagagatggacttatacagaaaagcagcagtcctctttattctttttgtgtacctctccactccctcccagcttctctcagctattcttttattttatacccccagggtttatagctttatatttaagtccgaaactgtgtattttgtctaagggataattctttcaacaatatttattaagcttttatattccagactctgctctaggtacaggacatatagtagttagtaaaacaggaaaaatccatgtctttttgtcatttaaaataagtgcaaaggagaaaaaatagagaaaggagatatgtgcaaataagtgcaaaggagaaagggatgtcaataggagggatagaaattaaaaaatttttttttttatagagagggtgtctcattatgttgctcaggttggtctcctgggctcaagtgatcctcccacctcgacctcccaaagtgccaggattacaggtgtgagccaccacacgtggccagaaattttcagcagagtcagagaaggtctcactaagaaggtgactttgagtaaagacttgaagaaagtgaaggagctgaccaggggatggggatatataagagaggttcattccaggcaggtgaaacagcaagtacaaaggctttacggcaaggagaccagtataactgcagtagcaagatcaagggaaagagaaattgatgaggtcaaagaagtggtggagagggacagatggtatagggccttgagaagcattataagaactttactttcagctggatgcagtgactcatgcctgtaattccagcactttgggataccgaggtgggtggatcacttgagctcaggaatttgagaccagcctgggcaacatggtgaaacctcatctctaccaaaatacaaaaattggtagggcatgcctgtggtcccagctgctccggaggctgaggcgggaggattgccagagcctgggaagtcaagtcgatgttacagtgagtcatgattgtgccactgcacttcagtctgggtaacagagcaagaccccatcacaaaaataagaactttactttcattgtaagtgtaatggaagccattggaaggtttcgagcagaggaatgaaatgaccttatattttaataggagcattcctgttgaaaaatttttaaaaccggtaaacaaaatttattgcagtgccaaatagtataagcaccatgactctgtgcttctcaaatttatcaatgtattttgaaaatattcttgtattcttaccagtttctcaaattcataaaatcgtttagtttgcttcatacttgggctgtgactttgttatttagtattgttttttcctatagttttttttttcttctttaattaagacgaggtctcaccttgtttgccaggctggtcttgaactcctgggctcaagcgatccacctgccttggcctctcaaagtgctaggattataggtgtgagccactgtgcccgacctttcctagagtttctgattgtttttttttgttttttgttttttgtttttttttggtggttgttggtagaaagaatgtatattttctttaggattcattttattcttcttgaatgctgcagttctaatttggacagttactatgtggaatgtagtagccttgttcagttttttgtttttcctagagtttctagctgccttttctttgttttcttgcattttctactattatcacatctttatttttttcccaaattctcaattatattctttaatgtattataacttcttttgttttagaaatcaacatcccagaagcccgtatctgtctgtttcattatgaattaatgactgtgtaagcctgctgcagcactgtcaccatgggacttccctcccctgttgatcagggttgaatccactgtttttccagttaccacatcttcttttttttttttttttttttggatacaagaagtatttactttggccgggcatggtggctcacgcctgtaatcccaacactttgggaggccaaggcgggcagaccacctgaggtgaggaatttgagaccagcctggccaacgtggtgaaaccccatctctactaaaaataatttaaaaaggctgggcgcaatggctcacgcctgtaatcccagcactttgggaggccgaggcaggcagatcacgaagtcaggagatcgagaccatcctggctaacacagtgaaaccctgtctctactaaaaatacaaaacattagccggctatagtggcacgtgactgtggtcccagctactcgggaggctgaggcaggagaatcgcttgaacccaggaggcggaggttgcagtgagcagagatcatgccactacactccagcctgggcgacagagtgagactctgtctcaaaaactaaaaaataaattagccaggcacggtgttgcgtgcctgtagtcccagctactcgggagcctgaggcacaagaatcacttgaacctgggcagcagaggttgctgtgagccgagatcacaccactgcactccagcctgggcgacagagggagactccgtctcaataaatttaaaagaaaaaagtatttattttagtttgtttatttatttatttttttttttgagatggagttttgctctgtcgcccaggctggagtgcaatggcatgatctctgctcactgcaacctccacctcccaggctcaattgattctcctgcatcagcctccccaagtagctgggattacaggcacacaccaccatgcctggctggtgtttgtattttctgtagagacgggtttcaccatgttggccaggctggtcttgaactcctgacctcaagtgatccacctgtctcggcctcccaaagtgctgggattacaggcgtgagccaccacacccggccgatatgttttcttagaattctcatctctttatctttttattttatgttccaatctgttaaacatttttgcatttcagttctcatgttttaatttctaagggcctttgtttccttaattatgaatgcttcctttagggatcaactctctctgtgggcctttcttttttttcttttcttttcttttcatgttagacgtgtaaggtgctgatgtaagaacaaggtttgagggaggcacatctcaaacatgcacatgaacacccaatcatcgtgcctaagaactacaaaagaatcaggttttccttttaaattaaaaaaaaaatgttttagaagtagggcctcgcttgtcacccaggctggagtgcaaatggtgtgatcataacacactactgtctcaaaatcctgggcttaagcagtcctctggcctcagcctccccagtagctaggactacttgcacataccaccacacccagctattttttaaacagtttttttgtaaagacaggatctcactatgttgcccaggctgttcttgaactcctggtctcaagtgattctcctgccttggcctccgagagtgctgcatgataggtgtgagtcactgtgctctctgcctttattattttaaaaatgtaatataaaatgcattctggccaggcatggtggctcacacttgtaatcccagcactttgggaggccaaagtgggcggatcacttgaggtcaggagttcaagaccagcctggccaacatggtgaaaccctgtctctacaaaaaaatacaaaaatcagccgggcatggtggtgcatgcctgtggtcccagctactgaggaggctgaggtggggaatcacttgaatctgagaggcagagattacagtgagccaagatcacggcactggattccagcccaggagacagagtgagactctgtctcaaaacaaacaaacaaacaaaaaacgcatttagtgagatacataaagtgcacaagtcatatatacatctcaacaaatttttcttatatatacacccatgtaaacagcatctagatcaagatttaaaacatcaccccagaacattctcaatcagcacttccatcacacctgtatagcccccatcctgacctctaccattgtccatcagctttctgtagacctttttttttttcttttgagataggctcttgctctgttgcccaggctggagtgcagtggcatgatctcggttcactgcaacctctgcctcctgaattcaagcaattttcctgcctcagcctcctgagtaactgggattacagacgcccaccactgtgcccagctaatttttgtatttttagtagaggaagggtttcaccatgttggccaggctggtctcgaactcctgacctctcaggtgatccacctgccttggcctcccaaagtgctgggatgacaagcgtgagccaccatgcccggccttctgtagacttttaatttaggttgtagagtcatctcatacaggcttccaggtaatccaagttgaaaattacacacatttttaaattttgctacagttacttaagtgtaaacacagtaacttgtattttcagagtaaagcaagtggctaagggcagccagtttgactgtgcctggcatggagtcagtgccagagtagttattcattcgcagaagtaaaggtctgacttcagaagccactgatagcaaagggctgtggtctttttctttgaagttcagccagtatgcagctatttctagttctttccatcttgttgcaatttattttaccgtaataatgatgctgttagaattcttttagaaagctgacacctaaatttcaacattggtttagatttaaaagttttatttttgtgattgtatttttgtcctgcttttgttctcagatctttaaaaaattattttgttccattttgaagcagtagcaagtctgactatggaggggaattatagctgtatatgagcttgaatgtactattcaaacgtgtttcctgctaaacttacattctgttgcattaacataattatagcagagctgacttcatgtctttataaatgtttatcatctatttggcttcagtttacatctttttattatagtgtcagatagtgtcaggccataattttaaacaaaaactgttagttaattataattcaaatggataggagtcaaaaagcagctattctttcattaatgactttattattttttctcttattacaaaagttctctgattttgtggctttaaaaatattaataaatgttctgtgtattactctgtattttttaattttaaaaatgtagggtaggccgggcacggtggctcacgcctgtaatcccagcactttgggaggccgaggtggaaggatctcgaggtcaggagatcgagaccatcctggccaacatgatgaagccccgtctctactaaaatacaaaaaattagctgggtgtggtgacacgcgcctgtggtcctagctactcaggaggctgaggcaggggaatcgcttgaacccgggaggtggaggttgcagtgagctgagattgtgccactgcactccagcctggcgatagagcaagactccatctcaaaaaaaaaaaaaagtaggatatgccaataagcaaaaacgaagttgcctataatctcaccaaactataacattttgacagatattctaccagtgttctcttctgttttctctttctctaacacacatctatatgttttaaaagtaatatttaactcttctccacttcctttcctcttcctggaaaaattcagtccaaaaactattaggtgaggtcaagcatgagaggcatcctctatagaaagacaagttgtggtggcccagagcaggctgctgggctcaggcagggtgggaaggggcagctcagcatgggctcagatcctgagcagggtgaggaggggatccatgcagcggagcgtgggatggaagaaggcagccctacatgggatgctggagtctgagcagggtgaagaggctgtccagatggggcaggagaagcagtgtggcagctctgtccgctaagagtgcccagaacagctacaccccaacaccaggagcacacctatagcccccagttatggagcatcatgttgacaaataccagacgtttcagtaaaaagattatttaactagtaacttttctataaattggagaacatacataaaaataatcatagcagagaacaaatagagattgttcattccaaagtgtccctaatagtgaagacaggattgtggtggctcacagagggctctgaagtttattcagatggctcagcaaggaaaacgagctgagaaccagtaacccaagaacatttatttgtgttttacttttatatatgaaacctgtttttaatgtatctattttatatacaaaataatttagtactgtacagagatcactgaaaataattgagtattttgatcattctgaaacttagatttgtatgaataaattaagacatcatattactgtgaaaaaaactaggattcctatattcacttttttttttcatagatacaaggtcttactatgttgcccaggctggtctcaaagtcccgggcttaagcaatcctcctaccttggccttccaaagtgctgagattactggcacaagctaccaggcctgacctaaacacatttattgagcacctactatgtgcgaagcccctagccttgtgctaggcattgagaatgaaaatgagaaacaagacagacaatggctcctgtcctcatgaagcttatattctagtgttagacacacacaactaaatgggtatatatatcataggtataatgttttgtaactttaacttgatgtattgtgaacgttttcccatgacatttggaatgtttcaaaggatacttctaaagaaagcaagcctatctcaatttagagtggtatgctatgaagagttagtaaaacaccttatgtttagagcctgtatcaaggatttaaaaaacaagattttaccacttgaatctctattcgataatatcttcagagcaaaaagttattgtattgtttgaaatataattatttctccaaacatttgatatcagtacaaaattactacaaaaaaatttattccaaagccaattttaagaaatatttggattatccagggcccattttctccctctgccattgccatacatgagtacatgttatgtctgatacatacaaatggaatatcagatagaaccaagcaaaattatctttttacctgttccaatcttagcaaaagaaaattttgagaattttgttcccgattttttttttaagagacggagtttcactcttgtcgcccaggctgaatcgcagtggcacgatctgagctcaccacaacctgtttcccgggttcaagcaattctcctgcctcagcctcccaagtagctaggattacaggcatgtgccaccatgcccagctaattttgtatttttagtagagacggggtttctctgtgttggtcaggctggtcttgaactcctcacctcaggtgatccgcccaccttggcctcccaaagtgctgggattataggcatgaaccaccacgcccagcctcgttcccaaattttaacaatcgagactcacctgaaagacttgttaaaactcagatttctgggccccatgcccagagtgtctgctttgctaggtttgggttagggccaagagaattttcttgtcaaataggttgccaagtaatgctgattccgctagcctggggcccatgaccactgctctagagagtatctggctgggcgcagtggctcacacctgtaatcccagcactttgggaggccgaggcgggcggatcacaaggtcaggagttcgagaccatcctggctaacacggtgaaaccccatctctactaaaaatacaaaaaaaattagccgggcataggtggtgcatgcctgtagtcccaactactcgggaggctgaggcaggagaatggcgtaaaacctgggaggcagaggttgcagtgagccgagatcgtgccactacactatagcctgggagacagagcgagactccgtctcaaaaaaaaaaaaaaaaaaggagtatctggttgaagagaccagtcatatgaactctttactcaagaactgaaggcttatgagccaggtgtagtggcactttgggaggtcaaggcaaggaggatctcttgaggccaggagtttgagaccagcctgagcaacatagcaagactttgtctctacaaaaatttttaaaaattagctgggtgtggtggtgcacacctgtaatcccagctactcaggaggctgaagtgggaggatcacttgagcctgggatttcaaggctgcagtaagccatggttgtgccactgcattctagcttgagcaacagagtgagaccctgtatctttaaaaaaaaaaaaaagactttcaggcctaaccttacatttgagaaactgtagattattgtttctggtaattggtgtcatggaccctgatttcttggttttattttattcatacaggattaatgcagtatcgaatggacaagtccgaggtgatagttacagtgaaggttgtctgggtcaaacaggtaaataggtgcaaacagcatcttattatacatgcttaaatccttaagatgagtatttcacatggaaataccacttttctatttgttttaatatatctgtgagtaacagcttattattttgaatctattgttttatgttttgggcttgaaattgggaattaatatataacattctatttgccgtgctttattgagtgtaggcagtgtttttattaaaatgtatttatgcaaattaaagaggccctatcagaattcattttaggcagtcatgactccatttatttatagcaaatcttcataaacatgttaatgtgatttgaaagttgcctgtcctcctctgttaacataattttaatgcaaccttcctaagttctagtcacagtaaatttgaatttattttgctgcctaacttccctgaaagtgaaatatggtagcttggagattcgtatgtcactgaatatgaattttttactgtatgtctgtgttactgtttgaaagtactcttggaagatctgggagcggccgggcacagtggctcacggctgtaatcccagcactttgagaggccaaggcaggcagatcacaaggtcaggagatcgagatcatcctggctaacacagtgaaaccccgtctctactaaaaatacaaaaaatcagctgggcgtggtggcgggtgcctgtagtcccagctactctggaggctgaggcaggggaatggcatgaacctgggcgggtggagcttgcagtgagccgagattgcgccactgcactccagcctaggagacagagcaagactctgcctcaaaaaaaaaaaaaaaaaaaatgtgggatcattgtctatataaaagcataaggagaatgagcctctaaatatggtgaaacagattttatgagatgttttataggaaggttgagtataggttttctcagtgtaggcagttggggaaagtaagtatatgcacttatacagactcataaataatttttaaaaatctatacagaccaaccaagaagaaaaaggccaacaggtacactgatgaagatgtttaacacatcctttactgttctcacgttagactttaatggcagttgcactttttttttttctgtttgggttttattttctttttgaaagttaattgtactgccctataagaaagaattctggtaaaatattatttctttgaaggtgctcgcatttggcttttcgttggtttcatgttggcctttggatctctgattgcatctatgtggattctttttggaggttatgttgctaaaggtaagagaaaacataggttacaatttacttcagtggaatactggaattttgcattaaagttggttattttagaataaaatttttttcctatagttgggccaactactagcgatgcatttatatccgggaccccccaccctccaccgacagtgtttggttttctttgtcttatatatttttagtattcctttcttcagtcatttttcttcttatccagagcctggaagggatgagacagctctaaacactgcttttctttggcttccaaaaatctcaaaagcagaacatatgttatctagctagttagcaagctttgtttcttttttagagacaagagtctcactatcacccaggctggagtgcaatggcatgatcatggcccactgcagcctcaacctcctgggctcaagccatcctcacacctcagcttcccaggtagctagggccacaagcacacacaaccacacccagctaatttttaaattttttatagagatggatcttgctatgttgctaaggctggccttgaactcctggcctcaagcctggcctaacaagttctgactttcagaatatctgtgcaaagctctaacatcccagaattgagatttattcagttaagcctccctggtaatatgatgtcacctcctttcagacagaaaagtaaactaacatttaatatacatctgctatataaggccactttaaggcaagctcaggaaaaggtatactgttagaccctgggagaaatttcaccttgagggaccctagaaaaacagaaaacccatttaatggtccaggtaaaattgctatgggtgtcatagtaaaaatacagtattaatgatttataaaaactggaccaggttatatatattctgctcatattttaacacttatttgaataaaatgtaacttgtagattaaaataatgtttcctaaatttttattaaaatcatttaatctcatagatgggagtaatagatatttccaaatatttgtatttttaattttattttaattattttttttattttttgagacagggtctgctctgtcacccaggctggaatgcagtggcacaatctcagcttactgcaacctccacctcccaggctcaagcaatcctcccactcagcctcctgagtagctgagatgacgggcgcatgccaccacgccctgctagttttgtattttttgtagagatggggcttcaccatgttgcccaggctggtctcaaactcctgggctcaagtgatctgcctgcctcagcttcccaaagtgctgggattacaggtgtgaaccactaggcctagccatgtgtaatttattattaaaatcatgttaccaaaattgtagaaaataaaaaagggtgggtgcagtgtaatcccagcacttcaggaggccaaggagggagtactgcatgaggccaggattttgagaccagcttggacaacatagggagacaccatctctacaaataataaatatttagccgactatggtgacgtgcatgtgtggtcccagctactcgggagactgacgtgagaggatcacctgagcccgggaggcagagattgcagtgagctgtgattgtgccactgtactccagcctgggtgacaaagtgagacgctgtctcaaaaaaagagaaaagaaaagaaaaaaagaaaaagaagtaataataatttcaccactcttcaatattttggtttatttccttttttcttatgtttttagttattatcataatttttatcccccgtttgcatttcacatgatattataagttagttgttcttttgctgctataaaatctgttttttatatgtatatttgttgcccaggctggagtgcagtgatgcgatctcagctcactgcaacctccgtctcccaggttcaagcaattcttctgcctcagcctcccaagtagctgggattacaggcgcctgccgccatgtccagctaatttttgtatttttagtagagacagggttctgccatgttggccaggctggtcttgaactcctgacttcaggtgatccacctgccttggcttcccaaagtgctgggattacaggagtgagccaccacgcccagccatctatatattttaaaatgtatatattttgagtttgagaccagtctggctaacatggcaaaaccccatctctactagaaatacaaaaattagccaggcatggtggcacacacctccaatcccagctacttgggaggctgaggcacgagatctcttgaacctgggaggtggaggttgcagtgagctgcgatcacgccactgcactgcagcctgggtaacagtgggagaccctctcaaaaatcaaaacaaaaaaaaaggaaaaaaattaccttgttatcatgggaattgcataatgcttattcattatagaaaactaagaatataaaagaactcaaaagaagaaaatgaaattactgataattctttcccagatacaactattaatacagggtccctttttataggaatgtctttatctcataattttaggctattttcctgaaagcttctggagcaaggttatgttttgagaattattagcagcagatctgtaattttataaagttggctttataacatttttagaagccattctagtggtaatggttatttaacgtgaaatagtggtgaagacctatgcaaaccatctgttatgttaatcagattaaccaaagctgttctgaaatgagaaaaatttgacagttcacctatttattgtgcctctgtcaatgagcagtcattaacaattccagtagtagaaatttatgagaatttcaacttcacttctagatacaatcagaaaaaaatgttgctccagcagtccttccaatcttagttaatggctggctactctatctttccaggtgtttaggccaaaagccctagatggtgaaggcctgtcaaagatgacatttgtcttcctcccacgccccatatccaatctatctgcagatcatgttgactgtgctgtaaaatatatcctgagtctaaccaccatttaccatctctccattgctaccaccctggttcaatccatcataatctctcacctgatttcctggaagagcctcctaactggtttctgtttcctctcttgcctcctttaatctaccctcagcacagcagccagagggatcctcttaaaatatgtcatctcagatcacttttctgctcacaacccagtggcttctcgtctcactcagagtaaaaatcagagtcctcactgtgactgccaggtctctgctgcccagttgccctctttctttaccctgtccctgctcttccctcttgtgcctacgtggctgttcctgtaattcactggcgtgctccctcagggcgtgtgcatggcttcttccccacttcctgcgtgtccttactccagtgtcaccttctcatggggtcttcctggccatctgtgtccaatgtcacactacacttctccacctttcctgcattattttatcttctttttattcagtatattctctagttccatgagggcaaaaaaaattttacctgttttgtttattgcagtatcctcagtattaaatagggccagcatacagtatgcccccagtaaatatttgttaagtgaactaagggagctatcatttactaaagccatgctagactctgttacacattatgtcttttaatactcaagccaaccctaattctaagaaaaatcaattcttctaggcaggaaaactggtatttgccaatatatctgaaactaaatgttttgagatcataaccctctaaacactgcaattatttttacagaaaaagacatagtataccctggaattgctgtatttttccagaatgccttcatcttttttgggtaagtttgttttgcattctttatgtttgtttgtttttttttaaaatagcttcttttatatcattttctatatttagttgcctaattactcatccaatgcccctcccccatgatattttcataaaacatggagagtaaggttgagaaggatattttaaatagatgagttggtttgctgccaaccttaggagcatatattaatttttaagattgctaccacgcccccttttaatgagtgagtaactatgattcatgaaaatttagttacataacactggtgatgttcattttaaacttagatctctaacagttgctttaagtgaaagcctgcctaaaaccatttatccttaaattttggtttctgatatattttataattcttctgtccttgatatcgtagagtttgtgagtgagatttgaggtgtggaggaaaagcccaaacatttttttatccttccctttcaattacaaatgaaaagatgacgaaaacctctaaaaacctcaaggcttttatcagtaatcttctctgatgttcatctttcctagaaatttagggcctgcccttttctctacccatgctgttcctccaaccagcccccacaacctacccccatcactggccgaaaaaccccacaaacaaaacagctcaacagctcttaatcctctgcatcaggagtgtgtgtgtgtgtgtgtgtgtgtgtgtgtgtgttgtgtgtgtgtgtgttgttttgagacagagtctcagtctctcacccagtgtgtgtgtgtgtgtgtgtgtgtgtgtgtgtgtgtgtgttgttttgagacagagtctcagtctctcacccaggctggagtgcagtggcacgatctcagctcactgcaacctccgcctcccgggttcaagtgattctcctgcctcagcctcccgtgtagctgggactacaggcacacgccaccacgcctggctattttttttgtatttttagtagagacggggtttcaccatgttgtccaggatggtcttgattcctgatctcgtgatctgcctgcctcagcctcccaaagtgctgggattacaggcatgagccaccacacccagcctgcatcaggagttcttttttttttttttttagagggagtctcactctgtcgcccaggctggaatgcagtggcgtgatcttggctccctgcaaactctgcctcccaggttcaagtgattctcctgcctcagcctcccgagtagctgggattacaggcacctgccagcacgcccagctaattttttgtatttttagtagagacagggtttcaccatgttagccaggatggtcttgatctcctgacctcgtgacccacccgcctcggcctcccaaagtgctgggattacgggcatgagccaccgtgcctggccaagagttcttaacctttattctttcagtagtcttctgaaggtgaggtatcaccagacatttccatatgcaggaaattggtgttttgtgtatttctggaaagagatagtctgtggctttcatcagattttcaaagaagcccctaatccaaaaaaggctaggaatctgatgtatattacaggacctttccttccccttcccttcccacccacctccaaaaaagaaacaaaaatcccatgtttactgaagccctcttgaaatagtaatagttgcccttcagaaagagccaccagttggtattcacacctattctattccatcaccaggcatttttgccattttgtaaaatcagtttggaaataaaaatgtaaacttagatgtgacaagatgcacagcctctttgggttataccttgtatcctgtaagcagattgaaccccaggtaattttgacagtgtaggagggactggtccctggctcttgcccaggaaactcttccgattagagttcatatcttgtgacgagtattctgaagttacagcatctcttttaagctatttggacagtagaggcctctaataaccaacttcagtttttctttgttacagcagtagatcctatattaactagaagagcagagatctgggattacaggcgcatgccaccatgcctgactaatttttgtattttttgtagagacggggttttgccatgttgcccaggctggtctcaaactcctgggctcaagcgatctgcccgccttggcctcccaaagtgctgggattacaggcatgagccactgtgtctggctcatagcccccatttcatttggtgcctgggactgcgcaccagctgccccatagagcatgcaggcaggcatccccatagagcatgcaggcaggcagccccatagagcatgcaggcaggcgtctgcactctggctcatctaaggcacctgtgggtaatttgccacccttggcaattggctttccaaagcctggctgtgtccattccctgcctcctcatggccaaccataatctggccatggtggattcttccttgttctgttaacacctcaggtatcattttatgcatacagttgcgctcttgcctcttttaaattgaagccttaaggacaactgtagacgttccctcaccgaaaccctagaccaggggtgtccaattttttggcttccctgggccatattggaagaattgtcttgaggcactcatagaatacaccaacaatagctgatgagctttaaaaaaaaaaaaaatcacaaaataaatctcataatgttttaagaaagtttacgaatttgtgttgggcctcattcaaagctgtcctgggccacatgtggcccatgctttgtgggttggacaagcttgccctggactgtaagctctgtgagggcaaattcctgtcatactagtctcctgggcttttccagaagccccatgcttttttatgcctctttcccctttgatgtactgtttcctgtccccgaaacacctgccttcatcatcccgctaggtcttgttcctaccaatctcccattcaaacccctgtttttccacaaaagcccatctcacatattaccacctctgtaaatccttttctaacttattcagggtgaccgaattctgtgtttctgtgcccccttaatacttgttatataagtctccttccccaaccacccccacacttaccacatcacgttagcaagaatgagagcaatttgagggcagtggctttgtatcttatttatagccctggcaccaaaacagtttgttgaatgaatttgataaaatcagacgtatagggctgggcacagtggctcacgcctgtaatcccagcactttgggaggccgaggtaggcggatcacgaggtcaggagatcgagaccatcttggctaccatggtgaaaccccatctctactaaaaatacaaaaaattagccgggtatggtggcgggtgcctgtagtcccagctactcaggaggcagaggcaggagaatggcatgaacccgggaggcagagcttgcagtgagccgagatcacgccactgcactccagcctgggcgacagagcaagactctgtctcaaaaaaaaaaaaaaaaatcagacatataatggttacatagtaaacactggtaactttttaaaagtcacatgtgtattcagtacttgaaagttaaggttgttgggaatatggtggttaatagcacagttgaacataatggaagaattcactaccttagaatgatcagtttctgttttgatacatttcgtaccaaaatttcttctacaactcatcaattattcttcgttgtttgtttcacaccattctcgaaatctcacatactcttttctcaaattcagggagtcatgtgatatttcttgttttattcacagagggctggtttttaagtttggccgcactgaagacttatggcagtgaacacatctgatttcccacagcacaacagccctgcatgggtttgtttgtttttttactgctcactcccaaccttttgtaatgccattttctaaacttatttctgagtgtagtctcagcttaaagttgtgtaatactaaaatcacgagaacacctaaacaacaaccaaaaatctattgtggtatgcacttgattaacttataaaatgttagaggaaactttcacatgaataatttttgtcaaattttatcatggtataatttgtaaaaataaaaagaaattacaaaagaaattatggatttgtcaatgtaagtatttgtcatatctgaggtccaaaaccacaatgaaagtgctctgaagatttaatgtgtttattcaaatgtggtctcttctgtgtcaaatgttaaatgaaatataaacattttttagtttttaaaatattccgtggtcaaaattcttcctcactataattggtatttacttttaccaaaaattctgtgaacatgtaatgtaactggcttttgagggtctcccaaggggtgagtggacgtgttggaagagagaagcaccatggtccagccaccaggctccctgtgtcccttccatgggaaggtcttccgctgtgcctctcattccaagggcaggaagatgtgactcagccatgacacgtggttctggtgggatgcacagtcactccacatccaccattgaaggaaaggaaaaaagggcagagacttgacactccagtcttagacaggggacaatttctttgtagttgttctgataataaactgggttccatgttgcatttcatctgtgtactgaaccactagcctaatagaccagcacggtcaactagaatgacaaacattagctactgggaactcttgttgtctcttcctcttcagaactcttgtccccccaggctccccacctctgcaagatgggatacactcttcaggaccacagtttgaaatgtctttcataaaatgtgctacaattagccttcggaatatttgctgggtgatttaaatgtgtgggtctcatttccatgctagccatggtcatctgacagtctctacactgtgaatattgcctggtgatcaagactctcctcaaagaaatgacttgctgtcatcccacatgaactcctgatgttttttctacaaaagtccataaaatgtgaaaactggagaagatcttagaggttgaagcccaccttctcttttcacataggagggaacagaccatggaaatttaaacgacttcctcacggtcacagaactagttttttaatcctcaggcagtgcatccccccaccctacaactgagcacaacctctttccccacagtgcaattcagaatatgctcagggaatgccagccaccttgtaaaactgctgggagaaaagcatgattcccacaaggactaagtatcagtgatttgtaattttcctgttttgtattatctgctttgctgatgtagacaagagttaactgagtagcatgctttattaagcatgagaaagaatcttaagaattgtcaataaaattaacccaaaactttaataatgtgtctgtaaccaagaaaatattgatagcatcatcctaatgaaactaaacatttattttaaacttattaaattgactcttaaactaa

SEQ ID NO: 64 - DNA, 6540 bp, Homo sapiens
gggctgggggagggtatataagccgagtaggcgacggtgaggtcgacgccggccaagacagcacagacagattgacctattggggtgtttcgcgagtgtgagagggaagcgccgcggcctgtatttctagacctgcccttcgcctggttcgtggcgccttgtgaccccgggcccctgccgcctgcaagtcggaaattgcgctgtgctcctgtgctacggcctgtggctggactgcctgctgctgcccaactggctggcaagatgaagctctccctggtggccgcgatgctgctgctgctcagcgcggcgcgggccgaggaggaggacaagaaggaggacgtgggcacggtggtcggcatcgacctggggaccacctactcctggtaagtggggttgcggatgcagggggacggggcgtggccgcctggcctggcgtgagaagtgcggtgctgatgtccctctgtcgggtttttctgccagcgtcggcgtgttcaagaacggccgcgtggagatcatcgccaacgatcagggcaaccgcatcacgccgtcctatgtcgccttcactcctgaaggggaacgtctgattggcgatgccgccaagaaccagctcacctccaaccccgagaacacggtctttgacgccaagcggctcatcggccgcacgtggaatgacccgtctgtgcagcaggacatcaagttcttgccgttcaaggttcgaccgggtttttctcatccagttagagaacgggtgggtggtgggagtatttagagttataagtctctggaaaagtgttgagacaacagttgaaggttatagacatgatgtatgtaataactttaatactattagtatgttacaaaacttaagacagttgctgtcgtactgtctacgatagtttaggaataaaagaccgattaaaactgaactttgtaagacacctatactccctgaagtatttctagtcaatttgcagccccaagggaccaaaataaaccaaattgtggggatggtagtgggtcttttaaactttgagatgtcattgtatctgtgtctgaaaacaataattctttaaaataggtggttgaaaagaaaactaaaccatacattcaagttgatattggaggtgggcaaacaaagacatttgctcctgaagaaatttctgccatggttctcactaaaatgaaagaaaccgctgaggcttatttgggaaagaaggtaaatatttctagaacaatgttaagtattttttgatcattagtattctcggttggctgttatgtatagaagccttcgtgaagggtttcaaaaattttaatcagaatggtattcatgcttgtcaggtttaattattgagtcccttactataagccaaacaaaatagacttttcatgtattatttaatgcttacaattccagggacataaaattttatatgttgtattcatcaataagttggcttaaaaactaaagtgatggtttgactgtaattttttttttttgagatggagtcttgctctgttgcccaggctggactgcagtggcacgatctcagctcactgcaacctctgcctcccgggttcaagcagctctcctgcctcagcctcccaagtaactggaactacaggcacaccaccacacctggctaatttttttttttttttttaattttcagtagagacagggtttctccacattgcccaggctggtcttgaaatcctgccctcaggtgatcctcctgcctcagcctcccaaagtgctgggattataggcagaagccaccgcctggccagactgtaatttaaataagggttaaactatgtgacaatacacttaattatcttttatccttttaggttacccatgcagttgttactgtaccagcctattttaatgatgcccaacgccaagcaaccaaagacgctggaactattgctggcctaaatgttatgaggatcatcaacgagccgtaagtatgaaattcagggatacggcatatttgccaaatagtggaaatgtgaagtactgacaaaacttttccctttttcaatctaatagtacggcagctgctattgcttatggcctggataagagggagggggagaagaacatcctggtgtttgacctgggtggcggaaccttcgatgtgtctcttctcaccattgacaatggtgtcttcgaagttgtggccactaatggagatactcatctgggtggagaagactttgaccagcgtgtcatggaacacttcatcaaactgtacaaaaagaagacgggcaaagatgtcaggaaagacaatagagctgtgcagaaactccggcgcgaggtagaaaaggccaaacgggccctgtcttctcagcatcaagcaagaattgaaattgagtccttctatgaaggagaagacttttctgagaccctgactcgggccaaatttgaagagctcaacatggtatgttccttgttttctgctttgctaatgagatctccttagactctgaattcaggacattgcatctagatacttagataacagacatcacagtaaccatgtcttttttctaggatctgttccggtctactatgaagcccgtccagaaagtgttggaagattctgatttgaagaagtctgatattgatgaaattgttcttgttggtggctcgactcgaattccaaagattcagcaactggttaaagagttcttcaatggcaaggaaccatcccgtggcataaacccagatgaagctgtagcgtatggtgctgctgtccaggctggtgtgctctctggtgatcaagatacaggtaggtcatcatcgcagcatctttcttagtgattcagtagcttgatggaagactcattagctattgctttagaaaataccagaatatgagcaacaaggtcacacagctagtaaagggtataagtgaagacaagactggggtagtctcaagatcattagcaactgtttaattcactgcctttaaaatgtgtgtgttagaacctaaccaaatgttagagagataaactttacatagctcatagggagaacttgaattaaaagttaaataacttatccttacaggtgacctggtactgcttgatgtatgtccccttacacttggtattgaaactgtgggaggtgtcatgaccaaactgattccaaggaacacagtggtgcctaccaagaagtctcagatcttttctacagcttctgataatcaaccaactgttacaatcaaggtctatgaaggtaattacttaagtttgttaatatcatggctttttttttgagatgaagtcttgctctgttgcccaggctggactgcagtggcacgatctcggctcactgcaaattctgtctcccgggttcaagtgattctcctgcctcagcctccagagtagctgggattacaggcgtggaccaccacacctggctaatttctgtatttttagtagagatggggtttcaccatgtttcccaggctggtctccaactcctgacctcaggtcatctgcctgcctccacctcccaaagtgctgggattataggcgtgagccaccacgccagatctatctatcatggcatattttaaaagaacatgacttaatatgtcctattgaaatggctagggaactaagtaactgctgttttcagatggaggtcttaatttgaataatgttgatattagatatttagcattcttttttttttttttttaatggagtcttgctctgtcgcctaggctggggtgcagtggcatgacttgcaacctctgcctcccgaatagctgggattacaggtgcccaccatcacgcccggctaagttttgtatttttagtagaggcggagtttcgccatgttggccaggctggtcttgaacccctaacctcaggtgatccaccgacctcggcctcccaaagtactgggattattacaggtgtgagccactgtacccagccaatgattagcattctcactaataatagcatctgagctggctcctagagtacaagaaaaaggagttcacagtactttaaaatagataaaattcagttgagttagtaacctaactcattgttagtactagttgctgctccttgtagaccaatatgaaattacttttagctcgataaaaccaaaagtgtcactttatgcttcagactgaaatgcggggatctagatgtgctaatgcttgtcagtaacaactaacaagtttttctgtatgtaacttctaggtgaaagacccctgacaaaagacaatcatcttctgggtacatttgatctgactggaattcctcctgctcctcgtggggtcccacagattgaagtcacctttgagatagatgtgaatggtattcttcgagtgacagctgaagacaagggtacagggaacaaaaataagatcacaatcaccaatgaccagaatcgcctgacacctgaagaaatcgaaaggatggttaatgatgctgagaagtttgctgaggaagacaaaaagctcaaggagcgcattgatactagaaatgagttggaaagctatgcctattctctaaagaatcagattggagataaagaaaagctgggaggtaaactttcctctgaagataaggagaccatggaaaaagctgtagaagaaaagattgaatggctggaaagccaccaagatgctgacattgaagacttcaaagctaagaagaaggaactggaagaaattgttcaaccaattatcagcaaactctatggaagtgcaggccctcccccaactggtgaagaggatacagcagaaaaagatgagttgtagacactgatctgctagtgctgtaatattgtaaatactggactcaggaacttttgttaggaaaaaattgaaagaacttaagtctcgaatgtaattggaatcttcacctcagagtggagttgaaactgctatagcctaagcggctgtttactgcttttcattagcagttgctcacatgtctttgggtgggggggagaagaagaattggccatcttaaaaagcgggtaaaaaacctgggttagggtgtgtgttcaccttcaaaatgttctatttaacaactgggtcatgtgcatctggtgtaggaagttttttctaccataagtgacaccaataaatgtttgttatttacactggtctaatgtttgtgagaagcttctaattagatcaattacttattttaggaaatttaagactagatactcgtgtgtggggtgaggggagggagtatttggtatgttgggataaggaaacacttctatttaatgcttccagggatttttttttttttttttaaccctcctgggcccaagtgatccttccacctcagtctcccagctaattgagaccacaggcttgttaccaccatgctcggcttttgcattaatctaagaaaaggggagagaagttaatccacatctttactcaggcaaggggcatttcacagtgcccaagagtggggttttcttgaacatacttggtttcctatttccccttatctttctaaaactgcctttctggtggctttttttaaaattattactaatgatgcttttatagctgcttggattctctgagaaatgatggggagtgagtgatcactggtattaactttatacacttggatttcatttgtaactttaggatgtaaaggtatattgtgaaccctagctgtgtcagaatctccatccctgaaatttctcattagtggtactggggtgggatcttggatggtgacattgaaactacactaaatcccctcactatgaatgggttgttaaaggcaatggtttgtgtcaaaactggtttaggattacttagattgtgttcctgaagaaaagagtccaggtaaatggtatgatcaataaaggacaggctggtgctaacataaaatccaatattgtaatcctagcactttgggaggccaaggcgggtggatcacaaggtcaagagatagagaccatctttgccaacatggtgaaactccatctctactgaaaatacaaaaattagctgggcgtggtagtgcaagctgaaggctgaggcaggagaatcactcgaacccgggaggcagaggttgcagtgagccgagatcacaccactgtactccagcccggcactccagcctggcgacaagagtgagactccacctcaaaaaaaaaaaaaagaatccaatactgcccaaggataggtattttatagatgggcaactggctgaaaggttaattctctagggctagtagaactggatcccaacaccaaactcttaattagacctaggcctcagctgcactgcccgaaaagcatttgggcagaccctgagcagaatactggtctcaggccaagcccaatacagccattaaagatgacctacagtgctgtgtaccctggggcaatagggttaaatggtagttagcaactagggctagtcttcccttacctcaaaggctctcactaccgtggaccacctagtctgtaactctttctgaggagctgttactgaatattaaaaagatagacttcaactatg

SEQ ID NO: 65 - DNA, 27864 bp, Homo sapiens
atgctgacaatcttcttccttcccctggccacctctctgcccacttgcttcctcagtaccttggtccagctcttcctgcaacggcccaggagctcagagctccacatctgaccttctagtcatgaccaggaccagggcagcactcctcctgttcacaggtgagcctggaccccaatgaagtagggctggggacccaggcccaagggagccagggccctgaactgggggctcaggctggggggttaggatctgggtaggaagagagactcagtcaagcctgagggggaggcaggcacatagggtctgagatttggagtttgtggagggagaggatattgatgaaccaattttgggagagttccagagatgctggaagagaggccagttgtctctgtactgcagagatttttaaaataggcagaatgcgccaacttgtgctctgtggacaggatgctttggtccgcaagttttcctggactcactctcatagcgcccgaggtgcacgttggggaaagatcctttttagagcctgggtactgctctgcagaaatggagaactgcaactcgatagtggatggtgggcaaggggcatccctggaccctgggaaggagagaaggggatgagttgggtgtccagaagacccaggcaccccgggcatcaggctcggaggggagattgggacgctggggccgggggtggagggcagccaggcagaaggaagacccttctccaaagctctcttcccacctctttcccagccttagcaacttctctaggtttcaacttggacacagaggagctgacagccttccgtgtggacagcgctgggtttggagacagcgtggtccagtatgccaactcctggtgaggcccaggtggtgctggcctttggctccatccatcctctccctgctcagggccccatgcccccggccctgccctgttatttgcaaactctcctctctgtctggtgtagcgactgccctggctaatgaagatttgccttgaaggcaggcacggtctcacagctaacatttacagagcagtaagtgcagtgccaggctcatcacaggtggatgctgatttagtccacacgacagcctgtgagtaggaatcagtcgtgcaacaaacacttatttgttttttctttctttttttctatacatttaaaaatatatagagacagggtctcactatgttgcctgggttggtctcaaactcctgggctcaagcaatcctcccgcctcagcctcccaaagtgctgggattccaggtgtgagccaccacacccagactcaacaaatatttcttgtctccatacgccagagaatccaacagacagaaatcccttccacatggactttaaattattaaaatccatcttgcagatgaggaagctgaggctcagggagggaacgcaaacttgccggagtggcagctgtgctgcagcgtccacactcttacctaaagtgttctttgtctcctcgcagggtggtggttggagccccccaaaagataacagctgccaaccaaacgggtggcctctaccagtgtggctacagcactggtgcctgtgagcccatcggcctgcagggtgagtcaccgcccctcccgggacccagggccgggctcccaggcttccctgctccaggggcccgtggactcaccggagtgtcactttcagcttccactgtgtctgagaccctcaccctcagatatgcttcctggccccttaaggcctccccgcccatcgcactcccgcagctctgtcaagacccgacagcttccttcaccgtcagacctccttgtctcccaggtggaggtgacccctgcccagctcttccacagccttctctgtacccccgagagtgaccatgcacatatctgtccccacagtgcccccggaggccgtgaacatgtccctgggcctgtccctggcgtctaccaccagcccttcccagctgctggtgagtggccctgggtcacaggaggcttctgagggagggagggaggagccggggccgcggggggctgggagtctcctgtagggtggaggttccggaatgtgagggtgggaggaagcaggggcagccccccagcagcccgctgtgtccccaggcctgcggccccaccgtgcaccacgagtgcgggaggaacatgtacctcaccggactctgcttcctcctgggccccacccagctcacccagaggctcccggtgtccaggcagggtgagtgtcgggaccaccaaggctttgaggagctcacgcacatccaattgggggtgcggtgggctagagacagtcttgccagagtggatcagaaagaagggatctggaaaaagagttaccacgtgttgcagtggttcctgacgctgctgcccgcacatcctgccgatcgcccgcacgctgccggacctttcctgtgaccttaacctctccaagcctcagtttcttcatctgttggatggggataataacacacccagcactgaaagcaacacaggatgattcatggccaggggttagcacagcagctagcaccaggcgacagccccatgaaggccagctgttgttatttttagaggagaggatctattttcatccaatgggtcctgggatatgaccaattggtttgtgccgtagtttaggaaaggtcagtgaaagtgcagtgtgagcaacgtgtgtgtgtgtacatgtgtgtatatgtatgcatgtgtatacatgtgcacatgcacacatgtacatgcatgtgtgtgcatgtatgtgtgtgtgcgtgtgcacatgcaggttgagacgcagggcctgacttccctggtgctgatggggaagaaagataaggaagcaaaacagtgggctttggcaggctgaggcctccccctggtttcacatttgctctcaagcctttggtgagactgacatctggctgcaaatagggtgtgccttccagcacctccgtgggtccagactccatccacaggggcctgggcacccatcagaatgcccaggacacctgtctctccggtggaggcctctggggcagaggggatgcttgagaggtcacatggaagggggtttcctctccaggtgctggaagatcgtctcttctcaggacagatgctaacttcacacaggaggggagtgggggcctgtatttaagctgagaacagaacaggcccagtgtgtggctgttgcctgggatgatttgtttaaaatattaacaatcaaggcaagagggttgtttgaggcctggagtttgagaccagcctgggcaacatagtgagacctcatctctacaaaaaataaatataaaatacaaagtagcttggcatgctgttacatacctctagtcctaactactggggaggctgaggcaggagaatcgcttgagcccaggagttggaggctgtagggagctttgatcacaccactgcactccagcctgggtgacagagtgagactccatctcaattaaaaaaagaaatttaacaaaactaccattcagcactgagcagtgaggacaaacactggctagggactggtgccagtttgtgtcattgctggatggggtgacattgagggaggaaggaggggtgggtccagggaggggcacagatatccagggtggtggaggggtaggccctctgcttcctaccgtctgaattggagaaatcttcctggtttttttttttttctttttttttagagatagtcttactctgtcactgaggctggagtgcagtggtacaatcacagctcactgcagcctccaactcctgggctcaagtgatcctcccacctcagcctccagagtagctgggaccacagagaagagctaccatgcccagctgatttttaacaatttttagtagatgtgaggtctaactatgctgtccaggctgatcttgaaatcctgggctcaagcaattctcctgcctaggcctcccaaagtgcttggattataggagtaagtcactgcacccagtctgaccttcactcttttgttgatggggctgagcagcttcatcacagcctttttcattttttatttttttgagatggagcctcactctgttgccaggttggagtgctgtggtgcgatctcagctcactgcaacctccacctcccaggttcaagcaattctgcctctgcctcccaagtagttgggaccacaggcgcgtgccaccacacccacctaatttttgtatttttagtagagacggggtttcaccatgtgggccaggatggtctcgatctcctgacctcgtgatccgcccccctcggcctcccaaagtactgggattacaggcgtgagccaccacgcctggctcatcacagcctctttaggcaactttaagagaatgaagggccttgttccaggcaaggggttagggaagctctgcccctgatgaggagaggacccagggtgtggagcctgactcccatcgccagactaggggcttaggggaggaagggttttgggagagtgagctcttgtggccaggaggccacggtcctggactccaggagtgtcacttggaggaccggtgccacctccttccccagagtgcccaagacaggagcaggacattgtgttcctgatcgatggctcaggcagcatctcctcccgcaactttgccacgatgatgaacttcgtgagagctgtgataagccagttccagagacccagcacccaggtgtgcctttgggggagggaggctgctgggggtgggtgcttcgatcctggtgaaatggcctcagccccagccctgtgtgcttctcccagttttccctgatgcagttctccaacaaattccaaacacacttcactttcgaggaattcaggcgcagctcaaaccccctcagcctgttggcttctgttcaccagctgcaagggtttacatacacggccaccgccatccaaaatgtcgtgtgagtcctgatttcttccaggcacagtcccaaagcacccaggtcttcccttgggcctcatctgtctccacgagaaggggacaggcagggaccaaaatccagcccgtgatacccttgccaagctggggcctctgggtgggactggggcctcccaaaggaaaaggcatcttctaattttcacaagggcaccaggggctagtgtggtttggttcacaggcctctaagacctctcctttcctgataggcaccgattgttccatgcctcatatggggcccgtagggatgccgccaaaattctcattgtcatcactgatgggaagaaagaaggcgacagcctggattataaggatgtcatccccatggctgatgcagcaggcatcatccgctatgcaattggggtagggcgtgggatggcttcccacttctcccacggcttcctctcagggcaactcccctttctgtgtatgttcttttctctttgagacagggtcttgctctatcacccaggaagtggtgcaatcctagctcactgcagccttgaactcctgggctccagtgatcctcccaccccagcctccccagtagctgggaccacaggtgtgtgccatcaagcctggctattttctttttggttgagatggggtcttgctatgttgcccaggctggtctcaaattcctggccttaagcaattctgccaccttggtctcccaaagcacagggattacaggcgtgaaccaccgccaacaacatccctttcaaggatagaaacaccagctctctcggctcttactgccttaaggatgaaaactctgccccagactggagaccatgatcctttctcctaaactccctgatgctgtccgggcttcgtgtttctcctgtgtccaccgggtgtgatcatgttgatcttgtggggttattggaagatgttgcacccagtgcacacaggcacatttgatttattatttttactgagttgatcttttctggggacaggttggattagcttttcaaaacagaaattcttggaaagaattaaatgacattgcatcgaagccctcccaggaacacatatttaaagtggaggactttgatgctctgaaagatattcaaaaccaactgaaggagaagatctttgccattgagggtgagtctgaagggagctcttcgcttggggaatcctcagccgttaacacctttccacttagaacccgaggctccgtgaaacaggtagacagcgtctcggttctcctgctttcccgggaccccgatagccatgtctgtcagcttgtccccactgacgtcccccagcactgtcagagctgccccaaagtggccccagggatggccctgctccccacagagagtgatctcacaccaccaccggctccactgcagaacaaaaagcagtgccaggcccaacccaggagacccttccacccacaccgggccctacccagcccacatcccaccagccactcactcccctgggcaaggggcacacggacacctggccccctcgggtctgcttgtagacctgtggggggccctgatgaggaccagatcggtgctgccatcgctgtccacatccatggagcagaggggggccccgaagtcggagctgatctggagggcagagcctggtccctgtcacaggcaccagctctccctgtagcctccagtcttagcttctcctaaagctgaagtgttcttggacctggcaaagcccgtctccctccctggcactcaagcgtcatgccttcccccaggtacggagaccacaagcagtagctccttcgaattggagatggcacaggagggcttcagcgctgtgttcacacctgtgagtggggccccttaggccgatgatgtgccgtgaggggagggggagcagggaaggccagggtgggtgtcaggtgggtaagaggcgcaggcggaaggcatatctctggtacatgctgtcttcctgctccggcctctgctcagccctggaatccttttctcccaggatggccccgttctgggggctgtggggagcttcacctggtctggaggtgccttcctgtaccccccaaatatgagccctaccttcatcaacatgtctcaggagaatgtggacatgagggactcttacctgggtgagaaacagccaggggttggggacaggtgggagatgcactgcccagggtggggtccagggttctggggaaggggtatgggggctgtgctgcccagggtggggtccaggcttctggggagggaggatgggcactgtgctgcccggggtgggttccaggttctggggaggggggatgggggctgtgctgcctggggtgggggtccagggttctggggagaggggatgggcgctgtgctgcctggggtgggttccagggttctggggagagaggatgggggctgcattgcccagggtggggtccagggttctggggaggggagatggtgctgtgctgcccggggtgggggtccagggttctggggagggggaatgggggcctttgtgctgaggcctgggcccctcaggttactccaccgagctggccctctggaaaggggtgcagagcctggtcctgggggccccccgctaccagcacaccgggaaggctgtcatcttcacccaggtgtccaggcaatggaggatgaaggccgaagtcacggggactcaggttgggcgtgacaggagccagaggggaggatgagggtaggggaggtggctggggcagaggagaggatggaggggctttgagggccttgggggaggtcctggtacctggggagaggtgggacctggcccacagggctgcctctggcagggacaggcagcatgacccaggctctgcccttcagatcggctcctacttcggggcctccctctgctccgtggacgtagacagcgacggcagcaccgacctggtcctcatcggggccccccattactacgagcagacccgagggggccaggtgtctgtgtgtcccttgcccaggggggtgagtggctgatgggcctggggtgggtggggtctggtgtgggtggaggggttgcccgggttgggcctggcactgctttttttctgcagtggagaaggtggtggtgtgatgctgttctctacggggagcagggccacccctggggtcgctttggggcggctctgacagtgctgggggatgtgaatggggacaagctgacagacgtggtcatcggggccccaggagaggaggagaaccggggtgctgtctacctgtttcacggagtcttgggacccagcatcagcccctcccacagccaggtgaggccgtgtcccatttctgtcactagagcagcctgcttcttgcctctcccactctgtcatactggaaaactgtccctttttaccttttcctacctcccttgcccagctctgagcaccttgtagcagtggcgtggtctcagctcactgcaacctccgcctcccaggttcaagcgattctctgcctcagcctccagagtagctgggattacaggcatgcaccaccatgtccggttattttttgtattttagtagagacaggctttcgccatgttggctaggctggtcttgaactcctgacctcaggtgatctgcctgtctcggcctcccaaagtgctgggattataggcgtgagccaccatgcccaggcccctgccagttttacaaggtacacaggtcaggcacagaaaacccattttacagatggaatctgggacactaggaagacaagggccttggtttgttggaggttcagagtgggtccgagatggtgaagggcactccggcctcctgacctctaacccggtgtgcagtctcccggctccctgctgctcaccacttaggtccagtcatttcaaccttcccttccactcgcccctctcctccctggatgctacatgattttattcccttcctgccatcaaggtcccaccaaatgcccatccctgcagccgccctccaccccaagggagcagggttccctgagaacgaagggctgcttttcttggcaaaagtcaagaaagctctgttaaaaaataggcaaaggggctgctccaggtggctcacatctgtaattccgacactttgggaggctgaggcaggaggatcacttgaggccaggagtttcaggccagtctgggcaacatagggagaccccatctctagaaaaaattttaaaaattaggcaggcattgtggtgctgtagtaactgtagtcccaattactcgggaggctgaggtgggaggtcacctgagcccaggaggttgaggctgcagtgagctatgattgcgtcacttcacttcagcccaggtgaaagagcacaatcccgtgtcaaaaaaaaaaaaaaaaaaaaaaaaagggcaaaggatttggatagggtagacgtttctccaaagaagaggtacaaagggccaatgggtgcataaaatgattctcaatgtcattagtcatcagcaaatcaaaactataatgagatgccacttctcacctactagaatggctagaaacaaaggcggataatgacaggtgttggtgaggatgtggagaaccgggcatcctcccccatgctggggatgatgtaaatccacgcagctgctttggaaatcagcatggcaggtcctcaaaacattaaacataggctgggcacagtggctcatgcctgtaaccccagcactttgggaggccgaggcaggtggataacctgaggagtttgagactagcctggccaacacagtgaaaccccatctctactaaaaatacaaaaaaaaaaaaaaaattagctgggcatggtggtgggtgcctgtaatcccagctacttgggaggctgaggcaggagaatctattgaacctgggaggtgggggttgtggtgagccgagatcgcggcactgcactccagcctaggcaacaagagcaaaactccgtctcgaacaaacaaacaaacaaaaagttaaacatagagttgccatgtgatctggcaattccacctataaaacatgctaagtgagggaagccaaacacagaaggccacatgtattcaggccaaatgtccagaacagacagatctgtagagacagaaagtagatgagcagtttcacagggctgggtgtgggggaaagtcaggggcatgagggtgactgctaatgggtgtggagtctctttttggggtagtggaaatgttctaaaattgattgtggtagtggtttcacaactctctaaacataccaaaaggcactaagtcatatactttaaaggggtgagttgtgtgctatgtggtctatagctcaaaaaagctgttaccaaaaagaaaaaagtgccaaggaaggtccctgcagttctgtcacacaccagctgtgtgatctttgacaggtaactcaccctctctgtgctcagttttctcactggtaaaatggtgatactaatagaaccaaccttattgagctgctgctgtgaggattaaatgagttagtatgcatgaagtgcctggcacacaataggtatcatgttgttataatctgttttaattatcattaagatagtttaacaactggccaggcgcggtggctcccgcctgtaatcccagcactttgggaggctgaggcaggcagatcacttgaggtcaggagttccagactaggctggccaacatggggaaaccccgtctctacccaaaatacaaaaattagttgtgcgtaatggcgcatgcctataatcccagctacttgggaggctgaggcaggaaaatggcttgaacccaggaatcggaggttgcagtgagctgagattgcgccactgcactccagcctgggtgatagagtgagactccatctctaaacaaacaaacaaacaaaaaacacatagtttaacacctgaaggggaatctaaagaagagggtgaaagactgttgagaataacaagggcccacgtgttgtcatgaaactgcaaacagttcgtaccaattcccacaacccatcacatgcaggcataccttgttttatgcgctttgcagatactgcattttttacacgctgaaggtatgcagcgaccctgcactgagcaagtctatcagtgctgttttcccagctgcatgcactcactttgtgtctccgtgttactttggtaattctcacaatgtttcaaacttttttgtaattatcatgtctgtgatggtgatctgtgatcagtgatcttcgatgttgctattgtcctctttttggggcaccatgaagcacgtccgtatatgaaggcgaacttcataaatgtgtgtgttctgactgctccaccactgatagctcccctgtctctctctccctctcctgtggcctccctattccctgcaatgcaatgatattgaaattaagccaaataataactctacaatggtctttaagtgttcaactgaaaggaagagtcacatgtctctcactatttatttatttattgaggcaggatctcactctgtcacccagcctggagtacactggtgtgatcttggctcactgaaacttccccctctggggttcaagtgattctcctgcctcagccttctgagtagctggcattacaggtgggtgccaccatgcctggctaatttttgtgtttttagtagagatggggtttcaccatgttggccaggctagtctggaattcctgactctaagtgatctgcctgccttggcctcccaaagcactgggattacagacgtgggccaccacgtctggccacatatctctcactttagatcaaaacctagaaatgattaagcttggtgaagaagccatgccaaaagccaagatgggctgaaggccttttgcaccaaacagccaaattctgaatgcaaagaaaaagttattgaaggaaattaagagtgttactccagtgaacatatgaatgataagaaagtgaaacagcctaattgctgatatgaaggaagtctgagtgatctggatagaagatcaaaccagccacaacatccccttaagccaaagccaaatccagagcaaggtccgaatgctcttcagttctatgaaggctgagagacgtgaggaagcttcagaagaaaaattggaagtcagcagaggtggaagtcagcagggttcatgaggtttaaggaaagaagcaatctccacaacataaaagtacaaggtgaagcagcaagtacagatggagaaggcgcagcaagttctccagaagatctctgatgaaggtggctacactcaacaacaggttttcagtgtagatgagatggccttcgatggaagaagatggcatctaggactttcagagaagtcaatgcctggcttcaaagcttcaaaggacaagttgactctcttgttagaggctaatgcagctggtaggacttcaagttgtagccagtggtcatttaccatttggaaaattccagggccctgaagaatgatgctaaatccacccttcttgtgctctagaaatggaacaaagctggggtgacagcacatctgtttatagcatgcttgactgagtgttttaagcccattctggagacctgctgctcagaaaaatagatttctttccaaagtttgctgcttattgacagtgcacctgatcacccaagagctctgatggagatgttcaaggagattagtgttgtttccatgcctgcaaacacaacacccattctgcagtccatggaccaaggagtaatttcgactttcaagtctcattatttcagaaatacatttcataaggctatagctgccatagatagtgattcttctgatggatctgggcaaagtcaattgaaaaccttctggaaaaaaattcaccattttagatgccattaagaacattcatgattcatcagagggggtcaaaatatcaacattaacacgagttcgggagaagctgattctgattctcatggatgactttgagtggctcaaggcttcaggggaggaagtgattgcggatgtgtggaaatagagaaccagaattagaagtggagcctgaattgctgcagtctcatgatgaaacttgcacagatgaggacctgcttcttacagatgaggaaagaaagtgttttttttttttttcagatggaatctattcctggtgaagatgatataaatattgttgaaatgacaacacaagattaagaatattacataatcccagcacttagggaggctgaggtgggcagaccacctgaggtcaggagttcaagaccagcctggcctacatagggaaacctctctactaaacatctctactaaaaaaattagctgggtgtggtggcagatgtctgtaatcccagctactcaggaggctgaggcaggagaatcgcttgaacccctcaggcaaaggttgcagtgagccgagatcacaccactgcactctagcctgggcgacagagtgaaagtgtgtctcaaaaaaaaaaaaaaaaagaatattatataaacgtagttgataaatcagcatagaatttgagagaattgactccaactttctttttttattttttattttttatttatttttttattttttattttttttattgatcattcttgggtgtttctcgcagagggggatttcgcagggtcataggacaatagtggagggaaggtcagcagataaacaagtgaacaaaggtctctggttttcccaggcagaggaccctgcggccttccgcagtgtttgtgtccctgggtacttgagattagggagtggtgatgactcttaacgagcatgctgccttcaagcatctgtttaacaaagcacatcttgcaccgcccttaatccatttaaccctgagtggacacagcacatgtttcagagagcacagggttgggggtaaggtcacagatcaagaggatcccaaggcagaagaatttttcttagtacagaacaaaatgaaaaatctcccatgtctacttctttctacacagacacggcaaccatccgatttctcaatcttttccccacctttcccccctttcgattccacaaaaccgccattgtcatcatggcccgttctcaatgagctgttgggtacacctcccagacggggtggtggccgggcagaggggctcctcacttcccagtaggggcggccgggcagaggtgcccctcacctcccggacggggcggctggccgggcggggggctgacccccccacctccctcctggacgaggcagctggccgggcggggggctgacccccccccccacctccctcccggacggggcagctggccgggcagagggtctcctcacttcccagtaggggcggccgggcagaggcgcccctcacctcccggacgactccaactttcaaagaagctctactgtggccaaatgttatcaaccagcatcgcatgctccagagaaatttcatgaaaggaagagtccatccaggcagcaaacttcctcacggtcttattttaggaaattgccatagccaccccaacctccagcagttgccactgtgatcagtcagccgtgtcaccatcaggcaagaccctccaccagcaaaaagattatgccttgctaaaggcttaaacgattgttagcattttttaccaatcaaatattttatttttatttttgaacttttagatttagagggggtacacctagcctttctagactccctcagtaattggtaaatttctctttttattttgttattattcctttttttcttttcttttttttaatttttattttttagagacagaatctcatcatgtcactcaggctggagttcagtggcgcaatcatagctgactgcagcctcgaactcctggactgaagagatcctcctgccaaagactcctgagtagctgggaccacaggcacaaagccagtgtgccctgcccattattattacctttttttttgagacagagtctcgctctgtcacccagactggagcacagtggtgcaatctccgctcactgcaacctctgcctcccgggttcaagtgattctcctgcctcagcctcctgagcagcttggattgcaggtatgtgccatcatgcccagctaatttttgtttatttagtagaaacggggtttcaccatgttggccaggctggtctggaactcctgacctcagatgacccacccgcctcggcctcccaaagtgttgggattacaggtgtgagccaccgcgtccagccattattatcacttttaatggctgctagttccagggtgcacagagatttaaagggcacattcttccagggattgggcataacatgagcactgggaatgaaggtgataggttctacaggggaggcagtgcctgggagggtggatctgggtgtgggtgcgaccactccctaccccaccgcggctttttcttgtcctttgaagagacagagtgacagcaagaaacaaaaaggggacttgggcctggggttggacggtctggtgttaggtctgcagtcagcctcttaaaggctacctggggttgacactgtccccaacctctctcctgcatctttgcaacgagggaggtgaggttggacaaactctgaggtccctttcagccttaatactcattgtgatatattattgactgctggctgtatcctgggtgctgttctaagaaccgtaggaattcctctcctgagcatggctaaactctgagctaatagtatcattatatgaaagatgaggaaacggaggcacagacagattgagtccttgcccacggcctcgtggctcatacgtggaggagtcagaattggaactagagactgatcgaatgaatgacactcgggtcaccaggacacccttcctatctccactcttacatctgtttcttagcaatcatctcccaactcctacctcctcttttcaggttcttcttggtgacatctgttcacaactcaccccttctctccctttccgatggtcctacctccatattccccttgttacttatttccaacttcttcccctactttccatcttgattcacccttctctcctctggccagcggatcgcgggctcccagctctcctccaggctgcagtattttgggcaggcactgagcgggggtcaagacctcacccaggatggactggtggacctggctgtgggggcccggggccaggtgctcctgctcaggtgagagcagcctttctcagaggctccccaggtggtcctaggttcagatgggggtgcccaccccacgtggtgctcccaggagccgacggcctgtcctcagctcggtgctctgcccgcaggaccagacctgtgctctgggtgggggtgagcatgcagttcatacctgccgagatccccaggtctgcgtttgagtgtcgggagcaggtggtctctgagcagaccctggtacagtccaacatctgcctttacattgacaaacgttctaagaacctgcttgggagccgtgagtcccctcccctccaacccaggacaccctgacctctggagtcccccatcccaggcccctgtctcccaccctgctcattgtccacccaaggagttcctgtctcaacgccgtccctgcgaccgcctacaggtgacctccaaagctctgtgaccttggacctggccctcgaccctggccgcctgagtccccgtgccaccttccaggaaacaaagaaccggagtctgagccgagtccgagtcctcgggctgaaggcacactgtgaaaacttcaacctgctgctcccggtgcgtctgggcatgaacgtgggtggcggccgcgctggggctggcagaaggcagggcagggagagaacaggctgtgttccggcctccctgtggctcagcccagcacaggaccagccatgcaggacgtgcttactgcacgttagccagtgagtgagtgagcgagcaaacaagtgatgagatcggctgcaatttccaggggccacacgattggatttcaggaaagagaattgggcaacctgagagagctctggggcttccggctgggctttttttcaggcattcactggacaggggtttatcgagctgctcctgggagacaggccttgccctgggggccaggggcataggtggccaaaacagtcattgctgatcgggaggtctggggggggggaggaaaaaaacaaagacaaacaaggggagagaacagagagggtgtcagggaggcctcctgaaggcggtgacgctgagcaggctctggaggaagctgaagccgcgcgggagctgggcagaggcaggataagaactgcggatgaggccgagcgcagctcttaccctccccttaccctccgctccccgcgacgcccgtcccccagagctgcgtggaggactctgtgacccccattaccttgcgtctgaacttcacgctggtgggcaagcccctccttgccttcagaaacctgcggcctatgctggccgccgatgctcagagatacttcacggcctccgtgagtcctggcactgggtctcccagagagggtgcacagcgtggggcctgggtctcggagaaaaccccccgttgccttcccacgcagctaccctttgagaagaactgtggagccgaccatatctgccaggacaatctcggcatctccttcagcttcccagggtgagcgcccccaccttagacctgccctactgccccagcctccttcctggaatctgggactcctgcctctggctctccctaacattgtctcatcctatagtcaaaacccaggtgtcttggctgggcacagtggctcacgcctgtaatcccagcactttgggaggccgaggtgggaggatcttttgaggccaggagttagggatcagcctgggcaacagagcgagatcccatttccacaaaaacaaaacaacaacaacaacaacaacaacaacatcacttgagtgtggtagagcatgcctatagtcccagctacttgggaggctgaagcttaaggattgcttgagctctggagttggaggctgcagtgagccataatcacaccactgcactccagcctgggtgaaagagcaggactctgtctcttaaaaaaaaagaagaagaagaagaagaagaagaagaagaacccaggggtccgtcccctgtctatctcccaaatccccacccaccccattttatcccagaccatttctagcctcagtcacagaatcatcttctcctttccttcacctgatacccagcttgaagtccctgctggtggggagtaacctggagctgaacgcagaagtgatggtgtggaatgacggggaagactcctacggaaccaccatcaccttctcccaccccgcaggactgtcctaccgctacgtggcagagggccaggtgcaccctctggggaaggaggaggaggcagggctgggcgttagcgtagattcccgtgcggttcagaacccgggctgggcttggaggtggtagtgccatctggggcacgcctctgctcgtgtgggtgttcaactttgggcatcgcagtttaaggacactgactatcaggaatgatttcctgagaggccactaatgtggagacagaggggaacctgcccaaatttctttctattccatattatatcagtattcctcttttaaatgaaaacatacctcagccttcaaatattttaaaacactgttctgtagaagcaaggggttgaatttattggtcactctacattaaggcttggcgacctttttctataaagggctagatagtaaatatttcagcttcgtggtctgcgtggtctgtgtcacagctgctaacctctggtgttgtggaatgaaagcagccattgacatgaatgagtttatgagtgaatatacctgcgatgcagtaaaactttataaaaataggtagtggctgttggttgccaatccctgctttaaaatgcagaactaggaccacggggagtcaaagagaaccagattttttaaacaaagatgttattatggctgggagtggtggctcacgcctgtaatcccaggacttcgggaggttgaggcaggcggatcaccggaggtcaggagtttgagaccagcctggccaacatggtgaaaccccatctctacgaaaaatacaaaaattagctgggtgtggtggcaggtgcctgtgatcccagctactggggaggccgaggtgagagaactgcttgaacccggaagacggaggttgcagtgagctgagattgtgccactgcactccagcctgcacaacagagcaagactctgtctaaaaaaaaaaagttattatgaaaaatttaaaacatttacaaaagtagaaagtagttcaacaaacctccccaaaacttgtcacctagattcaacaattagcagcattttgccacatttgtttcatcaatttttcccctttgctaaggtattttctttatttctttatttttgagacagggttttgctctgtcacacaggctggagtgcagtggcacaatttcagcttactgtagccttgacctcctgggctcaagcgatcctcccatctcagcctcctgagtagctagaaccacatgcacacaccaccacacctggctaattttttaattttttttgtagagttggggtcttaccatgctgcccaaactggtctctaacccctgggttcaagcagtcctcctatcttagcttcccaaagtgttggagttacagacatgagccactgtgcctgacctgctaaagtattttaaaacaaatctcagacatgggggtcattgtactcctccttattcactctgctatggtttgaatgcatcacccaatgttcgtgtgttggacacttaatccccaatgcaacagtgttgaaaggtgaaaccttttaaaggtgattaggttatgagggctttgccctcatgaatggatgaatactattatctcaagagtagattagttatttcaggagtgggtttccttccttcctttcttctttctttttctttctttcttttccttctttctttctttccttgagagggtcttgctctgttgcccaggctagggtgcagtggcacgatcttggctcactgcagcctctgcctcccgaattcaagcaattcttgtgcctcagcctcctgagtagctgggattacaggtgcccactgccacgcccagctaagttttgcatttttagtagagatggggtttcaccatgttgggcagtctggtcttgaactcctgacctcaaatgatccacccgattcggcctcccaaagtactaggattacaggcgtaagccacggagcctagcccaggagtgggtttctaattaaaggatgagtttggccccctttccctctcactctcacatgcactgccttgcacatgcagcacaaaggccctcaccagatgctggtgccatgttcttggacttcccagcctccagaaccacaaagcttctattgatacattacctagtttgcggtaatctgttatagcagcagggaacagacaaagacacactctatagttctgaacaatgaggacctcttatatgacctcaacaccattatcacacccaatgaaataagtgattccttggtattaagatcatagtcaaaattgtgtaactgtctcaaaaatatctttttacttctggtctatttgaacgaaaattcgaactaggtccatacatgatggttggttgttatttctgctgtctctcttagtctaatattcccagcggaagcgcattttgattaacgtataaaagaacacagcaggaaaggccatctcttgcatgtgaggggtgatcactgtcaatgaaagtgctcctagacatatcaaccaaatgtaatgggtggacctttgctgaatattgattttaacaaatgagctgtaaaataacatttttggagacaatctaagaaaatagaacatgaccagtatattggtatattaaggagtaattgttaattttgttggctgtgatttgttggttcttgtggttacatttaaaatacccttatctattggtggtatacactgaagtatttctagatgaaacaatatggtgtttggaatgtgctttaaagtgttcagaaagagaacatagcagaaacaagagtagaaaaatgttggttacttaaaatgagtgatggttatatggggttgattttccagtctctctattttttaatgtgttttaaattttccattataagaggcctttaaaataacaataaaaaggtgaacattttaatacatttgagatttctactttggaagaaagtttgaccagatagctatgggggagcttttaaaaacgtaaccttggctggacatggtggctcatacctgtaatcctagtgttttggggggacaagatgggaggattgcttgaggccaggagttcaagaccagcctgggcaatatagcgaggtcccatttataaaaaaatttttttaaaattagccaggcatggtggtggtgtgtgcctgtagtcctagctactcaggaggctgaggcaagaggatggcttgaggccagagtttgaggctgcagtgagctgtgattgcatcactgctttctagcctgggtgacagagtgagacctggtctcaaaaaacaaacaaacaaacaaaaacataagcttaaggtgggctccaggaagctttatcactacttcgtggcgtgtctttggaatgctgttatattaggttggtgcaaaagtaattgggtttttgccattgctttcaatttcaactaatactcctctactttttctcatgcctagaaacaagggcagctgcgttccctgcacctgacatgtgacagcgccccagttgggagccagggcacctggagcaccagctgcagaatcaaccacctcatcttccgtggcggcgcccaggtcagcctggcttctgtcccctcactgctcccctgccccaccctgtctttactgctctgtgacctctcagttccttttcctcagatcaccttcttggctacctttgacgtctcccccaaggctgtcctgggagaccggctgcttctgacagccaatgtgagcaggtgagccgggccaggccaggggcagtgcccctcatctccagcctcacaccccattctcctcctctggggcctctggcaactgagtctctcctctttctccagtgagaacaacactcccaggaccagcaagaccaccttccagctggagctcccggtgaagtatgctgtctacactgtggttagcaggtcagcaggtaccccactgcaggaaaaagggttcttctctctgacctcaaaaagaaaaaaaaaaaaaggccttgaaacgctgccacagagggtgagataaggtgtttgaaactaaaaggtcaggtgtttcagcagacaccttccttcagccaatgccttcctcgaatttgctgtgtgccaggcagggtgctgtggttattttccatacattcatttgacattcattgaagatttactgagcccccattatgtgtgatcaaaaccagacatgaaccctcgcccttgtggggtgtgccttgctggatgttctcctgtgcctggtgtttcccactctcacctgcacctgcatgcgtggaggctcccagccaggtgcacgctctgagctcgtgtgctggggtgtgccccaggctctcataccccttggcaggggacccacaggcagggctcacctactctaggcatgtgtggtccacagcttggccacacatggcaggtgtgatccacagcttggccacacatggcaggtgtgactctgtgggttagggcacagggagtgccaggttggggcatttctgggggaggccaaggtgggaggattgcttgaggccaggagttcaggatcagcctgggcaatatagtgagaccctagctctacaaaaaattggcagaggaggaatgaggcttcagagtaggcgtggtgggctggtgtttggactatgccagctggaggacaggtgccggaagagtgaagcagtgaggcagtggtgagactggccacctgtgtgatggtcccagctgcccaccaggtctccaggcttgtgcccaaaaagggctcaggaggtgttaaactgagacctcatgaagagtctgctgtgggccctccctcccctccaagccccaggcccggaaaagccaaggaaatgggaaaaaagggcccccggggaggtatgtgggggactgggaaggggcaatgctcagtagcatttggtcaacagcgtcagcctgggccaccccaactctgtgctgtgtcccacagagccctggcatcctacatccccacaaagggatggaaggaaagcggaggggcaggccatggcccctgctctcctgcagtcagtggcagagctctctgctccgttcattgtaccgactacccggccccactggcagcctcctctgcaggcagctatgagctctttgcctcatttttttttttttaaagcccaggtcttgctctgttgcccaggctggagtgcagtggtgtgatcacagctcacagcagccttgaactcctcttgggctcaagcgagcctcccacctcagcctcccaagtagttgagactacagatgtgtgccaccatgcctggctaatttaaaaaattgttttggagagatggggtcttgctatgttgcccaggctgatcttgaatcctggcctcaagtgatcctcccacctcaacctcccaaagtgctgggattgcaggtgtgagccactgcactcagccaattagcacttgtttgaagcccagccctgcttttctagactctctctctttttttttttttttgagaccaagtctcactgtgttgcccaggctggagtgcagttgtaccatctctgctcactgcaacctccgcctcctggctccaagcaattctcgtgcctcagcctcccaagtagctgggattacaggcacctgccaccacacctggctaatttttgtatttttagtagagatggtgtttctccatgttggccaggctggtcttgaactcccgacctcaggtgatctgcctgtctcagcctgtcaaagtgctgggattataggcgtgagcactgtgcctggtctctaaactctctctctctgtttttttttgagagagagagagtcttgctctgtcattcagtggcgtgatctgggctcactgcaacctctgtcccctgggctcaaacaattctcctgtctcagcctcctgagtagctgggattacaggtgcacaccatcatgcctggctaatttttgtatttttagtagagacagggtttcaccatgttggccagggtgatctcgaactcctgatctcaggtgatccgcccatctcagcatctcaaagtgctgggattacaggcctgagccaccgcgcctggcctctaaactctcttataacctaactcagccacagccctcattccaggacattccaaggccccaccgaccacctgtcctctcatgctctagccaatgccttctgcagatgccccatggtagttcacatccacttatgcgtcttctctctccagccacgaacaattcaccaaatacctcaacttctcagagtctgaggagaaggaaagccatgtggccatgcacagataccaggcaggtggtggagacgcaggagactgggctggggtgggaggctgggagccggagactggggagggatttgggctttggcgtgggctctgccctcagtgccctctgtgcaggtcaataacctgggacagagggacctgcctgtcagcatcaacttctgggtgcctgtggagctgaaccaggaggctgtgtggatggatgtggaggtctcccacccccaggtacccaaggactgcatgtggctcctccacgaatgccctttctacctggattccttgtgccccatgtgggtccctgatgtcccagctgagacacttgttctctgcattttcccccagaacccatcccttcggtgctcctcagagaaaatcgcacccccagcatctgacttcctggcgcacattcagaagaatcccgtgctggtgaggagggctctgggctggccctcactgtaggccccacatcagaggaatttaacccaggagttcatgttccatatccatcctgctgaagtaccctcttgcattcggatatggccgctgccctcaagtcacaccgcataatgctgcctcccaccttcacactcatctttctcagccccatgctatttatctgcccccaggactgctccattgctggctgcctgcggttccgctgtgacgtcccctccttcagcgtccaggaggagctggatttcaccctgaagggcaacctcagctttggctgggtccgccaggtgtgtgggtgcaacgacagagcccctgccccagactcaggcgggacctggcatgtctgtgcccatctgcaagccagggcacccccagagctctgagcctcccccagagccagttcaacaggtttcccccaacccctttgcagatattgcagaagaaggtgtcggtcgtgagtgtggctgaaattacgttcgacacatccgtgtactcccagcttccaggacaggaggcatttatgagagctcaggtagagaccatgtggagggcagcgaccaggctggaaagagggcccctagggctacatctgtggtgctgggtggggggtttgcaagccttgggggaggagggcgaaggcctctgggcaggatagctgtccctaagggcacgggtgctgctgtgtctcacctcttggagcagggcctggggaaggaggggagggagttaaaggttggggagcctgggaggagtctgggatagtaggaggatgggagtgctctgacagggtcacttccacttcagacgacaacggtgctggagaagtacaaggtccacaaccccacccccctcatcgtaggcagctccattgggggtctgttgctgctggcactcatcacagcggtactgtacaaagtgagtgttttatgccactcttgacaccaccagcatctggtcccgctctttttgcagagtgagaaggagctcactttgaaggcagaggcacattcttactgggtcacttcatatgagaaactgcttcccacctgcaatgtcacctgtccccagtggccccctgctttgtgattcccaggcttcctctaatatttctccctttctttcctgctcttctccatcattctacgtgtttcccttgacagcagattatcatataaaagcacagacctgggtttgaatgtcgacatcaccacgggttctttttgtctttgaccataggccagtgtctgctccactctgggccttgatttctcaatgtgaaggtgattctaccccagctcatagaattttggctaaatctaggctgggcacggtggctcatggctgtaatcccagcagtttgggagatcgaggcaggtggatcacttgaagtcaggagttaagagaccagcctggcctacctggtgaaaccccgtctctactaaaaatacaaaaattagttgggcatggtggaggttgcagtgagccgagatcacgccactgcactccagcctgggcaacagagtgagactccatctcaaaaagaaaataattttggctaaatctagatgacatgatgcatataaagttcctagtgcagtgctttgaacctagcaaggatttcagaaatagtgacccctctccctcagtcatctcttttcctctcttccactgaatgggcttcctgagtttcttcttcgtcctcccccctaggttggcttcttcaagcgtcagtacaaggaaatgatggaggaggcaaatggacaaattgccccagaaaacgggacacagacccccagcccgcccagtgagaaatgatcccctctttgccttggacttcttctcccccgcgagttttccccacttacttaccctcacctgtcaggcctgacggggaggaaccactgcaccaccgagagaggctgggatgggcctgcttcctgtctttgggagaaaacgtcttgcttgggaaggggcctttgtcttgtcaaggttccaactggaaacccttaggacagggtccctgctgtgttccccaaaggacttgacttgcaatttctacctagaaatacatggacaatacccccaggcctcagtctcccttctcccatgaggcacgaatgatctttctttcctttctttttttttttttttcttttcttttttttttttttgagacggagtctcgctctgtcacccaggctggagtgcaatggcgtgatctcggctcactgcaacctccgcctcccgggttcaagtaattctgctgtctcagcctcctgagtagctgggactacaggcacacgccacctcgcccggcccgatctttctaaaatacagttctgaatatgctgctcatccccacctgtcttcaacagctccccattaccctcaggacaatgtctgaactctccagcttcgcgtgagaagtccccttccatcccagagggtgggcttcagggcgcacagcatgagaggctctgtgcccccatcaccctcgtttccagtgaattagtgtcatgtcagcatcagctcagggcttcatcgtggggctctcagttccgatttcccaggctgaattgggagtgagatgcctgcatgctgggttctgcacagctggcctcccgcgttgggcaacattgctggctggaagggaggagcgccctctagggagggacatggccccggtgcggctgcagctcacccagccccaggggcagaagagacccaaccacttctattttttgaggctatgaatatagtacctgaaaaaatgccaagacatgattatttttttaaaaagcgtactttaaatgtttgtgttaataaattaaaacatgcacaaaaagatgcatctaccgctcttgggaaatatgtcaaaggtctaaaaataaaaaagccttctgtg

SEQ ID NO: 66 - DNA, 800437 bp, Homo sapiens
gtaaatcttgtagtcaaatcaattgctgcagctgagcaaagagagccgcggtccctccttccctgggagaagcggatgttatcccagcaccttctgcaagctggtcagggaccgagtcccggaaacttgggtctagcatgtgtctctgagcctagatttggtttccagttgtgtagcacttggctgaagaccaacaaaggggccgagccaactatagaaagtcatctctttaagcagtaagtatttcctgccgacccctcattcctggaccccaagtatagttgtctaactctaaacgccaaatgagaagcttgcttggagtttaggagtttctcacaatgcctacaatttgctggaattttctcatttagaggacaagtgtaaaatgtctgctctggttatattagagggttgttgttaaagtgctttgaaaagtagaaagcagcctttcccaaatgtgggtggaattggttttcaggaggacaaagtcgcagcattagggaatactaatcacagagtgaagaagttattctctcttcaagtttgtttcagcttctgattaatttataagaaagtctcacttcaggactactatatctcaaacacttcatttacatgtcccaatccccttttttaaaagcagagaaagaggtggcaaacagctgtaactagctagaatttaataataattgtttttttgtgtgtacctttttatggttactttctatctgtgacaaatgatatagattttccatttaagataattatataaaccttccctttaaagatcgatgtaaacaaaacataagatgatttaaaacatagtaggtaaaattacagggtgaatgcagatatggtagaagttgtgagggtgatatgaagatgagtcagtctaagaaaataacattaagatctgtaatcccagcactttgggaggctgaggtgggaggatcacttgaggtcaggagtttgagaccagcctagccaacatggtgaaaccccgtctctactaaaaatacaaaaaattagccaggtgaagtggcatacacctgtaatcccagctacttgggaggctgaggcgggagaatcgcttgaacccaggaggcagaggttgcagtggaccaagatcacgccactgcactccagcctgggtgacagagtgagactccgtctcaaaataaaaacaaacaaaaaaagaaaataacattaaggactgtaaaggggtgtagctgtgatattattcatgggatgacacaaagacacccaacacggccctgcccaattagtggatgtgccacctccctggctctgggctggtaatcccgccagagggtcctcaggcaggagatggaggtggatagtagccccaggcaagaatgtgcagctaaatctcagccacaggtttgcagaagcctttgggtctttctctatttgtggaaccttttgggaaaaaattaagcaagacagctatataaaggctcagcatcttacatttgcctgtggtagagacaaatcaattgctttgctttgggccttgccttgcattttttgttgttgttgttgttgttcactattgttaaaagaactatagtgattgtaaacagaagttgccaatttcgtggttattttctaaatctcattgcaacaggccaaaggagttaaagaatcattctgaattccaacacaacatggggtagcttccaacatcacagagttgtgtcagaatcctggctcacccagtgctgtgggctgagttgtgtccctatccaattcatacattgaagtcttaacccctagtacctcagaataatgtgactgtgtttggagatagggtctttaaagaggttagttatttaaaccgaagtcattggagtaggctctaatccagaatgacaggtatccttaaaaaaaggacacagacacacagagaaaagaccacgtgaaggcagagggagaagatggccatctataagtcaaggagagaggcctctgaagaaaccaaccctgcccacaacttgaccccagacttccagcctctgggactgtgagaaatacatttctgttgttgaagctgcccagtctatggtactttgttaaggcaaccctggcaaaccaattcagccgcttgccattgggtggtcttggttaattgcttgacatcttggagcctcaatgtcctcatctatatactgggataatgctattgacttcgcagagttatatgctcaaatatgctgacgtatgtgaaatacttagcatagtctctgctagactctagatactgaatatggataactatttttatttacttagagatcagtctcccttcccctcccattttgaagagtttaagacaaaaacgacagctgttattgctacctcctgacctacatcttttaaagatgttaattgctattataaagcctttaacagataggtagtcatctacactgactccttggtaactattaaaatggtattatcggctgggcgcggtggctcatgcctgtaatcccagcactttgggaggccgagggggtcgatcatgaggtcaggagatcgagaccatcctgaccaacatggtgaaacctcatctctactaaaaatacaaaaattagccaggcgttgtagcacacacctgtaatcccagctactcaggaggctgaggcaggagaatcacttgaacctgcgaggcagagatgcagggagacgagattgtgccactgcactccagcgtggtgacagagcaagactccatctcaaaaaaaaaaaaaaaaaggtattatcctatttggtagaatccgctttctttaacatgcatgtctttaaataactttgtgctaaatggtgttttccatatccaatccactctccagtgtgggtatatgaagtggggagtcatttaagtagttggatagaggcatggtatgatcataagactcattgtgggctggtggacaccgagactggcagtagggttgctgggcagttactgtcgtgacccaggtgagctcatacgtgtctctgggatcccacctaggactatgtccttgctctgctgcttattatccctgagactttaggcaagttacttgtttcttctctctctagcttggtttcctcctctataaaatagagaagtgaaaatagtccagggctatctcattttatataaggattgtgttcctggagacccagcataattcaaacaaaatgtacatatttaaatcaagagtaatttacctataagaataagcatatactgggttttatgtttattctgatgggtaaagtaggctttacattatttttatacctttaactttgtacctttctgtgtgattgaaactttccaaacttacgcatgtgttttatataaaataccaatgagaattatttggctgttaaaagtctttttttaaacagaaaattatctctatctctgtatttttaagtactttaaaacaattttgaaaatgtgtttattacaatggactctttctaaatatcttctttacccttcaaaaaaagatcactcaggccagatggtcagtttccctctgtgctttataagccctttgcagaatccgctcccggggctgtgggatgagagtttaggaagggggctgggggtgggttggcagtgagggacagagcatccagcagtgaaatagttaacctgcctgccactgaagtggagagacccagcttgaggcaatcctgtgtgaggcagcaataaattcaagccaggttttcagagtggaaactgaagctagcctctttaatcagatatttcagagtcactcagcataaaacccaagactaacgaattagtacttggaactgttttatagctatgtcatgaaatgtagctgagattctcagtggacttggatacaccttatgtggtcactgtcacttagggaccgtaaggctgaaggtactttcttcccaagtcttgccccatccaaacctccaaagcataagatgcacagcacccactgagctgagagccccctgccctgtctgcatgttagcttcagataagatgcaaagactaggaacacagtgaggttttgccgctaggttgtccctacttaagaaaagcattgcctgtgtctctattaaaaataaaatgaacccttctggtggcaaagttcaattaaatttcaagatatggctacagtcaggtggaggaaagacttctactcttgaaggaggtaataattgggcagctaagggttggacgatcttcaaggctctggtgcaaatgtctcttgcttgattgttttggcaaacctccagttattggaagtatccctggctgtatgggctgggggctatcatcttttgtggcccttaaactatgctgtcagaacgtgggaactagattacttcattctgctcctgggaaagggaacagacttgtgggatttaaaatgaatacgttaaatttgttgattatcaaagggaaaaatagagaaaaataaataaactcttacaagatcttggctgaagtacaggggccaaagtttaaatccttgctctcaaccatgttaggattttgtaaaagaccttcaattttccctcccaattcactcaggtgggaggagggatgtaccctttggaggcccctgtttcccctcagggttcttttttaatgtaaatggaatggtaagaagagggatagtaactgtactcccgtgatgcatgaaaaagggcagcagccttatgatgaatttttccttttttttaaagaaaaaaaatacagatatatctatgtatcttagtaaaaaatatttttaaaagtgtgataagatggatattgtcacatgcaggtaagagggtaaagtggtacttttggggatggaagtttagcaaaatatatcagatactctaacaagattgagactccatttctcttttaggaatttatccaaaggaaataatccaaaaagtgcacaattatcaatatgctgtcattgcattgtttacagtagtgaaaatctcaacctcaatgttgatcatatgggaaataattggttatattaatgttggttcagccccacagtggtatcatccttggcaattaaaaataaatgacaacaccaccaaaggcacaatccatgaaagaaataattgataagccagacttcattaaaattaaaaacttctgctctgtgaaagacatagtcaagagaatgagaagacaagccatagactgggagaatatatttgcaaaaggcagtctgataaaggactgctatccaaaagaaaagtataaaaaaaactcaacaccaaaatatgaaaataacctgattagaaaataagccaaagatctcaacagacacctcaccacataagatatacagatggcaaataagcatatgaaaagaagttccacatcactgtcattagggaaatgcaaatcaaaacaatgagataccattacatacctattagaatgaccaaagcccagaacactgacaacactaaatgctgacaaggatgggaagcaacaggagctctcattgattgctggtgtgggtgcaaaatataacagtatggccatttgggaagacggtttgccagtttcttacaaaactaaaaatatgcttaccatacagcccagcaactgagctccttggtagctacccaaaggagctgaaaattgtacaaaaacctacacacagatgttaatagcagctttattcagaattgccaaaaacttggaaacaggatatctttccataggtgaatagataaataaacggtggtatgtccatgcaatggaatattattcagcgttaaaagtaaatgagctgtcaagccatgaggaaacttaaatgcatattactaagtgaaagaagtgagttgtaaagtctatatagtgtatgattccaactctatgacattccggaaaaggcaaaactgtgaagacagtaaaaagaccaatggttgccagggtttagcgaggagggagaggtgaataggcagagtacagaggggttttagggcagtgaaagtactctgaatgatactataatagtggatacctgtcattaatacatttgttctgacccacagaatgtacaacaccaagagtgaaccctaatgtaaaccatggactttgagtgattatgatgtgtcaacattggctgacagttgtaacaaatgtaccacgctggtgggggatgttgataatggaggaggctctgcatgtgggggtgcatggagtatattggaaatctctgtaccttcctctcaattttgctgtaaacctaaaactgcttgaaaaaaaaaaaaggctttaatttcttttaaagtcttcatctcttactatgataccctgagcatttcccccaatgtctttaagggaaaagaagctggaaataaaagggtaaatgtgtggtaatgacagctttgtgaaagtatacacatagaaggggagaaatgcagcaaagtcatgtctaggtggtagggttatggttaaaataattattttcttttacattttttccaaggttttcaagattgaacctataccatttttataataagaaaaaaaaatgtactccccagacaacaatggatgtgaagcaattgccagtcttcagcctgtgagacaaagggggactaagagcatgtttacttgcttggaaggtaggacttttaaccaatgtttctttcacctgccaaaggctgagaagccaagaagatactggaggtagagcaaagtgtgtgcctttgtgtttttgctcttgtttgcttggggagcaatgtgcctttgtggcctcttcaggtgggagaagaggtagaggaagagctcctccagtttttaatcccctcatctaatcaccagacctttcttgtggttttcctgggactctttttactcaatggatggattgacactgtttgtgtgtgtatgttgtacttggattatgccttaatgtgtcacgatgatgacaaaagggtttgcaacagcaggcaggcaaatgtccctgcttttaatagaaagcacattccagcactttatattatctgtaacacatagagctgcttagaacaaagcattgcccctaagacatggtccccaagagtctttaataagttccagacctctgtgaaggtattaattaaatattttaaatagaatgactttagctggctggggcatttttatgagagaagggagtatatttaaaaccagggccgtttctgtaacaggagcttgttttgaaggaaatgttcttgggtggggactctatgggtaccaggctgtcaaatctatgggccaacttgatgtcaaaaacagacattctggatgtttcaaacaatatttgaattgggtccttgctgcagaatttggacataattctgaagcatgattttaacacaaaggggagaatagtaagagtctatgggtataccaggcactgttagaggtagtttctcacaatagttccatgagaagggctttgacaaggccattttatagaaaacaaacaaacaaaacctaagtgactatttttcaaagtcacaaagtttgatggaggagctcaattaaagtctgtccaataaactcaaagtctgtccaataactaaaagatataattggattgtttttaacacaaaggataaatgctcaaggggatagataccccattttccaagatgtaattaccatacatggcatgcctgtatcaaaacacttcatgtaccccataaatacatatatacctactatgtatccataaaaattttaaaaaagtctgtctgcccatctatccaaccatcatctgtgtatttacatatgcatttttctacctatccatcttctatatttcagaatactttactctttctcaggaagtactagaaataaagataagcttaaaaagcagatcctggtccaattgatagacatttcctgaattcaaagtcatcagagttattgaatactgtgtagagtctagaagcacagagttagctgatttttctagaaggcagcatgatgtagtgaaaagagcaatgcacttggaataagaggtccaagtttggatcctggctctgccacttatggatatctgtgacatcgagcaagtttctccctgaacgagtttctttgtctccaaaattagaattgcatttagcatagtgcctagtaggtgaccagggaaggcaagttaaacctgaatttggtcctagtagtgggggtaaggaatagggagaggattgtccttgagtccttcatggatcactctgggtcttcaggaatcagcagtccaatggattcataaggaacctccccttcctggctaatgatagccaaagtaacaaactggggtagagtcactcccaaatgagacattggagccccctcaagggagtgatcatgttcgatgggcatcacaagcatggcaggaaatgattgatgctgctttggcttcttcctggattcacttcattccagagcctgtcaatccacttcttggcatgaacagcccttcttgggaccacccttagtgtattcccacctgctcgagagctctatccttcttcatgtccccaagctcctttcccacatgctatgttgcctcatacatggaacctttgaatccctaaataaaataggtattcacatctgtgaagatcctttgtgacctgggacccagggctgtgtgcacgaaagggctaatttttattattcctttaatgggcctgccctgcctgctcctgctccctctctatgaatcttcagaagcctccaagctttcccatctagccattcttgcttatttatctcaagacctcaaattgtccttctctgctttatttggggaatgactctatgggactgttgtatatacatcccgacccccaaaccatctctcagaccctccatggccgcatgtcctctaggatcctccctgttcagcacaggtctgtagatgagctattaagaacttagagtcatatgagcctcagtctgccccaactagctgagtgggctctagtaaggagaagggcaaaggaaatgaagagcataggggataactcactacctttttacctctctcctgctgctcaactctcttgcctcagatcctcatttctaaaatgaagatagtagttgtatcttcctcagtgctgtttggaaagattaaatgacttagtacatacaaagcacttagtgtagtgtttagcccacaggctgctgctattactattatggctgctaatagaaatcattggaaacatgatgatttgagatagaacattgtatattaggaagaacgtatctagttttaaatctaagctctctcactttagtgtgtatgaaaattagtctttctggaccgggtgcggtggctcacgcctgtaatcccagcactttgggaggccgaggcaggccgatcacctgaggtcaggagttcaagaccagccaggccaacgtgatgaaaccccgtctctactaaaaatataaaaattagctgggcatggtggcgcgtgcctgtaatcctggctacttgggaggccaaggcaggagaatcgcttgaacctggaaggtggaggtacagtgagccgagatagctctgctgcactccagcctgggtggcaagagtaagactccatctcaaaaaaataaaaaagaaaattaatctttctgaacctcaatttcctcacactcacaatggacataataatcacttgctcacagatctgtgggaatgtaaagtctctgggactgtgcctggcactgtctgagcttcatgggtatcagtcacctagttctgtggctgtcctgcctgctgttgctccctgctgcctgctccatacagccctgggggtgctgcttccttatggagtttgcctccaccagtgcttggagtgggagcatgcaaggcaagccagccaaggagggttaaaatcagggaatattgtgtacttgaactgacagtgattcacaacatgtctgcacagattgctcagagtctaggcatttgccaaagttggggagatggtgggtgggggtggagcgtggggctgtgagcaaaggatgttccgtccctgggagtataaacacagcactgtctgtaacctaaaaaggtttggttgggagggccatcaaagtctgctgtgcattatttggactgtgctcagcctcctcaaggaagcgcccacggatccacccgtgttgcatctgagagctgtcacacgacagagtcagcagtgctggactctgcacaggatttctggcagctgcctaggtgggggctgccattgccatgggtctgtcccagacttgtcactgtccctgaggcaggtgggtccacccatctggccagtgactaatcagagtgagaccctttcctcatttacagtccacgtgccaaacccttcttcagggccagtttatattccttcctcccatcccaccttcccctggtttccatccccttggccttcaaactgcagcctcgtttcctgttggccacctcaccctgacccctggaatctgcttctttggtcttcaggtctagtttctctccttcatcagggttaatgtgtaaaatggatgatgctgatccaggtttgggtcctaacctggattttgaggctcaatctgtaaccttcccttcaggttttcctggagcacagtagcacctggacagtctgactggcacattggtcatgaggatgttctttggaatgggacagacctgggtttgaatccttgctctcccacttgttggtgggtttaggtcataataccaaaggacacaattccaaacaccataatcctgaatgttgaaaccccaaaagatcaaaattcctagtccaaaatccccaaaatataattctggaaaaaataaaaattctttaaaataaatgtatttacattttaaaagggggatttatttgagaagcataaaagaatgacagcatacttcatagactgctttacagaacagactagttaataataacgtgcatatttttgcaagcataaacagtcaggtgtactaacaacagtcatgagagcataacagttatgaactgtatacatgaagaaataggtcagaaagtgaaatttataaatgcataccactatgattggcaattctgtacacccagctttataactgtggtcatctgaaataccatgatgggcaacctcaatcttttgacgagagcaaacaaaaaccacagtgggtcaccactgcatatgcagtcacccgaagaattgggacttcaagaaatcatatctttcacaaatgcagatgtgcaaagagaggtcctttttgtacatctgcattgtgaaagataaattctttacatcttcatttactgaggaagtttcaacattttttacatacatgcatagtgcttacacacaaagtcaacattgtgaataaagcactttcttggtgtccattttttataaaaaatgtctaaaatgaattagagctctctaaaagtctttgtgcaatttatatcaccagtactagaaatgatgcaaagataaaactcatagcatagccaattggcactatgtgtgaaggggcagaagttgtatacaatagaataatttggcaggggagatttcttgtgtttttcatttgttttcacatctttgagtttggaaacactcgctgcacttttatttggagaatagttgtggtctatacatttcgtaagtatatgccgtccatctgagagtctggatattgcttggctattgcaattaggtgattttctgcttttgcagcaccagtaataattagttttaaacttttatctttcaccattaagtagcctcacacaattaaattagagggaacaactttcacagatctcttccattatgttgtaaggaatgcagtaagaaagaacaatatctgatttccccaatacaaaatttatattagtcagggttctccagagagatagaaccaaaaggatatagatttagatatataagaagggatttactggggaattgtctcacgcagttatggaggctgagaagttccatgataggcaacctgtaagctggagaccctgggatgctggcagtgtggctctgtgcaagttcaaaagccttagaacctagaaagcagatggtgtaactctctgtccaaggtcaaaagcctcaggacccagagtgccactggtgtaagtcccagagctcagagcctgaatttctgatgtccaaagcagcagaagaaatatttctctcagcttcagtggaagaccagttcaccttctgtatctgtttgttcagggcctttggctgattagacagtgcctgccaacactgagggcacatcttcctgcctagttcattcacactcacacactaatctctggaaacaccctcacagacacacccagaataatgatttaccaggtttctaggtattccttaattctgtcaagttagtacttaaaattaagtccacaaatccactccttgtccacttggcacccttaaactatacttaatttctaaacaaagacactaacaaggtaatagtttgcctaagatgatgaaactaatatgatgcagctctgtgtacaactgaaaatatactaatctctcccctaggattctgctttcaagatttcaacatttggtattttaatctttcaggattgtgattttggggattttagagattagggattttagatgttaggaattttagactttagggattttgatctttagggattttgacattctggattgtggcatttgtgactgtatctcttgaggttgcaatacacactgtgtatgtgtgtgtgtgtgtgtatgtgtgtgtgtatatatatatatatatacatatatacacatatgcacagatacagatatgttttgtggttttatcttattatttatttatttatttatacctgatctaaaatgggtgtgcttagtaaatgacaatttgagttttgccagtatctgagtagagtggtacaaatgtgacctgaggtttgggaaaggaagagctcaggcttgtaggaacatgacctttgatgttataccaatgttgggtggccatttgtactgtgcttctgtcaccaacgtgcacttgtgaggttgaggatggtgccttatttctcttttgtcttttgtgcctgaaatatcatatttgccagcaaatatttattgaattaaaccaacttcattttcaattagtactggtttcttctttaaggaaatcactaagtgatttctgatgtctttaaaagaactgaagggcctatactcaagtttttctctaatacagagttgtcattttcaacatgtatcttaagaaagcattgagtcagcagaactgaagaactggggctttgagggaagagtttgaattatttctgagacaagaaagaatgccacgtttcctaaaatgcagcagcagctctgcccaggctggttagttgagtggagcaagctaacgagcttgcctcatggggagttgggaagcaacaatcagcccctttgaaataattccttcctagggcgggaggtattccaatattaccattgtcaccgtgatgagcagtcacgtggagaaatgtggcagggttgggttgtgcctgactcattctcatggcttctctgcattcaggaaagagggtccatgggagactaggccagcagggtgcagcctacagatatgggatctgtactgcactacagggtgtggctgtgcctggggtagcaggctgctgatgtgccattccaggagggaagctggtgcttcaaagtccaggaaacaaaacaagaagatgatggtctaggagaaaagatggcgcagtggaggtcatgatgagcaaatgtacaagcagtgggggtccttgtcagggtaaagatgggctggccagagatacacggaatgggagtcagggcctcattgtccaggctcagggtgtctgccatagcatccttcttgtgtggagcctgaggacttggttggcttactatgtgaagttaaatggactgatctctgctgaagaaaggactaagggggtgggagtggacattgtactaaataaatgtcttcaaatatctctaggaggaccccttgtagaaagcaaattgacaacagaaaatagaagggttggggaagggatggtattcttgacaacctctggagtttcatagtgagtgtcatagatcataggagatgagcaaagataatacttgtgtatttgtgcagaaaccccgcccagtgaagggtatgtgcatacttgagccagaaggccaagaaggctctgccatcccctttgaccagagtgagggtggtaataacagtgcttccttaggaatacctcaaggtaggggaggatccaaatgagcccctgggcttttttggccacagccagccaatcttgcagttaggatttgaccccaaggaccagtcataggggttccctacaatgacaccaaatccactctgcctccctgagaaattcctagagtggaaacctaggtgtgaagagatgagagaggtcagggaaggaatctcttagatgaggccctctttgggagccaaccctacctttctgggagaaggaacagggaaatgtgggagtgttaggtgttgagttgtgtccccttaaaaagatatgttgaagtcctaatccctagtgtctcagaacttgatattatttgcaaatagagttggtgtcgatgtaattatttaagaagagtttatacaagagtaggactggtccctaatccaatatgactaatgtccttataagaagagtcaggagagacacacaggggaaatgccatgtgaagatcaaggcagagattgatgttatgcagtgacaagccaaggaacgccaaagattgccagcaaaccaccagaagctgggaagaggcaaggaaggtttcccttacaggtttctgagaaggcctggccctgctgatcccttgattttgaacttccagcctccataactgtgagacagggccaggtgtggtggcctatgcctataatccctttgggatttgggaggccaaggcaggaggattgcttgagcccaggagtttgagactagcctgggcaaggtggggagaccccatctctacaaaaaataaaggaattacctgggcttggtggtgcatgcctgtggcccagtgaagtgaaaggatcacttgagcccaggaggtcaaggttgcagtgagctgtttgtgccattgcactccaacctgagtgacagaacgagatactatcccaaaaacaaaacgaaacaaaaaacagaaccgtaagacaacgaatttctgttgctgaagccacccagtttgtggtactttgttacagcagccccagcacgtcaatacagatagctaagggagaatcagtatgtttgtgtttctgaactatttattatgactttaagttctcaagtgaattggagacttaagaaggcgtatatgtgacttacctcatcttttctccctactcttctcttcaccttcttttttccctctcctacatttctttctaaacagataaaatcttatacttaaaacgagactattagtggaataaagatttccatgaaagtgattgattctgtaataacattccagtctgatgacttcatttctgttattcccattgtatcattccccaggaagacaccaactatctgggagacagaggtactgcagtcagtttccccctgcacaagcaagtcgttttttgattggctggctccagcatcgtgtcagtaccctctgctgtgttgcggttgggtgtgtagaaacacaacaccccagcctttgcatccaggagtccagtgcaggctggcaggacttaattctgacaattcaatgatttgacccaattttccacctgacaccctttctagtctccatattggcttttgaaatggccctgcttttccttcctgcccccttcactccctccattttccccacccagagcatagcatcctgccttgttcctctccagtccttccaccacagggtgattttcctaggtgcattctgatcatgttgctttgaccatgaatcatgtcaaaaatggccagtggctcttcttgatccctagatctgctacaaagtccacatctttgttacgttcaagatcctccatagttgtcattcaagatcctctataatatatccccaaattattttagtgctccagcgtccaggaaacaaaacaagaaggtgatggcacagtggaggccacgatgagcaaatgcacaagtggtggggggtcatcataagggtgaagatgggctggccagagacacatggagagggagtcagggtcagagcctcattctccatttataaggtgtctgccatagcatccttcttgtgtggagcccgagggagatgtgagatgtcatctcttgcatccacttaaagctccagacaaattggactatggactgtcccattacatggccctgatctcccctctgccatttctttgttcatgcctctctgtttgaagtgtctttgtgtacctttctccttttcatttcaaatgccatctctctctgcaagcctttcttgatttccccaaccagaagcatgttctcctctttgaatcccttggcactctgtttttctatttctctcctggcccttctcttatgctctcctgtgttttccacgtccatattgctagccttgcttgctctcagttgcttaagggcaggcatttttcacttattttgtccccctacttctcatcatgacttccgtatgctccttggagctcttcctctgttcattgttgatatgtgtggttgtacatgttgtttattgcacaaggacccctggtcaagagggtgagtggggctgaaatccagcctatgccctgcttgccaggttgtgtaccttggtgcagggccatagctccaacttttaaaaaattctcatgaagatgccatatgggtcaatgctaggtggtccagtcctcttgaaatcagctgtcctctaccttatctgtgcctcctgggcacaaggttgcaatggcctctgaggactccatcccttgcccagaagaaccccacttccatttctgcctctgcctttctccacaaccccaaagtatgcctgcactggacttccacagctttcagattgtatttccatggtagcatgtaggcatctcaggcacagctctctgtagcatcaaaaacgatttgtccctgctctttcccctcaccctgcagcaaaaacctgcaggagctgcaggtggtggcgtcacaacagcttaggatccaagagactcattccagccgctaaagcgctaagctttctctgtgatcacacattttgcaccagccagagctcacacatgcctctacagacccgcggccaaaggcatgtggatatcagcaactgcttagagaagctggccaaggctggcctgaagaggggcaagggagggagagcccagattacaggcaagatgagatacatttgaaacaactgacaagaaactgtacatcagaaatcagaacagctgtgggctcctcaacatggcagatgggtatgcagggaatgctgtgcagctttaatcacatttaacacgcctgtcagagaattgggtccatcttagtattaaatcgggttttctacattgttggtttgacagagttcagccttatcctgcttgctgcactcagtatggctagaacgaaattgatttctgttccttgttttcagcagagaatagctagtgccactctgccgagctggggaagtggtgggtttgtgttggggttgggtgcagggcgaagagacctgtaagccactgttgtggctcagagggcaagagctcagccagggttggggcaatagtccttaaggagtgcgcatcccagccctgatttatgagcactgtgtgatgctacaatgtgtgtgtggctgtgtgtttaaattctgaatttttgaatgcttctatgaatgggagattcatagaagcgtaggaaaaaattccaatttttccattctgtgccaacccagtacacagtttccatttagtatttgccaaggaaaatcaaccctgctagttataagccctaagtgtggcatcctgatataacaggaggaggcattttggggcctagtggatgggagttcaattcatttgttcattcatccaggaaatgttcatggagtgccagccctgtcaaaggccccgtgctgctggagacacaagacaaaagagcgcctgactctgggcctgactttgtcttcagtgctgcttgtgtagttaaacattgaataaaaattccacaaagtggtactattttcatctgcatttcacaatgagagaaccgagactcagagaggttaatgacttatccgaaggcaggcagcaagaaacggggaagagccggcattcaaaactgcactcctttaattcctcttaataactccggtaacccttgtcttgttcccatggagaagaaggtatgactgtggacaaattgctttgtctttctgtgtctcaattttcttgcatgtgaggtggaggtgattacaataatttattggtgaaatgaaagagtgcaagaagcaaactctaaagcaggacataaaacttaactgttaccatgtttctgtggttattgctaagaaagaagcagtaagcatttgcatgctgtttcagttactatggctgtatcacaaactgccccctaaacttagtgatttgaactaatgatgacctatgttttgctcacagatctacaaattgctcagggctctgtagggacaggttgcctgcatcacttaatgtcagctggggtgactgaattatcttcagtggctgaagataattccagccactgaaatctagtggctggaattatctgaaggctctgactcagggacttgtctggtggttgatgccggctgtcagttgagacattctctgatgctgtcagctggaacacctacatatgacctcttcatgtggcctgtgcttcctgccaacatggcagctgaactgtactgaggatgagcatcctaggagacagccagagctaggcagagaggtaacgtagcctgggaagttgcattgtgtctcttccattgcattcttttttttttttttttttttttgagacagagtctcactccatcagtggcacaatctctgctcactgcaacctccgccttccaggttcaagtgattcttgtgcatcagccttccaaacaggcatgtgccaccatgctttgctaattttttgtatttttagtagagataggttttcgccatattggccaggctggtctcaaactcctggcctcaaatgatccacctgccttagcctcccaagatgttgggattacaggcatgagtcaccgcacctggccctttccactgtattctatagtttggagaagttacccattccctcctctcccactaccccacctcccgcacccccggcatgcactcatcctctagatgcaagaggagggaacagactttacttcttggtaggaggagtgttgatgccaccttataagaagaacatgaggaatgagaggctttggaaaatacaaactgccatatgaacccttgcattacaccaagtctgaccttccctggccttgaggttcctacaggcagatgcagaaaatactgatgtactaatgtatactcccctgcccctgcccaggtgatgagcagatgatggttgcaagtcactaagtactgcttttccttgtttctaaaactcatttctctctgtattttcaaactcatgaaatttagatgcatcgtatggtctggaaattttaatgtgtgtgtgtgtgtttttttcctaactcctcccttcccactcccaaccaaaaaaaagagaaagtgttatcaaattgtttgtataccttgcaatcaatatgtgtaaaaattgagaaaactttgtaataaatggacttagagcatttatttcttcatatgtgcatttaacagaaatttgagtatcagccaatatcagggagtttgacctggactaagggagcatgttatgaactgagactgaagaattaactggaagagatggagaggtggttttggcactctgtaagggcttgtagctctggaggcttccttcagatcaacagaggcaatgtgttaagtatgcattcaccagtgaggttctttggtgtaggatttccctcattgctcaactgaaagctctgcgaaggcacgtattttgtgtattttctcatcaacatatccctagcactaggaatctgacacagagtaggtgttaaaaaactgttcgttgtatgagtgaaaagtctatacttgctctgtcttatttgggtattttttctagaggctaccaacccttttgttctgtggttatcagaatagagctggtttcctgcaacccaccccacctcaccccaggggagttgataggctcagcatataaaagttacctgggcaggagtgaggagagacacacctctggccattgggctgctatgaccctcccgcagcctcccatgggtctgttcacctttgctctccccaatgagatgaatgtttgcctggttcccagattccctaggtaatggctagtccttatcaggaggaccaggtcctgcaagaaatgtcccattgtccttttaaactgctgagtcacagaagttgaataaatgtcatttttctcctagtgaaagcatggtggaggatttgtgcttatttatacaggtttggttgtcttaaaacaatgtttcccggaatgcagctcactgcatcagacttaccctggcatgtttatttaggaagcagacctccgggcctctactctagactcactgaatccaaagccctggggtagggtcaaggaatcagtatttttagcaagcactttagtgtttctgaagcaaataatctacatctacatccttataatcataacattctagtgcaattgttaaggaggatgagtgttggggtaagagttagtagggttggaatcctcaatgtgtccttggacaagttaagcatcctttctcggcctcctctgtagtgcatccaaacactttgttcaggagagtcctgttttgtgcctgctgtcctggcattattatcaatagcatccccttccccaagtgtcatgatttaaatagcaactgacatgtataatttatccatactcatccgtgcaaggggaaggtggcaaacactgctgttgcctgccagtagtcattctctccttctccctcagttctattctgctaaaatgacagatctcagcccccccttgcagcataacatagagcaatctaatgaactgtaaacaggagttctgcttttctgtaaaaccttttttaaaagagaaactgagttgtcctgtgccttttgctcatcatccttactattcttcctacctgaatgccagatatggagttatattcttgttagtacaaggaaataagcaaagaacaaaagccatgcatgaaggatagctaaacagcagaagcttgatggagcctggatgtgacagctgccacatcatctccctgagctgcctcatagccctggtctgctttcttctgtagttattgaatatgagaaaaataagccttcatttggtcaagccatggtagcttggattttctattatgtgcaaccaaacctattcctaactgatacaaagatatgcgcacccacctctggacagtgtcataaggataaatgagagcagtgggtgaaaaatgcatagctcagtgcaggcataagttcttcatatatgatgatttgcaacaggaaagctgttttctcttccttcctgggaaggggactgtgttagtctgctcaggctgtcataacaaaataccacagtctgggtgtcttaaacaacagaaatttatttctcacagttctggaggctggaagtccaagatcaaggtgttggcaggtttggtttctcctgagcctctctccttggcttgctgatggccacttgcttgctgtgtcctcaaatggacttccctctgtgcatgcccttccttggtgtctctctgtgtgtcccagtctccccttcttatatagacaccagtcatatagaattagggccccacccttatgatcgtaatgtttgaaccttacttttcttgtgatagttaattttgtatgtcaacttgactggacccagaaatttggtcaaacattctgggtacatttgtgaggtgactttggatgagattaacatttaaattggtagatggagtaaagcagcttgccctctctgatatcagtggccctcatcctatgagttaaaggcctaagtagaacaaaaagcctgtccctccctcaagtagaagagcattcttcctgcttgatgccttggaattgaaacatcagcttttttcctgctttcagactcatactgaaacatcagttcatcctggttctaggccttcagccttggactagaattaaattgccttccttggtctccagcttgccgattcactctgcatatcaatgtcttgccaaccttcataatcacacaagccaactccttataataaacctctttctacatattatatatacatcctattggttctgtttctctggagcactcagactaatataaggccctatttccacatgcagtcacattggatgttaggacttcaacatgaatttggagggcagcatgattcagtcggtaacagggatgcttctacctatttccttgggaagaggtttcctcacatgaatatgacgtgccacctcctgcccaccctgctagctctggcctattgtttgcgtcattttggcctgctggtagtaaatattaggtaatccttacacttaacatttaaaaactgctaatagaattatatttggcttgcttgaattgcaaaggcataagaaaaaagcagcttctcaaacaatatcattgtagcttttatgtccttaaaattccctgtaaggcatttacagaagctgaatgtctttaaacatgtacatgctgtcctcaggaaaacaatccttttgtttctatttgctagggcctaatcagtgaagggaagtaagataggagaggctgaggaccccaccctactaggcttttcatctggctccttgaaatccaggattgaatggtgctttattgtgcttggttctctacttgtgaaactctactagtttcacagctcttgcaggatttcttaaacttttcaaaataaaaattttattctctttaaaaaaatctcttcttttgctatgtagttagaatcctgctgggcagagatgttgaatctttagtcattggcttgactataccacaaaaaaaaatgtgttttaagcttattgacatggctaaatgaggggttgaactatgacatctcagagatttctctgcagttattaagataatgtacctgagctgcgcatggttgtgcctgcctgtagttccagctactcgggaggttgaggctggaggattgcttgagcctaggagttcgagcctgctgtgagctatgatcacaccactgcactccagtctaggcaacagagtgaaaccccatctctttaaaaaaaaaaatacctgaaaacacatttgaattatatagacaaacaaaagcttcatgtgaggatcaccagtgattttgacttataaagggatcaagtccgtggctgtgtatgttacaggtagttaggcatgagtggggcaggagggggctctcccccacccactagaaatgtcgagtgatagttcggcaattatcgcattgcctctatagaaatgataattcggcagccacggagagtcaagccactgatggtccacacctgttaacattaaaaatgttcattgaatgtagaacccagggaaaagcagctttttgggcacgcatgttaagagacaaaatggtgaagtatgacattccgggaacacatgccaccggaaaaaggaaaatgcctcagatgggcatgcgtataactccctaaacacgctgcctgctcaattccagagggcaagaaaagcattgcgcatgcgggaatcctacacctttcgtgggaaagaggcgagcctataaagttgtaggatcaagattaaagcccccccccccctttttttttctcttttctcccttggaccttcaggtgcccactgggtctcttccaagtgaattttcctttctttcctgttctaacgtcttttaaaatagacttccattcttgctctggaacttgcttcagtctctttttctgctttatgcccctcagttgaattatttcttctgaagaggcaaggactgaagttgctactgacccgtatggatattccggccataactcggggtaattcgagtctcttccactgctaacatgtagacttgtttgctgcttctaggtctggaatctgcagaggcccgactggaggaggacagtgatgatcaaaatctagagtccatacgaattgccagcagagctaacaaaatcagatttcctccctccaacccccatgcagggatcactttaggtagtctgaactgggaatcaggaatcgacctgtttcctatgcacataagcattctaatgcaagtgatccagagagcatttgttgagaaacggcaacatccaaatggacaaatacacatggccaataactagatgctcaaaaccactggtatttaaagaagtgtaaattaaaatatgattttttcgacctatccgattgggaaatatttttctaagtggtaatatccagcacagacaaagacacagcagatggccctctctcttgctaaggataggaagaagctgtgacttatctgggagatgggagggaagggaagaggaggatttgaccatgtgtattaacagtcttaacatgtttctatccctttgactcaggataatacttggaggaatttatcataaagaaataatcagaggtgtgtgcaaagttgcaatgatacagatgcaaggttcattgcagagtcatgtattacatgaaaaatagtaatagttttatatgtccaacatgaaaggtatttggtttaaatattacagtgtattaactgatgaaaaagtatgcagatgttagaatgataaagttcaagagtatataaactcgtgaggatattataagtgatactgagtagaaaatcaatgtatatctataaaatcatttctttatacttttctatatttttcaaaatttctgtaatgaacatgactttaattttaatagttgaaaagataccaattcatgttacttctaaagatgggggtgcggggttgctgctggcatctgtcaggcctgaatttgcatttctatcactgatagagtatgatttggggcattaatctcttggatttcagattcctcaactagaaaattgaataaatgcaaacagtgtgtaggtttgtcatgatagataattgtgtaaaatgcacttgacacataatatgtatgtataaatattggattttgtctccctttcaaatttttgaaattagaaaaagtactcactctctggccagagatcaatgaaaaagagtttatttcttttacacaaaccatggaatttcaacttatttcttttggatccttttctgggaaaaggtttcttggggcctatttgatactgttggaagtgaaaactggaatttgtagttggcactctaattggctaattgcagcctctggtcttatttgttttcccttttgtcagttttaatagtttgggatatttaaataatctttctcctcctatcattttaataaaagaaaattttaggattcttgtctagaaaggcaataaagctcaggctgctaaaatgttccatctccttaaaatcccacagagtcccagtgcaatttataatagcatcaaaaatataaaacactaaggaataaatctaatgaaaaatgtgccagtgttcaacaaagactacaaaacaatattgagagaaattttaaaaagacttaaataaatgtacgttgttcatattttggaagatttagtactgtagagatatcaattttccccagattattctatatgtatgtttgccaaaagctataaactagaatttttatagcagcactatttgtaatagctaaaaattgacaacccaaatgtccattattagtagaatgaatggatctactatgagatattccccaaatcaaatactatacaacaatgatgctgagcagttcattacatgcaacattatggataaatctgaccaacactatgtggcacaaaagaagacacacataaaagaatatatactgtatgattacctttatataaagtttgaagatatgcaaagttaacctatgtgattagacatcagcattatggtttttcttgtgggagagtagtgaccgagaaaagagtacatggaagtttctgaggtgctggtaatgttccgttttggatctgggtgctggttacatgattgtgttcagttgtgaaaatgtatcaagctctatcctaatgatatgtgcatatttgaatatatgtgaaaagtatatacttcaataaaaagtataaaaagtttatagtttccttaaaaagtataaataagataaagagtgctgttgtagttatagtttcttaaaaacttcatgcttgggctgggcatggtggttcacgcctgtattcccagcactttgggaggctgaggctggaggatcgcttgagcccaggagttcgagaactgcttgtgcaagatggtgaaaccctgtctcaacaaaaaatacaaaaatcagccaggcatggtgtctcatgcctgtagtcccagctacttgggaggctgaggttgggggatccattcatcccaggaagtcgaggctgcagtgagccaagatagtgccactgcattccagcctgggtgacagagagagaccatttgttcctccagatgctctagggaaaaattctatcccttgtctcctcctgcttctggtggctccaggcctcccttggattctggctgcatggtctgcaccttcacatggctgtcacctctgtgtctgtgtcttctgtttcttataaggacatttgccattagatttagggcccaagcagataatccagggtgatctcatcttgagatccttcacctaattatgtcttctaaaaccctgttaccaataaggctacattcatagcctctggtgtttaggatgtggacatgtctttcggtaacccacaatttgacctagtacaggggcccaagttcataaatgaaaacaaaaacgaaaccataaacccaaaacctgatgtggctccagtaccagagatgttttcctctttagtaacaatggtcaccactgattcttgcacaatcattcagggcaacttctgaggtgcccagcccagacctcccttaccaggctggtgcctcctgtgatctagggctgtattggctgctaatagctcatggcgccctcttctgcagagaattgcctctagtcagatggaagctgcttcaatctagaggttatatacccatctcctcacctccctctgaaggccaatgactaacaaggggtacaaaaaaatggtaccttgcctgaagataggaccacctctgtggtgtaatttgtattccagggctccctgtgggatcacactggagccacctgagccacatcttcgtttaactttcttcggagccccattcagcttttttgctccctttctcccaagcccactcccctaataaactactttttcaagaatccccatctcagactctgcttcttaggaacccaaactaagacaatgcctctgccataggcaatagcctatttttcccgccagaccctgctgcttagaatccttcatttgtttggcaggggcacttatgtgagaattttaaagatgggaccattcagtaagctgaatctcaaagtcctgatcctcagtggttttactgacaaattttataaatactcagcttagaagatctacatcatcgataacaatgagagtgtgtccctgagacctggagacctgcttatgaccagccatgcaaaccaccggaaggaacacttgttttaatggtggaggtgaaatgatcagttcagtaacccaaggaaaaatttttctaccccttaacatgtaatcttatcttcctaattatgctttacacaagacagtaagaatgtatgatcccttggcatttaattctgcaagtcaagtaaactattagtccagcagaagagctgtccagacctcttggttagacattgttgatggacttgcaatatcatcaacatagctttttaaaaaatagcctttatttttattttttgtttattttttaagacagagtttcactcttgttgctcgggctggagtgcaatggcgtgatctcagctctctgcatcctccgcctcctgggctgaagtgattctcctgcctcagccttctgagtagctgggattacaggcatccgccaccatgcccagctaatttttgtgtttttagtagagatggggtttcaccatgttggacaagctggtcttgaactcctgacctcaggtgatccacctgcctcagcctcccaaagtgctgggattacaggcatgagccaccatgtctggccggttttaaataaacaatatatgcttatatgatttggctgtgtccccatccaaatctcatcttaaattgtagttcccataatccccatgtgtcatgggagggacctagttggagaaaatcaaatcatggggataggttttttttcatgttgttctcatgatagtgaataagtatcatgagatctgatggttttataagcagcttttccccattttgctctcattcttctccttcctgctgccatatgaagaaggacatgtttgcttccccttctgccatgattgtaagtgccttgaggcctcctaatccttgtggaactgtgagtcaattaaacctctttcctttataaataacccagtctagggtatgtctttattagcagtgtgagaatggactaatacaataaattggtgctagtagagttgggtactgttgtaaagatatgtgaaaatgtgaaagtgactttggaactgggcaggtaaaggttggagcagtttagagggctcagaagataggaaaatgtgagaaagtctaaacttcctaaagacttggagggctccgaagacaggacgatgtgggaaagtctggaacttcctagagacttgttgagtggctttgaccaaaatgctgatagtgatatggaaaataaagtccaggctgaggtggtctcagatggagatgaggaacatgttgggaactggagcaaaagtgactcttgttgtgctttagcaaagagactagtggcatattgaccctgccctagagacctgtggaactttgaacttgagaggtgatttagggtatctgatagaagaaatttctaagaagcaaagcattcaagatgtgtcttggttgttcataaaagcattcagttttattgattcacaaagatttggtctggagttggaacttatatttaaaagggaagcagagcataagagttcaaaaattttgcagcctgatatgtgatagaaaagaaaaacccattttctttttatttatttttaatttttttattatactttaagttctagggtacatgtgcacagtgtgccggtttgttacatatgtatacatgtgccatgttggtgtgctgcacccattaactcgtcatttacattaggtatatctcctaatgctatccctccccctcccccaaccccacgacagaccctggcgtgtgatgttccccaccctgtgtccaagtgttctcattgttcaattcccacctatgagtgagaacatggagagtttggttttctgtctttgtggtagtttgctcagaatgatggtttccagcttcatccatgttcctacaaaggacatgaactcatccttttttatgattgcatagtattgcatggtgtatatgtgccatattttcttaatccagtctatcattgatggacattcgggttggttccaagtctttgctattgtgaacagtgctgcagtaaacatatgtgtgcatgtgtcttcatagcagcatgttttataatccttcgggtatataccagtaatgggatggctgggtcaaatggtatttctagttctagatccctgaggaatcgccacactgtcttccaaaatggctgaactagttcacagtcccaccaatagtgtaaaagtgttcctatttctccacatcctctccagcacctgttgtttcctgactttttaatgattgccattctaactggtgtgagatggtatctcattgtggttttgatttgcatttctctgatggccagtgatgatgaacattttttcatgtgtcttgcggctgcctaaatgtcttcttttgagaagtgtctgttcatatcctttgcccactttttgatggggttgtttgattttcttcttgtaaatttgtttaagttctttgtagattctggatattagccctttgtcagatgggtagattgtaaaaattttctcccattctgtaggttgcctgttcactctgatggtagtttcttttgctgtgcagaagctctttatttaattagatcccatttgtcaattttggcttttgttgccattgcttttgatgttttagtcatgaagtctttgtccatgcctatgtcctgaatggtattgcctaggttttcttctagggcttttatgggaaaaccccattttctgaggagaaattcaagctggcggcagaaatttgcaaaggtaatgaggagccacatgttaatcgccaagacaatggggaacatgtctagggcatgtcagtgaacttcaaggcagcccttcccatcacaagccaggaggcctaggaggaaaaaatggtttcatgggccaggtccaaggccttgctgctttgtgcagtcttgggatttggtgccctgtgtcccagcagtggctaaaaggggccaacatacagctcaggccattgcttcagagggtgcaagccccaaactttggtggcttacacatggtgttgggcccacaggtatacagaagtcaagcactgaggtttgggaacctccgcctagatttcagaggatgtatggaaatacctggatgtctaggcagaggtgtgctgcaggggcagagccctcatggagaacatctgttagggcagtgtggaagggaaatgtgaagggggagcccctacacagaatccccactagggcactccccagtggagcagtgagaagagggacaccatcatccagaccccagaatggtagatccactgacagctttcaccatgtacctggaaaagccacagacactcaatgccagcccatgaaagcagccaggagtggggctgtaccctgcaaagccacaggggcagagctgcccaagaccatgggaacccaactcttgcatcagcgtgaccaagatgcgagacatggagtcaaaggagatcattttggagctttaatttgcctgcccagctggattttggacttgcatggggcctgtagcccctttgttttggccaatttctcccatttggaatggctgcatttacccaaagcctgtatccccattgtatctaggaagaaattaacttgctttctattttacaggctataggcagaagcgacttagcttgtctcatatgagactttggacattttgagttaaggctgaaatgagttaagactttgggggactgttgggaaggtgtgattgattttgaaatgtgaggacatgatatttgggaggggccaggggcagaatgatatggtttggctgtgtcctcacccaaatcttaccttgaattgtagctcccataatccccacgtgtcatgggagggacccggtaggaggtaattgtatcatgggggtggttttcttcacatgctgttctcacgatagtgaataagtctcgcgagacctgagagttttgtaaaggggagttccctcacacgtgctgtcttccctgccaccatgtaagatgtgcctttgctcctccttcactttccaccatgattgtgaggcctccccagccgcatcaaattgtgagttcattaaacctctttttctttataattacccagtcttgggcatttcttcatagccatatgaaaatggaggaatacacacgtagaatttcaaagatgtcagtcactatagctatatctcaatcaacatatcattggagtaaaatgagattgtctacaaacttgccctggatatagagacatgaggaaaaaggcctcatcagagctgggaggtgagtgggtgtctaagaagaggaatgtatggtactatcttaggtgtgatcttcttgttggtggcctgaaagccagactagctgagcagaggtagatatttctaaagcctaaacatttaggagcagatgccactgtatctatacacattttcacaaaaaaatagaaccaccaggcctcagggcaaggtaactctaggaatttgagcagaaggagtgtgtgatttttcttgcaagtgctctggcattagtgtgagtgagccatttcctgtgtccttcattggtaccgtgattttcaagtcctcttttcttttctctgcaggtcttctctctcctcacttgtttgccgtaacccctaactgagctctatgtctatgtttacttttagcttcaggccccactgctgagaacttcttgctgttgttatgtcttagttcagatgccagaaggggaatcctactggctgtgttcatctcttcctgctgggtcgcatcatcttagctccctggccaggcctcaggtatattgccttggatcaggagtccacccctaatcctgtcatctagggtctgactgaggtggggattgagggagaaagtcatgcatcacaaaaggcggccactaagggtcacctcttccggctagacagtggctgggagaggcacagtgactgatgtctagtaccaccacccaagcttctgcaccgtggcatgctcatcccacagtgcagagaggggtctgacaagggcagagtttcttcatccccaagagatctcggtggatgaggaagccatggtccactatccttgggggacaaagagggacaaagcttcttctgtcatcattgtaaattagtgaagatagcccaggcacaaggcaggaggcctagccctcccagagctgcagtgttcccttcacatctctgagtttcttcatagtgttagactagagcctttccagggttccctttacctgtgaactctctgactccacagtgtagtatcgcagttggtagagagacctgagtttgacaatagttcctcctctttttcccttgcacctcaaaagttaattctcaatccagcagccaaaattacccaagtgaaatattaattggatcaggacacttttttgatcaaaactctctaaagaattcttatcttatttagaattagagtcaaagtccttcatgcgagctaaaatgcctttcataatcttggctcctcacctcttcccccacataaccacatgatctcctccacaatcactctatgtagaagagcaggcccccagcactcctggtccccctcccctgttttggctatatccatagtccttgaagccacaacagctggcatcattatctatgtatttgttcattgtctacctcctacccacccacacactagaatataagtgtcaggagagaaggaactttggcttattccctcttatatcctcagtgctcagaacagtgtctagcacacatctggtgattgaatgagtggagacatacatcagtaggtattggggatgaggggagaaaaagtcatatctttctctcatccatcacaaggctcatgactgatacccatattacaaaagaaagattaacaagagaaaagcctaacagaattatttaaattgtatctaacatgagaaccttcagaaatgaagacccaaagaaatgggtaaaactgtcctttttatgcttaggtttgatggagaatggatagttgtgtagaaatatgattgaacagatgggggtaaggtttaatattgaactggggaaacttggtgtattagtccattttcacactgctaataaagacatacctgagactgggcaatttacaaaagaaagaggttttaattggacttacagttccatgtggctggggaggcctcacaatcatggtggaaggcaaggaggagcaagtcacgtcttatgtggatggcagcaggcaaagagagagcttgtgaagagaaactctcgtttttaacaccaccagatctcatgagacccattcactatcatgagaacagcatgggaaagactcgcctccatgattcaatcatctcccacagggttcctcccataaaagtaggaataatgggagctacaagatgagatttgggtggggacatggaggcaaatcatatcactttggatgctttttgttaagattcttcttggcatctctgtgtctttgtttcttttctctgggaataaggcaggatatctgttgcatgagggttttataacttactttcaggggaagcaggtcagaaaattcttttatggctagctttcacacaaaaaggtggggcagtgtctgagggtgacctttctgcttacgctgtcttctcaatttccaggaagccatattttgggggcagtgtgtcctgtgctccatcagggacaagcatcatggttttgggctgtccacatcctctgttgggtgtggtattggttagacacatcgtctgcctcacactgtggaagtcactgacggtagatcctcttcttcccagaccctggcagccaggatgtgggcatgtgacctaggcttggcttggccaaatggatcctagcctgggatcaggatccagtaaagaacacactgagggatcttaacctttacttgcaacacctaaggatatcaccactgggctccttggggaatcccctagtgctgttcctattggcttcagcttcccatgcattctcagtgggcctctgataatctcctaataaacctcttttttgctgtagggagccagagtagatttgtagagctggcaaccaaaggaaccttgactggaacaagagatgccattaattttaggctgctatgcttttcttctttttgttattttgagttgcctgatcagtcaattggtttaccttgaagactggtttgtatgtttatatgagagttatactacagaatatggagttttagtttctcagttttccaacttgctttagaggagacgatgaccttattacaaaatcatctcattcagagaagcatagggtcttgtttaatcttccaaccttcagggtgtcagggtagagtctagaacactacctagtactcagcttacatttgtggagttggaataaaaaattagggaggctgagctaaacatacttgtcaggatgaactgccacattaagggacgggtcgaactatgagactctaaaacagcagttctctctggatgatggtaggaatgatcacagaaatctccctctgacatctgttagagcatcttgatgtttgctatactactgagtcccttttaggcggtctcaaaaaggacttcattttctaattttagtgctggtgcttctcccaaattactggtttattcttgagtttttaacttttaggctctacgaattatgcaagtcagccattctcaaaggtgtataattggcatttcaggcaggacaattatttaggactgaagcattgcaggataattatccttcctgaccctaaaccacaaaatgtgagaagtagccccaagttcttgtgaaaaagtgaatgcgatctaatagtttaacctttccccctccagatgggcagcatctcaggctgatcatgttttcctctttgctttggccattaggtggcatagcaccaaatctgattaagtacaaatttttgcaatatccttacaaatggataatctaattttctttattttttagttgaatttctttatccttttttgctcctctttatatattatatgcattttgcaaactcattcaaacctttctttaataacaaaacggagtccaagtaaaataaaataacaaaatatttggatagtgtgtgttgcttgtagatgctttaaaaaaaaattcaacatctgtgtcagtctcttgcttgagcttttctttcctaagatgcttcaggaataaaattagttgcagaaacacgtctgatatcatttgtctattgcacctagcagtgctgtgagtgagagagccttctgtgtgctgataatctcagtcatttgtaaagtgatttctcagagatgatctgttgagtataagcagaaaaaataaaaaaggaaattccataaaagaaagcagcagcagcatatatctggcaaaacccactagcccagcagcagaggatgaataaagacacacagtctcactcttgaaactgcaggagagcatattctgggtaggatgtaactccccagacatctgttggtgacatctacagtcagacatgcatcattgaagggatctgtaaattatatgggggacagtttaatgatctacaaagcagcacatccagccagcacagacaacatcttcgaaatagggcaagagaattaatttagatgggagaggagagggtgctgaggtgggtgagtggagaaagggctctatgggagccctttatgggaaggactccttggagacaataaccttaaagcgagagtaagatagagtgaagaggatggtgctgctttgtgtatttcagggaggattaagcaagagacaggaggctagcacaacctggggaacagagaagaaaatggtccttttaaaaaggagggagataaaaaaggaaactggattccaaagaacaaaggcaagttcttccctctgtgccccatttatttaagaagactaggcaggaatagtagaattctaaatgctttctgaaaaatattctaagacatcagctttcaaatttttattgtataaaaacatttttgtttttaaaataaatttatgcaaagttccactagaatgtgaactccatgatgacacgggtttttgtcccattgttaactgttatatccccagagtctgtcacatagcaggcactcaataaatatttgttgaatgaatgaatgagtaggtatgcctttgggctgggaaagatctttacctctctagcagagaccagagctccttagggaaagcactttattttagggaaataccttgctaaatcaccttcagggagaaggcaaccaagaaacagctaaaggctttttgtaagtaataaacttgaatttgatggtggggatgggttgcaaagagaagggaggaagaaggatggagaggctgagtaacaaggcttgtcatgaatagttatgactaattctcttaaattacgtcctgtgaggtacacaggaaactccttaccattattcccaattctacagtaaaaaatatagcctagacatctcctttatgtgtgagatatggaagggcagtgctatggtttttttattcccaccaaaatgcatgctgaaatttgattccccagtgtggcagtgttgggaaagtgaagcctggtggaagctgtttgggtcatggggttggatcccttatgaataggttggtgcccttctggtggttgtgaatgagctcgctctctgacaagactggattattttttgcaggaatggattatttcctgctagagtaggtcattataaagccaagatgcccctccagtcttccctcttcacacgtctgcttcccctttgaaattctccaccatgttatgatgcagcatgaaaaatcttgccagaaggcagggccatgcccctggacttcctagcctgcagaactgtgagctaaataagcctcttttctcacaaattactcaggctcaggtattctgttatagcaacacaaaacagactaagaccaggtatcaacaagaaagcggtcaagtcctttgtttgggtcaatgccaagaagaagataaaaaacaaaaggaacaaagaagccatatgactcagattgacagatgtagtaaaaacaaagtatgagatagagatgactaccagaaggtaagcctctaaggaattgaaaaaaaatcttggtgagggtcgggggagcaggttgtacttctccttggttgtagaataggggtttggtttgctcttatctggatattaaaggacatctgctatcaggggtacatgaaaagcagatgaaacggagctgctgggaatgaagagagacacccagaacactcctcctttcactcgtgccccttcttactgtaccccacctgcctttgaagcttttacttgctgagaacagagaaatgaaaggaagttcaggagagtcatgggtgggaggaggagaagagctgaggaatgaggcactggggatttggattcaaacccatggtatagtagggatattcctgagatagccatatccccagtttccaacatcatggatgcgtctccttttcttacctatacaacagggataaaaacacctgccctccagagtactggaaagattcatatgcatttatattaagggagagccacaaaacttgagattttgagtgtctagactccttcacggctaagaccccctcctgcacaccaacttaggtggggcataaaaattcgtgcttcaggcaaaaaacaagtaactccccaccccctgaaatccattgaggtcacttttaaattgtcaaagcaggaaatattgcatccttaactgctaaattgtacctaaaaataattcttagcaacaataacaaaaatccttagctgcaaaaggggtccatagtgggttcaactcttgttagctggctgttgaagatgatatccctgaatgtggaaaactgaatgtcccagaatggtactcccttaagagttctctttcgtagttcctccacacacataccatttattttgggccagagactgcctgcaatgagtctgggacaaatgggaagatatgtgaactgagtatattcaaataggccctggaaggatgcctgaatcctttacatgagaggcaagcctgaagaagtagatgtcttagtctgttttctgttgcttataacagaatacctaaaactgggctatataatttatttgtcacagttatggaggctgaaaagtccaagactgaggggctgcatctgatgagggccttcttgctggtggagactctgagagttttgaggaggtgcaaagcagcacatggtgagggagctgagtgtgctagctcagatctctcttcctcttcttataaacccttcagtgccactcccatgataacccattaatccattaacccattaattcattaatccataagtaaattagtccattcacaaggacagagcccacatgactcaatcacctcttaaaggccccatctcccaatactgccatgttgggagttaggtttcaacatgactttcggaggagacattcaaaccatagcagtggggcataaggcctgatgtagaggaagaagaccatggggctattggctgtgagggagcgccctctcctctgctcctccctattgtcagttttcaatgtactgtcaacaactcacacctgagcgtgagagggagtgaatcctaagccatgcttcccacatcagtgttaatcttctcaagccaatgtggctaaggtagttcacttgcacctcaggctactcatttcccattccctccttaaggcaaaggagctaaatagcagataacgtggctgtggggcaggaagtgcatgaaacatcacggtggaggaagaaaagtaggggccaggcaacccagtgggatggggaggttaaaggtaattgagagagggttgagggccctattctcacttcctggcacccagtaggaagggccaatgagaaagctcaaagtcattcactccttacacgattgactcattcacccactcttcttaggtccatgaaccaggccctttatagatacttgacacatgaaattaaaaaaaattgtgtttcctcttggcaacttcataaatgagaggcaaacattctctaaatggaatgtagtcctgcaatacgccaagtacaatttattcatttattgatcacctactatgtggcagacacagtgctgggcttggggaatgtgcactcaaaaagtgttatcagagcccatgaaaaggtgaggcatccaatgcctccccttagagtcttccctgagcgcctattctaggctgtgttaaaggctggaacccctttttcagagtgttattcttctcctaccaccaaagagcctgacaggacagtgtagctgtggggtggtggcggcactcgggggtcctggccagacaagcactaggagacgccagcattctgaactcactgacctgaaggtgagttttcagggggatccgggtaagcaattgccatattcttattccaaacttaccaggagacctggacaaatttgagttggtgtgggggttagagggtggggatggtgatggttattgtgaaaactagatttgctatatgatgtaaatatctttgtgattaaagaagccatttaatttaatctccacttaaaatattataggttggcattttccaaattgggtctgaagaacacttgtatcttcacagaaatttgtttcaaaagtattctgttttatgataatttttgttttgtcagttaaaccaaaccagcttttttttttttttcatttcttaagagatggtcttgctctgtcatctaggctggcctcaaacacctgggctcaagtgatgttcctgcctcagctacccaagtagctaggactacagatgtgttccactatgcctagctgattattttaatttagttttgtggagatggggtctcattctgttgaccaggtgggtctcaaacttctggcctcaagtgatcctcctgcctcagcctcccaaagtattggaattataggcatgagccactgcacctggcatcaattccttttaattacagtactgctcagtgtctccactttgataaagtgcaccgtgaatctccaaggatacagagattttcaaacttgcttatgtagaacctagactaattttcagaaaaataaagttgtgaaatgtaggtctgatatttcagcaagttttgggatgccattgtttataattttgtgtgtccctgaattttcctggaaagaaacatttattaggtgcttagcagatgtgccaaaaaaaaaaattactgaggtctttgtggaaacttgaaaagcagttatcgaagggcttttcgtggtctaagaactataactatgagaagagcagttatctggagaatgagttaggtcttgagctatagggaacacccagagactgggtattggggaacctgcccccgacagtcatgtaggttcttttctattttcactaagcatcagccgtttagagaaataaagggacagagtacaaaagagagaaattttaaagctgggtgtccgggggagacatcacatgtcagtaggttccgtgatgccccacaacccacaaaaccagcaagtttttattagtgattttcaaaggggagggagtgtacgaatagggtgtgggtcacagagatcacatgctttacaaggtaatagaatatcacaaggcaaatggaggcagggcgagatcacaggaccacaggaccagggcgaaattaaaattgctaatgaagtttcgggcacgcattgtcattgataacatcttaccaggagacagggtttgagagcagacaactggtctgaccaaaaatttattaggtgggaatttcctggtcctaataagcctgggagtgctatgggagactgaggcttctttcatccctacagatcgaccataaaagatggccgcacccaagggggccattttagaggcccaccctcagggactcattctctttctaaggaatgttccttgctgagaaaaagaattcagcgatatttctcccatttgctgttgaaagaagagaaatatggctctgttccacctggctcaccggcggccagagtttaaggttatctctcttgttccctgaacattgctgttaccctgttcttttttgaaggtgcccagatttcatattgttcaaacacacatgctctacaaacaatttgtgcagttaacgcaatcatcacagggtcctgaggtaacatacatcctcctcagcttatgaaaacgacaggattaagagattaaagtaaagacaggcctaggaaatcacaagggtattgattggggaagtgataagtgtccatgaaatcttcacaatttatgttcacagattacagtaaagacaggcgtaagaaattataaaagtattaatttggggatctaataaatgtccatgaaatcttcacaatttatgttcttccgccatggtttcagctggtccctccgtttggggtccctgacttcccgcaacaactcggcgactattcttcagctcccttttatgacagtcaacccaggcccatggataccctgcctttaccaggaatccacacagtagactgtgtctgttcacccactgccggctgctctgacagaagccatagatgtccgtcctttctaatcctcacatgatgaggaaggctccagaagtgcaggcaggcagccattgatatggatctcccgctgtagcccgctgcaagagcagagccatttagcaggaggctgcttctccagctggcctggatgtatcctcaggtggtgaaagacccatgctaatagacccagatgtaccagggctgggagcacgggtgaatcctagataggcctctgtgctcattgccggagtggcttaggattctccaacagtccaacagtgactcctgagccgtcttgaactcagagattacacattttagaactgatagacctctggaaggcattaataccaccttctatgttttacaggcatgttgttttttacagggattaagtaacttgcctaactcctttaggcctctgttttctataaaacaaaaagtttagcgtcaggaaaaagagaaacaaatattaagcacctatattttaccacaggttatttttcatatgatctcaaatatcacaaggacactatataatttagatatgattgattgctctcatcttccagaggaggaacccaaaactgagattgtcttttgtccaaatttccatagttagtaagtgatggacacagaattgaatgccaattgtgtttgatacttcacctccacctcttgtcatgctaccattccaccaagaaaagatttgtttcagaagttcttgacttgatgttttcttaaggagaatctttggagaagggcaaattcagctgcaacacatgaagcaggggcagctgtcctgacctttggctttttggtggccctgcccactgtggatgagatgaactgagttatctgagaaaaggggattactttgttccaagtactttacaagcaggaactcatgtaatcttcctctcaagggaactgtgaagtagatacttatgctaaccttataggtgtggaaactgaggtgcagagaggttgtgtcagaactgacatttcaacagaggtgttgttcctttagtgtccttgctcctaactgcctttgttacacctgagcatctctggactcatgcaatgctttgtgttgcttgggatgggggccctcagggctgactacaatagaagtcagattggcaggaggaagaagcattgggtctctcttgtcaagagctaattattccagatacgtgggccagctcagaggtgcagagcaagaaaggaaaccatccaaacttctgaggaagagaggagattgcatctgcccagccagacatgatgttcacttaaagccttcattgtgttagagccttaatgggggggggggggcgggtgggatatccaggagggcacaagggagaggggaagcaggtttacttcctgcaacaatggaagtgttcaggatgggctttgtcccagtggcaccaaggaacattgcaagtcttccaaaaggaacacatactatagggtaaagttagtgctagctactagtgctggctactacaaaaagcatcattcatgtaaacatgtagtgcatggtgattcaggactgctattcacatgaagcacagtgtgaaggtgcccatggaattttgctggcttcctaatttttcactagaaagcatgtgaagaatccttctctgatggatgcagtggttcctgcctgtaatcttaacgcttttggggggccgaggtgggaggattgcttgattccaggagtttgagaccagccctggaaacatagtaagacccagtctctacaaaaaatttaaaaaatagccaggtgtggtgcacacctgtggtcccagttactcaggaggctgaggtgagcagcttgcttgaacccaggaggtgaaggctacagtagccataatcacatcactgaaggccagcctgggcaacagagtgagatcctgtctcacccccacctccaccaaaaagaaaaggattcttctctctctgtctcctccatccaggtcttggttaattttattgctgactatccttccaggttaacctcagaacaaaccagtagtgaagaaacataaaagtacacatgagttttgaaatgggttaggtattgggctacaagaaacacccagtgatagcacaggtgcaggctccagtggattgaggacaattcatgaatttacctattccatttatctacctatttattccaccctgatttatttcttctctcagggaacattaactgacatttaccaagtgccgctctgccaagcattgggaagaataaaacaccatggttcctgttctcaaggttaggaaaaaaaagattcaaaaccaaccctgcagaatagaaaggcacacatggcagtggaaaaatgtactaacttcagtgcagacacctaggagggcgtgacgaggggcagagagtgggaagagaatgggtgagaacattccagcagaaggagttcattcagggagccagggggaagcagccagatggcagattctaaacaaattcagccgatggtttccattttatacaggctggtgcccaaatatgaaatgagataatgctcatgataaggtttcataagtggaaaataagcacctccccagttgtagatattagaggttatttctgggctgtactgaggtaaatgggcttttaacgcaggcagcagggctatggttagctctgaggtgccagtggccagcaaagctgctagaaatcctgaaaaaatttctgccagagaattcctgaaaaaattacttgtgagccaacaatgaccactttcctttattgggcaatgtgctaggcacttggtcttcagtcctcatgtatagcctggaataggtctgattattctcatgttatagacaaggaaacttcggctgctgggaataactcatttgccagggtcacataggtaggacatgccaaaacaaagattcaaaccatgttcgcccaaccccagtggaatctttctcctttggggatgtcagttttatttgcttataagtaaaaccctgagtaagctggaagcaagcttggtcagagaataatagtattacagcattatttctctttttggggctgccttttcctatctgtacagagaaaatgtaacatgttagcaatgttgtcttttgtttatggagttatttaaaaaatgatttggtagccaggcacggtggctcacacctgtattcccagcactttgggaggccgaggcaggcggatcacgaggtcaggagatcaagaccatcctgactaacatggtgaaatgctgtctctactaaaaatacaaaaactagccaggcgtggtggcgggcgcctgtagtcccggctactcgggaggctgaggcaggagaatggcgtgaatctgggaggcagagcttgcagtgagccgagatcgtgccactgcactccagtctgagtgacagagcgagactcagtctcaaaaaaaaaaaaaaaaaaaaaaaagatttggtgttttctacaaattttcaaaatggccaggctttactttaccagtagaagatagtaaactttatagaaaaatgaaaatacagttatgatagtactgtggtttaaatgcatcccccaaaattcacgtgttggaaacttaatccccaattcagcagtgttgggtggtggggcctaccaggtggtgattgggtcatgagggcggcgccctcatgaatggatgagtgttgttattgtaggagtgggttagttttggagagagtgggctgttataaagcaagtctgaccctggcactcttctttttacacatgcttgctggcctatcctcccttttgcacttctaccatggcataatgcagcctgaaggccctcactagatgtcagcctgttgacactggacttcccagcctccacaaccatgagctaaatacatttcagttttttttaaattatgaagtctgtcaattattctaggtgaagtaactcaggaatggaaaaccagacattgtatgttctcagtcatatgtggttgctaagctatgagaatgcaaaggcataaggatgatacattgggccgggtgcagtggctcgtgcctgtaatcccagcactttactgcccgggctgaggcgggcagatcacgaggtcaagagatcgagaccatcctggccaatatggtgaaaccccgtctctactaaaaatacaaaaattagccgggtgtggtggcaggtgcctgtagtcccaggtactcgagaggctgaggcaggagaatcgcttgaacccgggaggtggaggttgcagtgagctgagattacgccactgcactccagcctgggcaacagggtgagactctgtctttaaaaaaaaaaaaaaaaaaaaaaagaaagaatgatacgttggactttggggactcggaggaaagggtgaggggtggtgaggaataaaggactacacattgggtacagtgtacactcttccggtgataggtgcaccaaaagctcagcaatcactgctaaagaacttattcatgtagccaaacaccacctgttctccacaaacctattgaaataataaaagtaaaaaaataaaagcaatggagatggaaaaaaggaaattacgaagtctgtggtattctgttatagcagaacaaaatgaactaagacagtgttttaatcctgagctatgtcatatggatttctataaaatgaaattgaaaattgatatctaattgtatttagctacccagaaaccaagatccctagtgttacaaaaggttctctacacctcactttaaaaagttattatttcccattaactttcttaattagtagttttcttttggatgactggcttcttagtccactgttgctgctgtatcagaatacctgagactgggtaattcataataaacagaaatttattggctccaagttctagagtctttgaagtccaagattgagatgccagtatttggcaatggatttcttgctgcattattccatagcaggaagtagaagggcaagagagggcaagaagggccaaaccagcccttttaaaatggcactaagctcactaatgaagttggagccctcgtggtctaattgcctcttaaaggcctcaccttttatttatttatttgtttgttttttgagacagggtctcactctgtcacacaggctggagtgcagtggcacaatcatggctcactgcagcctcaacctctgaggctcaggtgacctccaacctcagcctcctgggtagctgggactacggatgtatgccacccagctaattttcatatttttggcagaaatggggctttgccatgttgcccaggctggtctcaaactcctgggctcaagcagtcctcccaccttggtctcccaaagtgctagggttataggcatgagccactgtgccctgctaggtcttacctcttaatactgttacaatggcaattaaattttaacgcaagttttggaggggccaaacattcaaatcatagctattggggactgtttgaatctgaagtctctctccagaggcttgagatgattaagacttgagatgactactggggactatttggatctcaagtctctctccagagacttgagatcattaagtttcagttgatgtctctgactctgtcccaaacagtaggcatataactcattcattctttgaggagcttccaaggggttttcttcaaccactgctcatctcctatcttggctgggcagggtagggcgagtgtgataaatatattaaaaacaaactaatttttttttggttaataaaatttaatcctcccacacagcagtatgattaaaaagaattttctctagggctggggtgatgtgattttatcaaaatggttatagtaatatctgtgtgcattaattttctattgctgatgcaacaaattaccacaaattgtgtggcttaaaataacataatcttttaatcttacaattctggaagtcagaaatctaaaatgggtctcactgggctaaaatcaaggtatcagcagggcgtcaatttttcctggaggctctaggggagaatctgttttcatgtcttttccaattcttggaaacaattcacattccttggcttatggttccttcctccatcttggaagccagcaatgttgcatctctcttactattcttcccaggtttcatttccctctgactctctccttctgtctccctcttccatgtttaatagtccctttaaccacccagataatccagcatactctccccttctcagagcctttaacttaatgttttagttagggctttccagagagacacaatctgtagcatggatggatggatggatggatggatggatggatagatagacattagatagatagatagatagacagatagatagatagataaggtagatagatagatagatagatagatagatagatagatagatagatagataaatgagaggagattcattagggaattggcttacaagataatggaggctgagaacacccgtgacagaccatctgcaagctggcgaaccagaaaagccaatagcgtggcttcatggtgaaattattagtcagaggccaaaggctgaaaggcccatgggctgctggtatgagtcccagagcccaaagtcagagaatttagagtgctgacgtctgaggacaggagaagagtgtcctggttccagaagagacagcaggaacttgcccttcttatagcgttttgttccatccagacccccagttgttggatggcacccacccatgttgagggtggatcttcctcacttagtccactgacccacatgccagtctcctctgaaaacaccctcaaagataaacctggggcagcccaatcattctaatcaaatgccaaaccacctgtgtttctctttgaacagaggagggataggctcagtgcttactgaagcattgagaataattaatgctttaccagctatctgggtatcccttaatctggtcaagttaacagccaaaattgataatcacacatattaatttaatcatttggcaaagactcttttcccatgtgatgtaacatatcaccgttccggatgttaggacttggacatctttgggagtcattattctccctaccacatggggtgtgtgtagggggttgggagaggagtttagggagaggaaatctataatgcaaaaaggttttaaggtaaggacactattgatttattctcagcactcaccttgctcttcctagttaggtcttaaggatatttttagacagcccccttttcttagctgtttacacacagactccatgagctaagggaccatgccagtgtcatggaaaacactgtttctgtatggtgatgtcaagccagtgagcccactcgttttagaaaaaccagaggctcaggggatgggaaccattatttattgagggtttgctatgtgccaggtcatttccatatattattttatttagttgtcataacaaactgataaattgggtacttttgctctcattttacagatgaggaagaaagaaatttagagatgttaaggaaactggcctagttaataaaagtcagtaaccggcagatctgggattcaaactctactcagtctggtttaaaatcacctctctttctgtacttataaacatgcttctttccagaggcccaatgacacgccactagtttaaggcaggagcttaatcctaacaccagtcctaacaccagtgccttttcctttctgcagtactaatgaatctggtatgatcagaaggattgggaccacagatacagaattaagtcaactatagaaaaaaaagggcaccaggacttacaatttgactgaaaactataaagaggtagattttaactcaggaccttgatgtttctagagattgagtgtttctcttgttttttggagtgtatttgttcctaaatctctaagccttaaaaaatattttttaatcttatgatgtatttatcactaattgcaattgggatcaaaccagtctggctgtgtatactgctgaacaagggactttggaaaatttctaggcattgggtataagctgaaatagtagacctcagaagacccacaaccaatttaaaaacagattgatagtgcctctcatttacacgagctgaaagtgctgaagtctctgattctctgaaatgattaagctttcagtaaccaaaggcaaatacaagaatcttttaattgtgcaaagagaataatactggctctgcatgctcattcactttaggcaagtgtgtgtgtgtgtgtgtgtgtgtgtgtacatgctggagttttattattgtttttttctttttggtttcctttctttctacccttggggactatttcatgctcaatgggcatggcaggagcaaataaaaagagtaaaaagaactacaagtttgcttgcaactcattacctccagaggttgcttctactgtctaggtatggtagatgaatcatctccagggtatcagaaagccctcactgaatgcacggctctagaaaatctgatcccaacctctcccctgaacctaagaactgcacagttggattaggaatcccacagcatttataatgcttgatggcagagcatgtaaggattagaaaggtgaagaagagaacccttgggacagttacccaagaggtagcagtagggcaggaaacacaacatagaaagtgcaagccccagttggtaactgagagaggaaaaaaaaattgtgaagtgcaggcccagacactctacttcctgaaatgattggcaaagtcttggcaggactgtctgccttcattgtgtagcctttggagttcttgagtattcccagaagagcagaggcttagcaggaaggacacatcagagcagagctggttgcaactagaggtctcacactctacaccattttattttcaagccattagtcttgagcttcccttatgcttttcattatgaactaccctagcaaatactatggtttaaacgtgtctccccaaaggcatgctttggaagcttaatccccaaggcaacagtgttgggaggtggggcctaatgagagatgatcaggccatgagggcagtgaaataattaatactgttatcacaggaatgggtttgatatgaaaggatgagttcagaatcctcttgctctctctcactctctgcccttctaccatgggattatatataaagaatggcctcaccagatgccagacccttgatcttgggttttccagcctccagaactgtgagcagataaatttctgttcattatcagttacctggtctgtagtattctgccatagcagcacaagtggactaagacaataaacaatcggagctgggctcaacttgcttcacaaaatggaagaatgatgtggcagattaagtatgaccatgaattctttgacacactttctattccttttaacctgaatgtgttctatgactgcattgatcagtagaatatgacaaaagtgatgtcgggccattttctaggaccaactctaaagatctaagcaacttccacttgctgtttcttagtttccactctccatactgtgaggaaatccaagcagcctcttagatagactcgtgtggaaaggaactgaggccctcgctgacagctacacctgagctctcagacaatgtgagtgaatcaacttggaagtggatcctcctgcctcagatgagctgctccagatgatgccatgtatacagatatgagctatgtcctgtgtgagttcttcccaaactgcagattcacaaggaaaactaagaactggtgttttaagccgctaacttgggggtagcttattgtggaacaatacagcactagaacaaaggagattgggcaaaatcagggctggaaactacactgtttaatgccaccccatggcaaaactttttatctcactgagcccagaaatcttattagcagtactctaggcagtcattaccagtgcatcaaagataatgtgtaaaatgaaaccatttgtcatctctcagctaagtggtaagtgattaaggatgatggcgtagatattagacacgctaaaccctgaactttggtcacatttcattccagagaggtagaataacaactcatgatatggtttggctctgtgttcccaacccaaatctcaccttgaattgtaataatctccatgtgtaatgggaaggaccttgtaggaggtaattgaatcatgggggtggatttttcctgtgctgttctcatgatggtgaataggtttcaggagatctcatggttttataaaggggattttccacacacatgcctcttgcctgctgccatgtaagatgtatctttgctcctccttcacattccgccaggactgtgaggcctccccagccatgtgtaattgtgcgtcagttaaacctctttttctttataaatcatccagtcttgggtatttctttattagaattgtgagaatggactaatacagcccccatccaggaacctgcttggaatctgattgtgtcatgaaactagaagttgtcacttctgcctttttcatgggccactaagtggtggtcactatggacttagtctaggtaccctcctggtcaaagatgaatgcagttacccttctcctcccttcaccacctgaagcagattaatagaggtacaacttgttacatacagtgactctaccacaagtaattgcctgtattcttatcagtctgctagggatatcctgcccctgcatcaccccacacagtgcctggcatgtgttgctattgaacacatttgttgaatggatgtagccaagggatatctattcccagtacccagctcctagcacagagcctggcacacagtgggtgctaaacaaatgctcattaaattgattttgatggcattatttctaaaatagcagcttgatgaacaagtggagtctcaccctccctaagaaacatcaactccaaacagaggcataatagagccagagctcaaagtaagaattattcacaaattccaagtgcctcaatccatgggttttaatgaaagtcattctgcaattgagaatgttgtagtaattacagacaagctaatatctctgccatatggtttgaaagcaggtctgaattctgaaagctactatcagcagttttattttctgcttctgcttctctgcaccccactccctgcctgtctttgtctctctctttgcttttatctctttatttcaacctcatattccctctcttccacaccattctccctcattggtcctcctttaccaaccccaagccacatttgtaaagcatttggtatgaagcatccagtggttctaagaagtaattgcggtgcccagaacgggtcatgacatacacctgacccagtgccaagaaagagaaccaaggatgctctgaccccccgtgaactgactgtgtcactctctcctccaagtgtggttgcatgactgaaagaaaaagaatccagttaatctctctgctactggatcactcacgtgcagcagttcacaaccctggctgcacagagaatcacctggcgagctaataaaaagtactgatgcctgggccccacttccccagagattagattctgaattaactggttcagagtagggtctggacatcacattttataaaaatctcaagatgatcccagtgcggagccaaggttgagaaccctgccctggatcattggccttggataaacaatagtgagatttggtctctctccttttatctacctgttacacttggaagtaagatggtacaaacaattattattgaagtaatgccaaattacaaggtatccactcacctagatgcaactgtttaataaaataactacacatctgttgagctcaaagtgcattcatgaatgctttgataaagtcttgtaaaaactctggaaagtatgctgggctggagctaatattcatattttgtaaatgggagcttagatactaagatcatatagcaggcatgtcttctcccaggtcagtgctctttctactgcatcataatattttctttgccctgctttagaatagttaagagaccaggctcctaactatctaacagtcaagacttccctctagcctatcctaaaattcccactataggggtaattgccttgggataggcaacaaaagtgggtgccttgtttctaacaggccattgctattcttccctagaaaggaagagcctggagtctttctttagcaaattagttgatgagattaactaatgatcccattggaaggtcagagaagcctgaggcaacaatgaaaggggcgatgtcaggagctcataaggaagcaccagctacttagttaggcataacagacaggaatagagtctggtaccagaaggggtcctagagtatgaaaatttggagtggggatcccatgttttttggagacatgcttgctgatttaggatcaggtgttgagaaggagcaaggggaaaagacaacaacaacaactgccaattggtagtaaaaagcaaaacaaataaaaccagttcaattcatccaaacctgagtttcttaccatcagcctgcttgaacctcaatatccctatctgtaaatgaagacaactccaccttgcctaatgtttcataatgttgttttgggaatcaagtgagatcatgatgtgtgtgtactttggaaacaagtgctctatccctgttgagcatttttatagtgaaagtcacgtggtgtagtagaaagactagtgaactaagtgtcaaaaagcatggcatcctgtcccacctctatctcttgctagccatgagacaccagacacagtgctcagctggttccttttctgtgaaatgggataataattacagtgtcatccccgaatacatgaaatatcattggggaagtttgtcagaaagtacaatacaaactattaattgctacataaatctaaggcaatattaggaataaaactcatatgcctttccagacataccctttggatggaatatttgtggactccgagcccttcaaaatgagctttataatgatcttctcattgtccatagcagtctactttcattcataatgtgaacacattgtcttgtagtctttgtggctggcctcccaacatctgttccaactgaaataattctctcatgttattcatggagatcccattccctttgacagtgattggtctaggaatgggcaggtgacccaagtcctggccagtgaagcatgtggcaaagtctggcttaagcttctgggaaagatgtcgtgtttcagtaaggatacagaggcaggccaatcccgttctacctctggacattgtggagcatggctataatacctggaactgcagcagcatcttgagtccatgagggaagctgactcttacaactgatatgttgtgggtgacagagggatcttggagaatcattgagctgttgaatcacccatccctggaaccatcttaggagaggtttacttctaaatctctggtttcaaagaaatatttttttgtttgaatcaattggagaagatttttaaaaattgctgcagctaaaggtatcttaactgatataccatgtaacttgaccagtttattacgtaattcctgatacttactttatcttattaacgctttctctttgtgaaaaaatagctcccatcctccctattaaaaagtgatgattgttaatgtcagtagattgagcaaacatggaaaagtttaatgaagaaaatgcaaattgtacatagcctccctacttagagaaagttatgactattattttggtcatttttttccttggtgttagcatagctttaatctgagtttactcgtttgaaatgtttgcaaagaggatgagaaagctcatgaaggaatttgctagactcattctgcttctataaaggatactaagaaggggataagggtgggtggggacaaacctgggggaccttgctgagaggaaacacctaagagtatgagaggcttgggaggagaaagtagtagagaagtagagagaaaattctcagagacaaatgtaggcttcaagattttcccaaaggttggttgtgtcttttgctggctttcctcgtcatataaaggaagatgtgcttttcctttttcactgccttcttctctatgggctgagtccagcagagactaaatctgacccctctgtctggaggaagcgaacactggagccagctggcgccttgcctattttgagtagctcatctaaatgcatctcagtgatctaattaatcgaggtgagaagtgcgcttcgaggaatcaggctgtcaagcttacagggatgctcagaattcagagaatgggaaggatcactagacttggtttatagttaaggttgcaaactgatggtgtatgtgacccatatagtcattctgtttaggctacatagtattaaataattgggaaattttggataccatgtagattttagatttctctttcttttttttaaattaagatataacaatgttgagctttcacttcaacatagtaaaacgttagctggaggtgaattggctgttccttaatccatgacataggctcttgtgttcagcacactcacatgaggcgtgcatgggtactgacattcccactcttttatttatatccataaccagcctggaccctgctataaagatttgagttttcattcttcaaggtctagtgtctgagcaacagagagatttcatttcacttgccagatatgatcaagtggttatggctcctgaagggatctattaaagaagactccggggctcattaggaaagagctgttgattggtgatgtctgccatgaacaccagatgggggctcattgtcatctgcagtctaaaggtcacccactaaacattttgaggagaagacctgtaggacttccagaatgattttggagaaacagtgggccaggccatctgagttctaattctggttctaccatagcctagcatgagcaggatgatttattattctagtctcaagtttcctcacctgctaagtgggcttggtgatcctttccctatctacattacagagctgctatgggaattaagtatgatactatgcatagaaagactgggataatcataacaggtcttgctattgttgttctcatgtattgacttggtttaaaatccttctctgctcattatttagcaaaaattgaaaattagttcctccccaagacaatttataaatgtaaattttctgttttagattctgagttactttggaaattgtacatattttcttttatttgaatatgaaaccaggaggagaatctatacagatgagtctatgtgtaaggcttattttctgggtgtaagaggtcagtgttgggagtcacctcagctgctgtgaccactccttcctcacttccaattataaataataatagtcatgattttaataatagcagatattattactcagtgctacatgacatttcagactgtctcattttttttttttttttttttttgagacagagtttcaatctgctgcccaggctggagtgcaatggtgcaatcgtagctcactgtagcctctgcctcctgggttcaagcaattctcctgcctcagtctcccaagtagctgggactacaggagcccgccaccacgtcagctacttttttgtgtttttaatagagatggagtttcatcatgttgaccaggctggtcttgaactcctggcccaggtgatccacccgccttggtctcccaaagtgctgtgattacaggcatgacccactgcgctgggcccagatggactatctcatttaatccttatgacaaacccacagttaagtattattgtccccagatgacagatgagaaaactgaggctcaggaaattaagtaaactgtccatggttcacagttatacaatggcagagctgtgataattataatcacagctaacattttgagcactcacaatatgccaggcattgtactaaaggtcaatatgaactatctcaattgctctttgaggcaaccaggttagttatatactttatcatccatgtttttatcccatgaaaaattgaagcccagagagattaatcaacttacccaaagtcacacaacttgtgtgactcataggcaggcaggctgattccagaatctgctttacttcatcgtctttgtcttgagaataagtttggccagcctgagcctctgctgtgtccactgggctccctggcctgtgcaggctgtggtctacattcagcaacttccagggggagaaagggagaccaggaccaggaagaaccatgaatatatctctggaggaaacaactatttagagactctcttattgtccttaagtgccctgtaggaggtctgccatgtgggtgccccggagaagtaaatgctaacaatatagttgtacattgtcaggatttgcagttggatagttactctgttcctgataagatgaaaaatgaatccttagaattctatttgtgaggcagcgttggagaaatgctcggtgtagactgaatgtggccccccaaattcatatggtaaagtctaaatccccaatgcgatggtattcagaggtggagcctttggtgggtaatcaggtcatgagggtggagccctcattaacgggattagtgcccttataaaagagacacaagagagcctgcccctttttatctgctctcttccatgtgaggacacagcaggaagatgggcatctaaaaaccaggaaaagggccttcaccataaactagatctgttggcgccttgattttggaattcccaacctccagaactgtgagaaatttctgttgcttaagcaactcagcttatggcatatttgtgatagcagcccgaaccaaataagatgtgctctatttttgaaatctttctttagtacctgttagggccttgagccaaggcacaaagatcctcgatgtataaaatccatgttggagatctggtgggagctcccatacgggttccttgcattcactatcagtgccagctgcagctgcctcccaaaaagtcagctgtttggaataatccattccaactcaggaatcagaaactgtatctcagaggcattgagtttaacaagaacacacggttatttagtaggagaactggcactggaatctggattttctgacatccactttcatgctctttgctttacacgtgtgtggacagacaggtggatataatcaagaatatttattgagggcattccatatgctctaagccctttgtatgtaataactcaattctcataagcatagcaggaggtattattattattcccaattcacagttaaagaaactaagactcatagaggttagaatcctttcctaagtttgcacagtaaataagtttgaattcaaactcatgctcttaaactgttatgctatgtggcctgttggttctttgtgatggtcgcctgaaaaggctccaactctggaaaacagttgattgtgaaaattatcaaagtatcttactctgtttgggctgtcataacaccatactatagacttttggctaaccaacaatagaaatttgtttctcagttttggagacagagaagtctaagatcaaggcactggcagattgggtgtctggagagggtctgcttcctggtagacaattgacttctcactttaatcttacatgttggaagcggtaaggagtcgttctcaactctctattataagggcactagtctcatccatgggggcttcaccctcataatttattacctcccaaaggccctacctcctaatgccatcaccttaggggtgaggatttcaacatacgaattttgagaggacatgcacattcagaccacagcagtgggagaggcaaggctggaccgtatgtgcttggagttcttggtgagggcctgctgatgcttacgtaaggatgatagcaccatgggatttgcttgaaaagaaaataatctgttggttctttagtgggtggagatgtcaggaaatgccctcagttagggcatatattcatagaaatgccctgacttttatgccactgctgaaaaatatttccaatagagaaacctgtgaagatttcatgagataatatctgaaagtaagcagaggcacttagcagaaggtgctatctaagctcaagatataagtggtctcacatgttatttttctgtgaaaggagtctcacttcaaaataatgcaatacactgtataatggtcatgtagcacagaaataaatagggatcctggtgctatctcctctgcatagttaaggtagaacaaatctcactcagtagttgcattggtgttggcagtggagatagggtggtggtggcagcttcagttgggactggtgcagatgcaaggaaccctcatgggtgctcctgtcaggctacatctgggcctggctatacatgtgcctagctatacaggcagacagtacaactgcagttgctgaaggattccaaggcccacagaccagggcaggccaaatgtcaggggcttctcccttccttcccatgatcttgaactttgtgattgaattttttccctcttttcttgagggagatctgcattctgttgacctgtgagtaacttgtcattactgtagtcttctcattaaattctatcaacacaaatgactgagatatatttattttattatttcctaagcccaacacacatgctgagtggttcgtaaaattaaaatgaactctttcctcctgactgaatgtttgcatgtttatagggtgctttgctttaagaaaatccagtatgggtaattctgaaattgcaaaaacaggtgcttaagggatgaattatttgttttgcagaaggagctatctctgagttagagagtatgtgttcagctgtgtgatggaaatttttgctttaccaaaatttcatgtacatatgtttcacatgtgagtgctccataaatattaatatttagatgatgctataactccagctctgaaacagcatcaggtacaaaataagtgctcaggaaataatatttgttgaatgagtgcatctttctctgagtgccagacctatattcttagctatttattagaaatctctaccttgatatcctgcagcaacctgaaaatttatgtacacatgatcttatttcttttccttacagagcatgtttccttctctgtgaacagtatacatagagttttggggacgttggacagcctgtgttcaaatcctggctcccccttatactaattggtgaccttaggctattcactaaatttctccttgcctcattttcctcacctgtaaaacaactataataatagtacctaaattatagggtagtcttgaaggttaaataaggattagcatggatctgaatataatagcacacagtaaaagttagctactattatctcctattttagccaagtgctcttctgactaagttaaactttgttgttaagtttaccatctactttttctctccagatccaatgtgactttatcgctccctgcattttgttcatcctaatacttccatagtccaaaaatctcaattcgcttgaccttttaacacaacatctgaagaccaagctgttctttctaagctctgcttattctcctcaccatggcttgggggtccaccttccttagtacagcaatctaagcctttgatgaactgcttctgactccaaacccacacttccattccatcattagccattccttgccactcccagtcgccatgctctacccatactggactccttacggcttccagaaaacatcatagacttccacctctctttggctttcttgcctctctctgggatcctctcacctgtcttgtctcaccaataccatctaggtgtaggtttccttgatacagtcacagttctgtggaaataactgctccttcataggtaacccgtgaaacttgatacttaactcagttatagcacctgtcacttggtattaatcacaggtatttgtttacttgccctctccaccttcttctctcctcccactagatatcaactccttgagggcaggaaccatggattgtaagatctttgtctattttctgtgtcactagggcctacctaatgcataatcacagttcaataatttttttttatttttcccattatgacatattctcatgtccgctaaaaaacctccacaggaatacgtgacttaggatgtgacaatttcctgtactttctgcatctagcactaactcattgaaaggtttatgtacattatttcagacatttgcaaaatgtttaaaatgagatgtgagcaaataatgatgctgacactctatcaaaaccacagattttttttaaaataagagaagtaaacatactgcattggatgaaagcaaactacatttctgttttaaagaaaatgtagaaaaatttgcttctataaagaagcagtactgttattgtataataccttctgcttttacaggatgcttccccatcataatttccctttttgcttgaaaaaggaaactatgaatgcataaagatggtgaggagagtaatttctcttttgaacctaagggaaaagcacatgcatctaccaaacttccatttagctttgaaggcagaatgatttttcacttggaatccaacagaatttcaaagatgttcggcactggtgcgcctcttggagtggtgcaaaggcaagcataaatctgacagatctgagggctgcacgcatgcatttcacagggcgcagtgtgtaggggctgggcgggtcctctgcctggcctgggggtgagggccatctggtctcttttatccctcagtgctggcttaaaggctgtctttctgataatgttccctccttcctgctctttacaatgctgaaatgagcatcttatttttcacttgttctcgctttccttaattgtctccttgggatcttgtaaactcattttagtgtctggcccatagctgtttaaaggcacacgttttaaccggatagtttatattttcttttcttttttatctgagtttatttttcttcaaaactaccttggatggtctgccagagtcagagatgctccttggaggcttggagactctcaaaggaattagtccaaagtggcccagactccatggattaactttaagccatcctgcatgggctgccctgctgaagccagcgcagtttcacaggctgggacagcagccggacttcctgtttgagtttagaaatctccgcctgatccccctcctccccactcccttcctctcgaggtccctccttctatccaccaataaaacaaagaaacctgagaaattatctcagaaagaagagacttctcaggccttgattgtcacactggcctggagccaagccagagcctgcctcaaaaatggacccaggaggcaagctactggaaggcagtcaaacacccccaaaaagtgaggtcatatggcatcacccccattgaccacatctcatttgctctgctttccttttattttaaaggaaaaattaaaagtcttctaagacattgtctaggctggtaataaaactctagaatgctttgttcatatatataacaaaattgagagcaaatgtgtgtgtacatgtaagtgtgtgtgtctgtatgtgtaagcgtgttacaatctggctagtaaaatgatctcagattgaagataccctcaaatactgaggatgatgcttataattttctaacatgctttaatatttttactactcatgtatatatgtatccacaaacagtattatatactgtttagtatgctgcaaatttttataaataacacctcattgcatgtgtcaaatatttcataaatagaatcacaaaagcagaatgaaggagctggtatgtcagcattctgcttatgtgtttttctgattatgatagtctcatgagaagaggattttatgcattctcacttgaaatacagcagatgccaaccatgaagggaatgaaggtgctaatttataatttttttaaaaattgtgcaaaaagaaagtgaaaagaatataagtgcgagcttagcaataaaaggagtagtaaaaacacccacaatatggggggtgggtgtggagtcctttcgtctgtaaccaaggaggtctgtaagaaaccacggaagtctctactaatttgaaattccaccagctgagaaataaaacactgctgggttattgaagaaaggtcttggcaccttatgcacgggaaatgaaacttttcgttttgcaagtggcttgtagattggttatttaaccaccacccatccccccagtttttcaaaggctgaagaacaggctggagttagagatgtggtttgcatagattgcctcgctgacagcactagatcaccagtgaaagattaattaaccaaattgaaggcagcaaagaaataaggttttagcaaatgacaaagccattaatggagcaatgtttccttccactttagctaagctctccgtttttaattagcattaggatgttttaaccgcagctatttaggaggaggctctttctcatgtcaggtgttgcatcccggagtcagagctggtgagagaagataaaatccgacacatccaccttaagttggaattttcaggagtgtcctcatggctccctgcccttccctgcactcacagccttgaaagctggggccctgacttgggaacagctgtcttctcccattggaccactacagtcagttgctgatttggaggacaattctgaacatatgaagcacattactggagccaaagctctggatttcctcgtttgcagttgattgataggaagcattcaaccttggatgtgataaaatcaacccactaacccagtaatgcatcgagtaggaagtctttcctctttagttagctattttaagtggcgagtgtttctttagccctatttctcaggactccacaagcctttgtaatttacaagtcttcttctacctaaatggtcagaatgcatgcttttattttatggactggtagactgaggcaaaggagtgttttagtcaagttaatgttggggactgtggggggcaggaaaaagaatgtcaaatctcctgtggcttggccagcggctgccagaatattgggccagcacctgctggcgcgttagtccataggatgggcatggtggagaggatgatcaaaacaggagatgctttcggtgaatgaggctggcaggtcattagaatttcaagaagattctagaggagaatgaaaaggtgaactttaaaagtggtggcagctagatttgctttagagaggaataggcattggtggaagtgaaacaaggtggcgattgatgttgcagccatgttttttagaagctgtaatactgtcttgcatctctgctcctcctgctccttcagcttggctaactccgggttgatcatcttcccaggtttggcttgcacccccaacctcctcccactcctctctactcagccttaggctgggattactcgcttatggtccctttagcactgtggcacacccctctcctaggacagatggcaatttatctttattttctctcaaggctgtaagcttcttgaggacagagatcatgtaatcatccttgcatcctttgacctatttattaaacaactattttgtaccaggtactatgatgaaggcttgataattaattctcacaacagcccaattaagtaatactctcatagtctgtatgctgagaggtctaggcatagagggattaaaatcaccttcaaaaagtcacacaactagtggatggtgaggtacagatggagacataagcgatgacctcagagccatcattatgctacatgcttccctagtggaccctcaacaaatacctgctgaattgaactggtaatttgtattgtgcttattttattgcacacagtaggtgcttaattatttgacttcagaactcattcagattaaaactttcatataagtctatgggagtaatttcttttgggtcctaatatggtgaatgtaagaaaacttcagtgttaacaccaggtgagcactggatgcgtgtctttgcaggtgttgatagattctgaagacacgtggtttcattggtaaaggtacctaccttgtattatttcatatcacatcttcattactgtaatttaaaacagaatgagaaatgctttcttccaggaggagagtggatctgagggaggagatgaggaaagagaaagcatcttcttatgaagttaagactcctgaaactgtgcctcaattcatctgcgtgtggtagagaatctattgatgcagtagcctttcaggggcagagactctgtaactggttatgagagaccttcccaggtgcagaaggggctggtgaaagtattatggtcacattgatcaatcgatgtccatttgtactctaggtaacctcttcttagaagccctcttcctggaattttcctcccctttgctcaccctaaatgcagtacttctctagccttagggcctcaaaacccccctgaaatgaccaacctcatagtcatttcagttcctagtcatttaaaaccccgctacaatctgtgaaagaaaggaacctgagtgccaatcttagagttcaaaaaagttctactcccattaatacatccaagttaaaaaggaagctgcttagtttggccccaagccagtttgccttcaccccctacttcttactcttgacttttaacaagggaaacaccctgagtcaaatcccacagcgtgatgcttgggaatgagactgaaattgagagaagagtcttgagctttcatgaggttccaagttcatttatatatttcctccaacactcagcacttagccttagggccagcttccttgggttccctttgtgtgtatcctcatggtcctgagttacaacccatgggattaagttctcatctaggcaggctcctttgaagatggaaaaacaaataggtgaattaagagaatatttacatatctcatagcatcttctgcccaggtagggtggctgctctgctctctctcctccacctctctttccctgccttcttgaaaaggacagtgcctcacctacccaccaggccccagagacatgtgaataacagtaggggagagggagacacatcagttcatgggccagaagggatcaagttctctctcacctctcctgaaatgcttagcctagtctctactgctaagcttcccggatggttaccactagacagggtaaccctttcctaacccattcatgggcaaattgaaatacctaacaccctcttccagttcacagctggttcgaatcaactccgtgacaaaaaaaaaaaaaagccagaaggcaaggaaactcaagcattttcataccatatctctttttctttgacaatagaagcagctggtattgagacttactatgtgctactatgtgttaagcatggggatagttttctcacaaatattattccatgtaaagctctgttttacatacagttcaggtatctaaagttcagagagattaagtaacttgcccaagtcttatgatggatcctgggtctctttattcctaaattcaagctcttctcatgtactcctttccaagctatctgctaccaatattgcccttagacctgggcaagagcagcccttttcctaggcctcaagcctaagagggcccctccccatgaggtagtctggggaacaaagggctgtgcctatccaaggcccaactctccctgaccaggcccccttaaacattagacaatgttgtgaacactgaggtccctggagctccctgaccagagcctcagttgtggttgccagatttagcaagtaaaaatacaggatgaaatagaaggtgcatagttaaatttgaatttcagataaatagcaaataaaattttattataatgtcccatgcaatgcttaacacacagttaatacttaaaaatttttttgtgatttatctgaaattcaaatgtaactgggaatcctctatgttttgtgttttgtggcaaccctagcctcagtccacttacaggaccaagtgagcttctgctcagtggctatttggataggatgttgtattagtcagctcagactgttgtaacaatgccacagactgagtggcttaaagaagagaaatttattttctggaggctagaagtccaaggtcaaggatttagccaatttagtttctggtgagagctctcttcctggcttatagatggctgctttctagatgtgccctcccgtggccttttctctgaggtcactaggagggaggaagaagagacaggaatagggagagaaggagatctctcttttcctcttcttataaggccactagttctattaagttagcacctcatccttataatatcatttaaccttaactataccctaaagtccctatctccaaatatagtcatgctgggggttaatacttcaacatatgaattttggaagaatacaaacatttgattgacaacagatgtacacaaagctaagacatgtacactggggtgtcccaaagcatgcaaacaaggcccctcacagtgctagaagcagcccagagagggagaaaatagggattgactgggaacttccatttatacttttgttaggggtacacctgctccccaggccccatttaaagcattgattgctgtattttctgactaacttaatttttaatcataatttccttggccaattcagttcataaagcatgaacccctttgctttctttcctcgatctggggtggtatggtgggtgctagaacaagctactcagagttccactctaaaggaaatttaaatgttgctgcagatggctaaattggtttttcagcctatgtgtgtgaaggtcggagtttttggctttactgtgcaaaaggtgcctgatcatgcataagacactgcacctctctgtggcccattttttaaaattcataacatgtgaaaaatacttcagcctcttagagtggatgtgagggtgaaatgaaataacacgtgaaagtatcaaagtacttggcaggtgtcaggcctcataaatgtagttgaatctgaataggcaggaacagacctgggcttttccttctgtggaggctcagctggaccacccacatgtcagtttccagcccaagggtccttacgtcttctgagaagccaagatgactccaagtcaggagctccaaattaggaggtcctgcaccatggagtgtggttgtcacctccacccaagccttctgggacatttcagtaaatgaaaacagggatatagccttccagaactacctgactctaacttggcaaactcaaaatggatgactcaacactagggaaatgaggagactacttctatctagagggaaatgaggagactacttctatctagagggcaaggaggactctgcctatgaagatagggctaagaaacccaccacaacagaggcctgaattatccccctgcactttattaagactgctcagatcaagtcttactaagaatcattaaaaacaaaaaaaaatcggagtgcttcccagtgccaggtgagtgctctttcttgagcatgaatagcaaaacataaaaagagaaatgcacatcattcccaagttccagatggcacgccagtgtgctcagggcttctctaaccttctctagtctgtgtcttcagtatccttccaagtttcttcctttcttctttccctagcaatccctaggaacagctttgagagaggtggtttactttgatgcagagagcatgaatgctagtgtcagaaagacctgggccccaacactgctctgccatcttctggctaagtaatcatgggtaatagacttaactttttccagcctgtttcttttttgacagtgaattttatgacctacctttacctagcacagtgtctgcccctagaaggtgctcactaaatggtggccattattatcaaggatgatgcttattatatatgatacatatagaagtatgctttatgctcaagcagaacaaatgaatgaatgaaatacgatctgaaagtttccctttgcaaatttcacagtttcacaaagaagcagaagatagccaaggagtaacctggaggttccatcttgccctgagcccccagattagatgctcttttgagtctctggtgtttgcgattcaggctccagcttagcctgacagtgtgagacacacctggcttctgcttgcttattgtgtttgtctgtccccaccccctccatccttcattgatctgggtcacgttttgctgtaaccatccctgatttcctgcaggaccaaacaagtaggcagcaatagttaggaaatgacaggcacatacctttcagatagcataatcaccctcatgtctggtacaagtgccctgacaagcttgctgctgtagtccactatgcaaacagttccacccgccgcaggtgaaaagaattctacttttcagggctggggaaggctgattttatgcaacagaaggtgtttaattattcaggatactagtgtcttttttagttcaattattcaggggtttctgagtacatgactgtaaattcagcatttgctggtcgtaaagcttggacttgattggtttagatccaacctgctcagtatgtctctcaaacatgacagtaacatggacaagataaatagacatcccttcgacagagaatcaagtacagaggaaaatttatctttgaaaaattttgattcacagcttctagccaatacaaatggaatgcttactttcatgatggcctcctccctttcaaaccaacactcacacaacaattcttggaaatcaataaacagctgtttctgtataatgaaagacatttattttagatttacctttcccccactcagatagtattgtatgtatctgtcttgaatatttaaaattaagggctgcttgcttacctgtcagggtgccatgctttcctatctcagatgagaaaacaaactaaggacaaagtaccagggattccatgttctcttttggagaaatgatttctttagcacagagacacgtgttaccctaagaaagcagatcttgactgctgctgatagatactttattaaaaattcaccgcctatctcatttgctgtgctgggttctaatgaaaccttctataaagcgatatctagttatttctcttggattatttattcattcaacaaacatcaattgagcttctactatggtatgttaggttgcataatgggagtacaacagtatatggatcccagttcctgtccttggaaagcttacagtgaggctcaagacaaacattaattttaaaaaaagaaagaaatagcctggagccaagaaggccgaatgggaacagctccggtctacagctcccagcgtgagcgacacagaagatgggtgatttctgcatttcaaactgaggtactggtttcatctcactggggagtgccagacagtaggtgcaggacagtgggtgcagtacaccgtgtgcgagccgaagcagggcaaggcattgcctcacccgggaagcacaaggggtcagggaattccctttcctagtaaaagaaaggggtgacagagggcacctagaaaattgggtcactcccaccccaatactgcacttttccaatgggattaaaaaccggcacaccaggagattatatcccgcatatggctcagagggtcctacgcccacagagtctcgctcattgctagcacagcaatccgagatcaaactgcaaggtggcagcgaggctgggggaggggcacctgccattgccgagttagctgtttgattagggaaacaaagcggcgggaagttcgaactgggtggagcccaccacagctcaaggaggcctgcctgcctctgtaggctccacctctgggggcagggcacagacaaacaaaaagacagcagtaacctctgcagacttaaatgtccctgtctgacagctttgaagagagcatggttctcccagtacgcagctggagatctgagaacaggcagactgcctcctcaagtgggtccctgacccccgagtagcctaactgggaggcaccccccagtaggggcggactgacacctcacacagccaggtactcctctgagacaaaacttccagaggaacgatcaggcagcagcatttgcgtttcaccaaaatctgctgttctgcagccactgctgctgatacccaggtgaacagggtctggagtggatctctggcaaactccaacagacctgcagctgagggtcctgtctgttagaaggaaaacgaacaaacagaaaggacatccacaccaaaaacccatctgtacgtcaccatcatcaaagaccaaaggtacacaaaaccacaaagatgggaaaaaaacagagcagaaaaactggacactctaaaaatcagagcgcctctcctcctccaaaggaacacagctccccaccagcaacagagcaaagctggatggagaatgactttgacgagttgagagaagaaggctcagatgatcaaactactctgagctacaggaggaaattcaaaccaatggcaaagaagttaaaagctttgaaaacaaattagattaatggataactagaataaccaatgcagagaagtccttagaggacctgatggagctgaaaaccaaggcacgagagctacgtgatgaatgcagaagcctcagtagctgatgcgatcaactggaagaaagggtatcagcgatggaagacgaaatgaatgaaatgaagtgtgaagagaaggttagagaaaaaagaataaaaagaaacaaacaaagcctccaagaaatatgggactatgtgaaaagaccaaatctacgtctgactggtgtatctgaaagtgacggggagaatggaaccaagttggaaaacactctgcaggatattatccaggagaacttccccaatctagcaaggcaggccaacattcaaattcaggaaatacagagaacgccacaaagatactcctcgagaagagcaactccaagacacataattgtcagattcaccaaagttgaaatgaaggaaaaaatgttaagggcagccagagagaaaggtcgggttacccgcaaagggaagcccatcagactaacagctgatctcttggcagaaactctccaagccagaagagagtggggaccaatattcaacatttttaaagaaaataattttcaacccagaatttcatatccagccaaactaagcttcgtaagtgaaggagaaataaaatactttacagacaagcaaaagctgagagattttgtcaccaccaggcctgccctaaaagagctcctgaaggaagcattaaacatggaaagggacaaccagtaccagccactgcaaaaacatgccaaattgtaaagaccatcaaggctaagaagaaactgcatcaactaactagcaaaataaccagctaacatcataatgacaggatcaaattcacacataacactattaactttaaatgtaaatggactaaatgcttcaattaaaagacacagactggcaaattggataaagattcaagacccgtcagtgtactgtattcaggaaacccatctcatgtgcagagacacacataggctcaaaatgcagggatggaggaagatccaccaagcaaacggaaaacaaaaaaaggcaggggttgcaatcctagtctctgataaaacagactttaaaccaagaaagatcaaaagagacaaagaaggccattacataatggtaaagggatcaattaaacaagaagagctaactatcctaaatatatatgcacccaatacaggagaacccagattcataaagcaagtcctgagtgacctacaaagagacttagactcccacacaataataatgggagactttaacaccccactgtcaacattagacagatcaacgagacagaaagttaacaaggatacccaggaattgaactcagctctgcaccaagcagacctaatagacatctacagaattctccactccaaatcaacagaatatacattcttttcagcaccacaccacacctactacaaaattgaccacatagttggaagtaaagcactcctcagcaaatgtaaaagaacagaaattataacaaactgtctctcagaccacagtgcaatcaaactagaactcaggattaagaaactcactcaaaaccactcaactacatggaaactgaacaacctgctcctgaatgactactgggtaaataatgaagtgaaggcagaaataaagatgttctttgaaaccaacgagaacaaagacaccacataccagaatctctgggacacattcaaagcagtgtgtagagggaaatttatagcactaaatgcccacaagagaaagcaggaaagatctaaaattgacaccctaacatcacacttaaaagaacgagaaaagcacattcaaaagctagcagaaggcaagaaataactaagatcagaacagaactgaaggaaatagagacacaaaaaacccttcaaaaaattaacgaatccaggagctggttttttgaaaggatcaacaaaattgatagaccgctagcaagactaataaagaagaaaagagagaagaatcaaatagacgcaataaaaaatgataaaggggatatcactaccgatcccacagaaatacaaactaccatcagagaatactataaacacctctacgcaaataaactacaaaatctagaagaaatggataaattcctcgacacgtacatcctcccaagactaaaccaggaagaagttgaatttctgaatagaccaataacaggatctgaaattgaggcaataatcaatagcttaccaaccaaaaaaactccaggaccagatggattcacagccgaattctaccagaggtacaaagaggagctggtatcattccttctgaaactattccaatcaatagaaaaagaaggaatcctccctaactcattttatgaggccagcatcatcctgataccaaagcctggcagagacacaaccaaaaaagagaattttagaccaatatccttgatgaacattgatgcaaaaatcctcaataaaatactggaaaaccaaatccagcagcacatcaaaaagcttatccaccatgatcaagtgggcttcatccctgggatgcaaggctggttcaacatatgcaaatcaataaatgtaatccagcatataaacagaaccaaagacaaaaaccacatgattatctcaatagatgcagaaaaggccctggacaaaattcaacaaccgttcatgctaaaaactctcaataaattagatattgatgggacatatctcaaaataataagagctatctatgacaaacccacagccaatatcatactgaatgggcaaaaactggaagcattacctatgaaaacgggcacaagacagggatgccctctctcaccactcctgttcaacatagttttggaagttctggccagggcaatcaggcaggagtaagaaataaagggtattcaattaggaaaagaggaagtcaaattgtccctgtttgcagatgacatgattttatatctagaaaaccccatcgtctcagtccaaaatctcctcaagctgataagcaacttcagcaaagtctcaggatacaaaatcagtgtgcacaaatcacaagcattcttatataccagtaacagacaaacagagagccaaatcatgagtaaactcccattcacaattgcttcaaagagaataaaatacctaggaatccaacttaaaagggatgtgaaggacctcttcaaggagaactacaaaccactgctcaatgaaataaaagaggttacaaacaaatggaagaacattccatgctcatgggtaggaagaatcaatatcatgaaaatggccatactgcccaagataatttatagattcagtgccatccccatcaagctaccaacgactttcttcacagaattggaaaaaactaccttaaagttcatatgggaccaaaaaagagcccgcatcgcccagtcaatcttaagccaaaagaacaaagctggaggcatcacgctacctgacttcaaagtatactacaaggctacagtaaccaaaacaacatggtactggtaccaaaacagagatatagaccaatggaacagaacagagccctcagaaataatgcggcatatctacaactatctgatctttgacaaacctgacaaaaacaagcaatggggaaaggattccctatttaataaatggtgctgggaaaactggctagccatatgtagaaagctgagactggatcacttccttacacgttatgcaaaaattaattgaagatggattaaagacttacatgttagacctaaaaccataaaaaccctagaagaaaacctaggcattaccattcaggacataggcatgggcaaggacttcatgtctaaaacaccaaaagcaatggcaacaaaagccaaaattgacaaatgggatctcattaaactaaagagcttctgcacagcaaaagaaactactatcagagtgaacaggcaacctacagaatgagagaaaatttttgcaatctactcgtctgacaaagggctaatatccagaatctacaatgaactcaaacaaatttacaagaaaaaaacaaacaaccccatcaaaattgggtgaaggatatgaacagacactactcaaaagaagacatttatgcagccaaaagacacatgaaaaaatggtcatcatcactggccatcagagaaatgcaaatcaaaaccacaatgagataccatgtcacaccagtcagaatggcaatcattaaaaagtcaggaaaccacaggtgctggagaggatgtggagaaataggaacacttttacactgttggtgggactgtaaactagttcaaccattgtggaaatcagtgtgacgattcctcagggatctagaactagaaataccatttgacccagccatcccattactgggtatatacccaaaggattataaaacatggtgctataaagacacatgcacacgtatgtttatagtggcactattcaccctaggaaggacttggaactagcctaaatgtccaacaacaatagactggattaagaaaatgtggcacatatacaccatggaatactatgcagccataaaaaatgatgagttcatgtcctttgtagggacatggatgaaactggaaaccatcattcccagcaaactatcacaaggacaaaaaaccaaacaccacatgttctcactcataggtgcgaattgaacaatgagaacacatggacacaggaaggggaacatcacacaccagggactgttgtggggttgggggaggggggagggatggcattaggacatatacctaatgctaaatgacgagttaatgggtgcagcataccaacatgacacatgtacacgtatgtaacaaacctgcacgttgtgcacaggtaccctaaaacttaaagtataataataataaaattaaaaaaaaagaaatagaaaaataatcacacaaaatataaatgaatatactgtgataaatgctttgatgcaaaagtaatagtataatgagagcctgtgataagggacccgagactgggaagctcaaaggaaaagttgacaaatgtatggactgagtaatgttactttttgtatccccaggcccttgcttagtgtctggcacattgtcactctgttgtataaatgaaatagtcttttatgaggctctttttactcaagagtctctaattttaacaagtaaaagcttgtacacactgtctactgggtgtttaacacagaccaggcactgttgtaagttctttatatatattagcctattcactccttcttcaaaaactgatgaggtagatattcataccatactttccttatatagagaagaacaccagagcacaacaggtcaaagcacttgatcaaggtcacactgttattaagtaacagagcctggatttgaaccttgggcatcagactccataacctgtcttcactgagctacactgcttctcaggaggaaatgagctctccatcaggctgtaggaaagtgatgagctgtgatgaatggaaaaaacaagtggaattagaaaatggattgtatgtactcccctcaggaatcagcactctgggggttacaaggcagcaaaagagaaataacacagttatgtcacacctcacacccagctcccagcctctgcagcatcactaagtccctttcctcccccagaggcctttattgccagggatgattgacccttcttggtggcctttaggactcctagaagaatctgcatcctccagccaccaccatgcttcaccctccatttaccagtgtctgtgccccttctacagagtgaacagccttagctctccttcctcagctgggagctccggcctcttctgcttttctctctccttccttttccacatactttgagctacacatggattaggaaggcacaggctggatactgggtgccacactggttataccctcctaagggtcatcacaatctttgcttttcttctaggacttgacctcttcctggatcagagacaatggggcgttcacccttcttctctcttagggcaatagcagagaacttctgaagaaactcactccaatgcacccaccctacagcaagccagtctactcccttccacttggagtcaccttcacctccccattttccatcttcatatttgttgcgcttggatttttttttaaaagacaatttggggtgccagctctcttacttgggaattcatgctccatcatcagtgttccttctctgggtgtgtatgtgagtgcaactgggagctgacagtctgtgacccccaactcagagcgctctgtacttttgagtgagagctggaacagagcttgtgttttgaaaagcagaagaaaaggaagttcaaggactttgaccttgagccctgattcttggaaaccactgtctagagtctcttctactaagaggaaatttaggtcaaagcatttccaaattccattctcaaatcctgtgacaaaaaagctctataaaaataatatttgaaatttagtaaactgggaatatgcaagtgaaggattttttcagtttctgacattctagtgtttgtgttataaggggtgaggatttgcggaaaaatagaacctgtttttaatggaagaatgacctcaatgggcctttgattttgcaaagagaaaatgaagattctattctggagggaagagagtccagacttggcctccaagaagctaaactgaaacaggttgtttttattgtggatagagcagaatttctgtgactacatttcctttgggaagaaaatatgtatttcagactacccagtctctgaatattactggtagttgttgggagatgtgtgtgtatgtgaccttgttggtggcaattatcccaatagacatgggaaaactttaggcaataacattagagattcagtctttaagcctgagctcaggtggctattgaacatagttggctgcctagactgttctgaaataccccaaggccacgctgatagcagggcatagaagggcagaagagacactatttttgttatattaatagtacattacagaaatgtagttgcctcacagctccagtcatcttcattctgcttagccttttttttttttttttttagaaatgtgtgagccttttcttcagaaaatgtgtaagccttttctttagaaattgtgtgattatgcttttagttctccatgagaccttcacctcacatggttgagctatcattaaatattcttgaggccagttgggtattaaaacaccacaaagatgatgcaagtaagtgtggaccacttgccaagttagtacaggatcatggctctgaagaaaagtgaggttacacaccatcacataccaaagaaaccataaacaaatcaaagattttcattggcaaaccatagttaaaatatttcattgactccagcagcagagtcaacatatcgtattcatattttaaaacaattgagtctgtgtgtcatggcagttaggaaaatctgaccattttcaaaaaggcaacctgtcaaggccattcagagccaacgagagcataaacagtctaaaagggatttgttactaacgctgagataaagttaccaccagtgtttggatttagagaatgaacaatgcaattaatcccttagaaaggatttgggacggacaaggaagacagctattcaagtttgttcttaccattaggttcctccctgttagcacaaatcagaacaaatactttagtcctaaattatttccctaatgatagtcagagcctacttcgctggctggatgtatctctatttgcaaacagtcaggtttccccgtaggggttgtaatacacactcatgattgatagagattacacaagttgcagaggcccatgcaatatgtaaacatatatatgtaatgtatttaaaataaagacagatggaagaatgtgcccactagatgacgagacaggaatatgaatgtgtattgtttcaggtcttcatcaggtattgctccagcttcatgtcaggtctatattatagccaagagaatatgtgcacacatacacccaagggagccccaaagaaaggaaattgcagtaggcacacaattcatctctggccgcccacctgccaaatgttggcagactactcagggtcacaacccacatgttgtgaaccacggttttacctccctggttagcatgtggttttgaaggtaaaggctgtgagtttacattcccagatgccatatgtatgcagttaatggacaactatggtctctttatacgtacatggccacaaatcattaccgactgatgtctggctgatggacttgatctgcaaatttcccatatgcttcaccttaagccaaaatgagctggaagaaaatacatggtttttggatgcttttgacagaaaaatgggaagccttttcttatggcactatggtgtgtggagctgcaatgggagatggaagaagactatcttttcctcaatttccttgcatattcataaaacaaatagaaaaaaagaaacaacccacagctagaatataattggctgctggaactttctccaatgtggttgattctgattcatccttaggaactgaaaggagcaaccatctccacagtttcagggttttcattgacaaactgtatgatcccgtttcctccttccttcactttcactttccttttgttcattcttccctctctctcttcctcccttcttctctccttcctatgtatgtacatactatgtttctcactttctaaaggatttgggagagtaaacaagaggaacaaatgctgggaaacaatatcctcagacccatggccattgagagcacaagctaaccataaagacccatatggtttattattattaacatctaacagttctcccatgactatctttggaataaagatcaatgaaaggaaatacaacttacatattttttattgtcaaaaaggaggaaacaaatgacttcctcatgtatgtgtattccacaggagtgcatcagggagataagtagaatgggtttgagtgaggatttagagctctcacatcttgctttctttaaatgaaattatatatatatataatatatatagtatagaagatatcacaaacattaatgtacccactcacttccgagctttaataaagttgaattttttcacatttcttagaaaaattataaagacaatattttagatacaagtgaaaattcctgcatatcccctttgactttcattcccttcctcctccccaaaagtagttatgagagtaggatttattgtttccatacccatttatccatgctcctactgatagacatttagactgttgccgaatttttgccacaacaatgtgcattgttatacatgtttccttgtgtaagtttgaaagattctccctagagcagaagcattcaaatttctaaaaatacattttacattataactcaatatacatacacaagcacttaaaaatatgtacccttctttcttaggtcaggttccctagcagcaaagcctgagacagactttcttgtgctagggaaaacctgtaaggaagaaagaggagcaggacagaatagaggaaagagctaagcaaagatgtggtttcctctgaggtcttgcctcagcttgatccctcaggaaattgtggaggagggggcccctgactttcatacctcttatttgtagtcattggctgcttggtggggtcaagagaagagtgcaagctcccagacatttctagttgaagtagctcccatcagccaagggcaagctgtggaaatgagggcagctgtgagcagttagcagctaatacagcagttaggggtgaatccattagccccacgaaaatgatctgggcagggccccaacagcatggactacaccttccaactggtgatgcattctggtattttttcctcttccctccctccatccctccctccctcttcttctctgccttttcctcccctcccctcttctcttctccctttccccctaaattgattgcattatctgttaacctgcagttttaaaaacactattctaggatttaccttgaaggcaacttgctagactatgaacttctacaatagcagatataaccaaatggctcctaaagcagtttaatcaatctattttttctgccagtattgtatgagagctctggttttatgacttccatgtcaatacttgtcagtgttttcaggctttaatttttgccaaacttatggttatgattggatgtgttattactgttgtaaattgaatttctctgatagtattcaaattgggcaactcatcgtgtttgtggctcagtgagatttccttttcgcaactagataagaaatccttatctagcttgaagacataaagacattctaccttattttcttctaaacattttaaattcttatttgtcatatttagagctttattcatctctgaggttttcttggtatagaaaaggtattgtttggctctgtgtccccacccaaatctcatcttgaattgtaatccccatgtgtcaagggagggacctggttggaggtgattggatcatgagggcagtttcctcatgctgtttttgttatagtgagtgagttctcatgagatctgatggtttaaagtgtttgtcagttcattcctcactctctcactttttctctcctgtttccacgtgaagaaggtacttgcttccctttcgccttccaccatgattgtaagtttcctgaggcctcctcagccatgcagaactgtaaatccgttaagcttcttttctttataaattactgtctcaggtagctctttatagcagtgtgaaaacagactaatacaggtacataattttgttttgttttccacctaaataaccaattattctagcaccatttattaaataatcatctgtcttatccttaccaatttgtaagccacatccactatatatccatttttcccatgtacactggcctgtttttaggtctttctatcctagtccattgatgtatttgtctattcacctgcaccaatagcttactcttttattgctaagctttatgataaattatatttgatagcaccaaactattcattttgttcttcaagatcttcttctcagttttcttccacaaacattttaggatcagctttttaaattacatggaaatttcagttgggatttttctgttgttgttgctgtgttgaccaggatggtcttgaactactggcctcaattgatcctcccaccttggcctcccaaagtgttgagattagaggtgtgagcccggcttttattgaaaatgaatttatatatcaatttgaaaagatgatatctttatgatattggatctttccatcaatgaatgtggtatttatgttcatttattaaggtgtttttctatgtacttcaatgctgttttaaagcttcttccataaagttatagtatatcttttcttagatttaccccaggtgtcttttacattttattgatgtttagagtggcatctttttttgtctattacatttccatgtggttattgctaatccacaatcagtaggaacactactgatttttgtataaaccttaaactttctttttgattttaactttgtatagactcttttttatttcctagataatcatatcatctacaaataagtagaggtttgcttgtgcctttccaagtttaatgctgcttttttttcttcttatttaataagttaggacttcattaccgtattaaagcgaagctgtcacagcaggtgaaatgctttattaagataatgcttgctgtagttttacggtgttaaggaagttcccttatcatttataattctagttggcagcgattttttaaaaatcttgacaaatatcacatttcatcattttttgcatctactaaaataattatatactaatctcctttaatctgtacttaaggggtatggcatagattttcttctattgaactattcttatattcctgagataaacctcgtttggtttttacactctgccagatcatttgctagtactttatttaagattttgcgtctgtttgtaaatatatccttttcttttaacagtttgtctagttttgaatcaatgtgatacaaacattgatataaaattagttggatatttgccttgtcttttattctctaaaacagaaattaccagatgggataccaaaacaaaatctagttttaattgcctacaaaacactgtcaatactaaactttgctttttattaggtaagcttaaatacttacgttgattgttttctgctgtatttgagtttatttctatcctttcattttaggttttctattggtcttcttttttcttgcttatttttttttgactccctttcttctggtacaccaatacagtttctacattcttttctccttcctcctgtttcataagctagattattttcccattattttagttgtcactcttacatgtttaacaaaatatttaaccatacattttctaccattatttcgttatttaatatttatattttcttgccagatataacaagatcttagcctacttttactaccaatgagcaatgcccccactcccagctttttgtttagagcttttgttgtatcttcaaaaattcaaaatacttaattatttttatttattttctgttctcactgtttcatttcttttttctgggttcacttttcttctaattgaggtaaatcttaataatttccttcctgagtgtctgtgggcaataaatactcaaagtctttgctgggtagaaaatacctttattttgtcaatacagttgaaagactggacatgaaattgcaggttgacagttacttcctgtcagcactgaagatattattctgttatttttggcactgactgtagttaaggaaaagtctgctctctgagagctttaaacatcttccattttctttgatgttctgccggtttgttacagtgtatctagttgtggatttatttttatatattttgttcaagacttgaggatgcacttccgatctgagaacttacattttttcaattttagataactaccatttagtatggttttaaatctttcttttctccttcccttttcaccattaacttattatgtcataccttctcctcttaacatctgacaactcctctgtcctcatcattcaaaacaagtcttgtttgtttgttttattttttcacctaaattagtttctttcatggtaactttcttttctttttctcaaattcaacttaccaacatttctgttggttctaacttaaaaataagcccagaaaatggccacttctcatcactcttactgctatcactgtatcctaagccacgattagctttctgcttctacacttgtctcccacagtctattattagtgtttacaatttcaaattgcaccccccaccctgacactccatgtcactcttatcttctccatggcacttatcgcaattagcatgatatctttaaaaaatgttttcttcttcttctgattctgcttctgattatgttcactgtctctcttcctcaccactctataagctctggtgataaggataagaatgcttagaagaatcagaattttttgcctattttgtaaactctgtaggttaagcacctagaacagtgtcacacatagaaagaattcagcacatttttgtaaaggaatacatatgttttaagaaagaagaataaattttgcttaggttaattgagtattggtcatttcctttagaggtgaaagttctttagacttgatatttttcgtttaggtaggtgagggttggggaactctgaaaaatgatgagaaatatatctcaaagaagaactgtagagaatcagcactccatcctggatcttagcattcacgtgcttttaaaagtaaggccatcgtgacagcgttctaagttaggagatgagacatgcagaagaaaaagaaataggaaactctgcaaccaactgcccaagtgaaagctaaataaacaaacaaaccaaccaactgcctttctgggtttatgatagaggtgctggaaatcacaggagacttccctgggacatgtgttgtgtaacaaatcctgacaaatacatggatcatcaaagagatttctattttatatactgagaagctttctgatccaggaagtggtcaggccatctgggatctcctgcttacccatatggagctctgattgaatatgtgagaataagaggaaagctcaattttagtgaacatgagctgtttggagtcagcacgggggtgcatccgaggtggtgatgaaacaaaggtattacttttccaccaagcccttttaatgagggccgaaagtagtcagagtctgggaagatagaatgacaaagaaggaaagaatgacttccatttctctatgtgacaatgttataggttgcagtcattgacctaaacaaccagacatttccttgggatgggaaatcagtgagaaatacttggaagccatcatgttatgaggagaaaaaaaaaattaactataggaatcagcatgtaaaaggaattattctttagtaaataatactgaactatttcttcagtaaaaggaataataaattacacttatatagcatgttacactttctcaaagcatagaagccacctcattagatattttcaaccctgtatggtaggtaggatagactctccaaagctcgaattgtgtatagtatagtgctggatatatgaagagcacttaatcactcttaatatgaatactaattttacagttgagatggaaagaaattatgaaattgtttattgacaaacaaatatcacaaggctaattgtggtacagctggacccaagagcaagtctagtaaattttcagtcttggactctcaatatttcttcatatgccctgccaaatgtgctaccgtccaaaggccacacagatgcagaacaggaaatacaagtgttctgagttaattatcctgtgccaacggtcattgatcttcctgaggaagagctactgttgattcacctaaagtttaataatctaccaacgaaggcactattaagaatagcttaacataagcgcaacctgccagttaggagaaacttggcacagaatgggtccattcaaccgaggacattttattataatctccaagattggcttagtcttgaggaagcaataccaaagtggctgtagaagtacaattcagccctaggtgatttactcagaaggtctcactctttgctttcttctaaagtcagtgtccaactccagcactggcattgggaacagatctctgtgctgcagacttccagtgcacttcccacatctcaatggaagcctgtgttatactgtcagcatctgcctgctggtaggagtgagtcctccctcagctcatctcactagcaagtatacacagccttctccacagcctctgccacatgtgttaacagtgtctctctctgaaaccatccactaatgggaagactgagggccacccaactccattgagtaactcaaaaataggggattgtacatttacttcctttcctatttctctcaccctcacatacaatgacagagatcatatatttccctaattcttgtcctttctcaatcctctgactctctgattttgttaaagtgaattaagccctcagcacttcatcaataggattgctgcatacacaaaatcattctgcttgggttcccaatgactctgagcctctaatgaggctgcattcctcgcagacacctggattgcagcctgatgagactcggtagtggagaatccagctaagcttggcctggtcttctgacctatagaaactgagataagaaatacatgtgtgattgaagctgctaaatttgtggtgatttgttacatagcagagaaaactaacataactaggcattaaaagatatgggcacccttctttggctcagtcctgtatgaacttgaataaatgactaccatattcaacatcagaactagaacttcacaggacattagcactccaaggaacaatcttacaacaattaccctgttataaatttctcattcataaaattcaagtttagaaacccctcacttaagaacattctagatatagagtagagactcttccagggtgggttttagtgctcccaacacaaggacacacattccgacacaagcagacacacgtgtgtgtgggttgtggtggtggtgaaagtgttttatggagccagactggttggatggagcactagaaatccaaaggattgtaggctagaacagaaaagtctaattatagaccagtaacatagcaagggttcttttacagaggtcaaatcaaagacccaaatgactggatagacaaatgtgagggacagaacccatgaatattttgatgtaacaaccaacaggagcaaataagtggatgaatctcgagatctaagttctgatgatggtagcctgcagtgccttcctagttcagaatgaatttcctcttttataccttttggaagctcaaggctcaacatatgtgtatgtctttacctttctgcaggcactcctctgtggaagctaagaaaatggttaccccaatccacagatcatacccaaagaaggcaaataacttgcttaaagccagaaatgaagctggggtttctaatgactagttgactgttttctttgagttcattggaaaacgcatataactggtttaatgaaatgcttggaggatgcaaaagtgaaagatgttgaaagctccagtgaagatagaaaagcaatacaaaagcaaactgggatcaggaatataggcagaagatagccagatgtgactcaaattgaagtaaaggaagccaaaacacatgggtacaataatttgaaacagatattctccaggaaaaagcaatctggaaagcagtagtatagtgagagacttgggtagcgctgttacaacaaatggagtctctagtgcagtttcaggctttaaccaacctctttgtttaccccccgatgtgttcaaattttatcatggcctgtgtgtgccataaaataagaaaggttgggacccccaagctttttttaggaagactaacctgctcccagcaccagcttgttcttcattattcctcctgtcaattaaaaaaacttacaataaagtgctgcatacatgcagagaagagcacaaatgataggtttccagactgatcaattatacaaagggaacacatcagtgtagccagtacctgcattaagatgatgaacatcacctggacaccagaagtgccactaccctccttgtaacctctttctgatcactactcatcccctgcaaaggtaactgctaagctgaatcctaacagcatagatcagttttgcctggttttaaattttatatatatggaatcatacagttggcaatttctatgtctggcttcttttaccccacattatatttatgagtatgacatatgttgagtgtaggtacagatttttcattcttattgttgtacggtattccactgtgtgactataccacaatccatttattcattctattggtgatgggcattgcattgtttctgtttgggggtatcatgaacatttttcttcttgacttttggtgagcaaatgtatacatttgattcagttctaaccagcttttaagagtcttttgggacaaaccttctccaaattccccttatatgcctgaaccctccataagtttaagacacatttaattatattttttctctctctgccttgggaaaaagatggaaacaaccaatcgtgactattaactattaatctcaactaaggcacactgaaatatttgtatacttttcccagaaatattttttacaacaaatgagacatgtaatgcttaaaaacattcattgagaagcatttgttcaaaaattgagatagctttctgttcattgatactaacaaagaacagagtgatagtatctgtccatttaacctaccaaaaatgagacactggatatcatcactgccccaggagtgataataaaagagggtcagaacccatgattgagaccagaattgtcttttgaaagcccccagatcacctatcatactcctttttattttgacactttaacagaaacatctaacaattatctcctctctgataaagacagtaagagctttattacctaatggggtcctagatttgtataacacaagtatcttaaatatgcctatttcctagctccctccaaccattttctgctttagaagaaattcattttccaagggagaatatgtatgtcctctcactgtcatttggaagaggagacagagaaataaaccaaaattaagtttaatctctgacaggtcatccttttcatctactgctggtatttctctaatgcagcacacattttcctgaggcaaacgggatacaacgtggtgcattatttaggaaacgtattttgcattagactgacagcccaaggcaccgttgatatcaggagctaatattgcaagggaaatagagaaggagaaaaaaaccctcttatttggtttgaatggctttatgatttatcacaaaatagtagatctattaattaatgggtttcccctgctgtaagtaacagaaggagacccaggctgatttgaacaacagtaaaaggattcattgagaggctattgggaacatcacagacttgaattaatggctgtacagtaagacctcaggattgggaactagcatgagacgcttgcatgctttctctctgggtggtggactcacttattttcacttagtgctcactccttggaccaaacatagtggctggagccaggagtaatctcacaggcccagcctgcatcatgggttctctacctcaggggtggatctgttaccaaaaagggtcagaggaggtgctggcagacaaaagccatggccttgtactacaagggtgacagctgaagtcatcagcttactgatagaaatagtacaagaaaaaaggaaaagtggtctggcaaaggcgataacattggtaagtgtatataagaagtcctgggctagtgacagtgctggaagacacaggaaaaggctttacttgagcacataccataatcaaatgctacatttgttcagggtatttgtttgctatagctagactttttttttctattaaaaattattaaacttttttttcaggaaggtaactttgttcttgtgagtcttctcattctacccattgaaagaattgttttataacatagttctcgataatatgaggtttcttagtgctatggtctgaatgtttttgtcccccacaaaattcatacgttgaaattctaacctccagggtgatggtatttgaatgtgagacctttggcgtgtgattcggtgaggcagacagagctttcatgattgggagtagagtccttataaaagagacccaagagagctagctatccccttccaccatgtgaggacacagtgagaaggcaccatctatgaaccaggcaactgactctcaccagacactacatctgccaacgccttgatcttggacttcccagccttgagaactgtgaaaaataaatttttgttgtttataggccatctagtctatggtattttgttatagcagcctgaatgaatgtacagatatatgcattaggtagaattagatgtacagggatatttgcattagataggatttttgtatctatataaataagtgagactgtacggtaatttttctatgttatattatactatggttactcccagtgttctcattgcttcaatcagttgtttattgagttacatttatgtgagaagctttatgtgaatgtcagttctaggaatatgaggatgcttatggtgaacacagtccctgtacttgtagtgcttggaatttagtagggaagacaaatgataacagcagaatgtaacaaacttattatcattttattgtgataagaatacttaacatgagatttacccttttaacaatttttttttttattttttatttttttgagacagagtctcactctgtcacccaggctggagtgcagtggcatgatctcggctcactgcaagctgtgcctcctgggtccacgccattctcctgcctcagcctcccgagtagctgggactacaggggcccaccacaatgcccagctaattttttttgtattgtttagcagagatggggtttcactgtgttagccaggatggtcttatctactgaccttgtgatccgcctgccttggcctcccaaagtgctgggactacaggtgtgagccactgtgtctggccaacaaattttaagtgcacaaaacattgttgactataggtgcaatatagtacagcagatcttcacagcttattcattttgctagactgaaactttatgcctactgagtagtagctccccaccttcctatcgcctcacgatgccactctttgattctgtgaatttgactatgttcattgaagcactattcatagtagtcaaggtgtggaaacaccttaaatgttcattgacagataaattaataaattgtggtatatacctacaaggaaatatttttaactcttaaaaaagaaaattctgccactcacgacaatatggatggacattgaagacattatgacaagcgaaataagtcagtcacagaaaaacaaatactgcatgatgccgcttacatgggcatgtaataagggaaacacagggtgaaatggagatacaatgatatagatcataatacctatcttacaatgttgtatgtcagggataatagataaagcacctagtataaagcagaacacatagtaggcactacaaatattattaccatttttggcaacttttcccaattattttctagttattagtttacataagtttttaagttcctgagcaaattgtggtaatatctatttttttgagaatattgttcactttattattatattaacacaaaattgtacagagtattattcaatttaaaaagctccatggctgtggttatctatatcttctcttccaaatatttattttctttttcagattaagcagagaaggttggtaaattgtaataactttcaaaagtattattttatgtgtgaatatacatttttattgattttaccttttaggcttgtaaatcttttatgttatcctcattaatcccttgtatcagtttttcttaaaaatttttgtttcttttctggcttcttaaacttaatgtttattatattttgtttttcttgcttaataatgaaaacatttaagaatataaatttttgtctgatgtaatttgacttcatcctataggttgtgatagttatttgctttctaaataatgtataaatccagtttttactttttctttaaatgaaaagttgcttaaaggagtgttttaaaacttccaaatgggtggaatttattttcttttgactttattttcagttctgggatacaagtacaggatgtaagggtttgctacataggtaaatgtgtgccatggtgatttgctgcacttatcaacccatcacctacatattaagcccagtatgcattagctatttttcctgatgctctccctccccacccacacacaccctccgtcaggcctcagcatgtgttgttcccgtccctgtgtctatgtgttcacattttcaactcccacttataagtgagaacatgttgtatttggttttctgttcctgcattgaattgctgaggatattaattttttaaacggtgtggtcaatgagattgataaaatttctgttttttgaaaacatttgtatttcagtatacatatatatttttataaatatgtatatttacacatattttatatacatacttgttttgttattgtttcatgggaaccaaaaatattatacataggctacaatgtttcagagatacatctatagatagttagtaaatcactcatacttattgttatctttcagctctcttatttccttatttatccctggcgttattgatctttctaaaacagagagggttctggtttatttaccaattctataatatatatacatagtatagatggacatatgcctcccgagtagctgggattacaggtgagtgccaccacgccctgctaatttttgtatttttagtagagatggggttttaccatgttggccaggctggtctcaaactcctgacctcaagtgatctgtccgctttggcttcccaaagtgctgggattacaggcacaagccatcatgcctggccccaatcctattttatttctgtcactttcatctcggattttaaatttttttttcctttgtatatttggaagcaggtagtttttggtatataaaatttcttaactcacatctttgttataaattgaaccacttattgtgaaattatactttttgtcttgtgcctattgtcttgaattttcctttttactgatattaatattttgatatctattttgggaagatgcatttaatatttttgtgtctttttatcacttgtcatagacaatcactgaatgtttaaaatttattttgaattcttttgtaatagggaagttcaacccatttattgatatttgattttatttctgatatattaattattttctttaggtttccttgttatttccagtccctcccccacacatataaactataatttattggcttttatcttctatagtgctctagaaagttcattttctatcttaattttatttctttttaagtaaaaaattgttctttgaccaatacctctttaattattaaagtaaaaaacaaacacaaacacaaatattttgagactccttatttaagacatatagtttaatagccttataattttttatgttccctttcctcgttaacaatttttgaaaatataaattgggggtttagttctagattcttgttattgttgctaaaattattattttacaccttatttctaatcttttaagaataatgtttgacagtttttgtttttgcaaccatatttagtacaattactatagatttacatacatgtctagctgatttcaatactccaagtctctaagttttgcaattaacatgtattattattgttattattcttttttgagatggagtctcgctcttcttgcccaggctggagtgcaatggtgtgatctcagctcacggcaacctctgcctcctgggttcaagcaattctcctgcctcagccgccctagtagctgggattacaggcatgtgccaccatacccagctaattttgtatttttagtagagatggcttttcttcatgttgatcaggctggtcttgaactcctgacctcaggtgattcacctgccttggcctctcaaagtgctaggattacaggtgtgagccaccgcgcccggccagcatgtattatttttataattacaaaaacaaacagatattttccagaagataggaaagactagtgctaacaccaatcaggatagcaaatgcttattcaaactttgtctcttttttttttgccattagctccagcagctgtttatctgatatatgtttaatggcaataataaaaagatcttttttcctcttctttctaatgccaaaggcagtcttgtccttctaaaacctaaagttctgcctattccggaacacagtctagatccaaaaggtttatattgactgttcagactaaggtagacctgaagcgggcagcaacagcagtgggattgtgatgataatcacatgtcaaatttctcttcctctcccctctccttgcttacaagccccatcccttggcaccgttcacgtgcacaagaaccttctgtggccgggcgcggtggctcacacctgtaatcccagcactatgggaggctgaggccagtggatcatgaggtcaggagatccagaccatcctggctaatacggtgaaaccccgtctctactaaaaatacagaaaaaaaaaaaaaaaaaaaaaaaaaaaaaaaaaaaaaagccgggcgttgtggcgggcgcctgtagtcccagctactcgggaggctgaggcaggagaatggcgtgaacccgggaggcggagcttgcagtgagccgagatcgcgccactacactccagcctgggcgacagagcgagatctgtctcaaaaaaaaacaaaaacaaaaccttctgccttctgcatgatgattttgtccatcttttcttctccctttaaatgctatttagccaaatgtttgtcttttgtcactgctttctaccacctgacacattttattttattatttaagagccatttgcttactgtcagaaattacttttctagttaccagcacttgctttaaatgtatgtgatgttagtttaagctgtaactctgggaggccacctgcttctctgccatcctgccaggtgctgggtctgggtgtgtaggtgcgggtgttaaacctgtcccccaaagaaaaccacagcaggtcttttatcccttttaaagcccaccacagtgggcttgttcatcctgtgtgaatgtaaacttcagagaacttggttcgtggaattcaggaagaaataacacttgctagaaacccctgacaatgaactcttcacaagaccccttcaattaagctgtctgcaggttttaaaaagtgtttcaaggttctaactactttctttcacttgaggtattgagagatacctatgaaaggccttatgatcaaggtcaagaaggatggtgttattctagttatttcatatttcaggcgtacttaaaccaaatgtatacttttgaaagtctttcttattttttaccaagcacaatcttgatgtggtttctattgattcctgttccactgtggattaggtaagaaagagccacttttctttcatggacacatttgactttgagggggtttgtggtcggaaaaatatcaaagtctgtgattacttcatgctttacccagtcttagggtgagtgtggctggcgtttggtttcaaggcgttgctggatgttaaatgaggacttgtgaaagctctcaggtctgaatggggattcaagagcccccagtctgggggtgttggtgagtgacaggatgagagaactgctattctcaaaactgcagtgtctgttcagagtagtaaaggaagcagttggcaaattcggggaagagagcttgtttagcactgtgtttcagattttaatagagaggggtttcttagaatatttttacaggacacagaggttatgagcaataaggaagggaaataaaaaaccaagtagttttcttgcatggctgtttggctagaatttcataaaatgaatgttatctgcaagaagactaaaaacagggtgattcattacagaaactgtgtccttaacatgctaatcaagtagttacatatgggaataaaacagtcagttaagctggtcttgaagcctgactgatttgagacctggaaatgctcttggctgattgactggtgtgagcaatcataatagtaataggtaacatttaatgaatgctttgctaagccttgagttacatcatcacatttaatgctcacagcagtctatgaaacagatactacttatgtctccattttacagagagggcatatgagtgacaaggtaaataagttaactgggatcacagagctagtaagcagttgagccgtagtttgaactgaggcactgcaccttagttactcaactagatccacgttgctgactggccagatccacttccttgctccccatgtccaacaaaccagctgaagaaatctacagagctttgttaatattcctcctgtttctggaggcagccattaaggaggagtaggtcccagctccagaacgggttttcccgtaacacggtcatgactctcttgagttatgtttcagcttctgggcagtagcctagatgggggtctatctactcgttctggaaacaaccatagctgggctattttttcctttatttatgggtcatgagcactgccagcaaatttctctgaggggtgcatttaaatatgccacatttgtattactgtatgtgtatgctgggtgaaacatttatgataaatcaaggttttaggtgccctatgggaaaagcactgatggagaaatacatctgaagaaaacttttctcttagcagtagttacttgaggaaacagtctccatttatctttagaggcttatgtgcaatgaatacagaccacccggaatcatggttctgcatatcagaagaggaaaatgaagcacttaagcttagctctgggctgcttcagccttcgccgtgctatgcgagcccctctcccattcctctagcccttgctctctccagttttcaagcctggtaaagctggcaaatgcctgctttcctgtgaagacttctaccccagccacgttaacctgcttggaatgctcgtctcagcattttccctgtggttaacacccacatgtgcctacccacctgcacacatttcctaaggggtaccatttctgatcccttttccttccctgataatgatgtatcactatttttccttcccaatcttgctgaccatttacacttacatacttacttgtgtgatatttgtttaatgcctgtctcctttacaagtctttaagtccattgaaggcagaggttctgtttgtgtcttgaataagtgtcttgctagacataggtgttctaaatattgaaggaatgtgcttctcctctttaattattaaagtaaaaaataaacacaaactctgtagaaacttgtgcatgtagcttgtttattattttctgccatttatagatccccctctcccccactggaccataagctcactgacataaatatttgttatccccagtgcccattgtagtggctaacacatgtaagtgttcaatgaaagtgaatgaagttgaatggccctgggtgacttatacctcagatttaacatcatggatataaagcatttcagttcagtctaacatttaaagcacccattaagtgtcagactctatgcatagtactaaggatacaaaaaggtgtgagacagtctagaaaggaagacagatatagaaagataattatagacaaattgttgcagtgcaatgaaaaagatatggatagagtattacaggagacagtgaatagagttgcctcatttcttagcctaattttaatcttaaaggttcagaattagacctgtatagagtgtgtgagtgaatgaactctgagtactaaggacaaagatcaagagtgtgatttagtagcagtctgatgctgctgaatcatgaggcatgaggcaaggagtagtggtcgtgaggctacaggggtaagccatagataagcttaaaaggcatgtgaaagaattgtgatctttcctttatgtttttctctacaacctggtcattgtaattgctggaatttttcttggctgtttcagaatgcaagaaaatttcagatactaaagtctgcattatagaatgaaagaaaatttcaggtactaaagttgaaagattcattcattcattcctatttattccttcagtgaatgttactcagtatttactaaatactaggtactgaagatggttacaggttcaatgaaaattcagtgtttaccctcaaggagtttaatcatgtgaggggggtaaatatggagtaagtataatggcataatggcataagtcaacagttctcaaatactttggccttaggacttctttattcattggaatattatgaagatccgtaaccgccccccccaacttagttttttttttatgagggttatatatcatcagtttttgttatgttagaacttaaaacagaaatttaaaaaagatttattaattaaaagtaataaagcggccaggcgaagtggctcacgcctgtaatcccagcactttgggaggctgaggcgagcagatcatgaggcaggagttcgagaccagcatgaccaacatggtgaaaccccgtctctactaaaaatacaaaaattagctgggtgcaagcctgtaatcccagctactcaggagtctgaggcaggaaaatcacttgaacctgggaggcagaggttgcagtgagccgagattgtgccactgcactccagcctgggcgacagagcgagacaccatctcaaaataataataatataataataataaaccaattatgtattaatgtaactttttttgggaaaattactgcatcttaccgttatttttctttcacaaaaaaattcatgagaatagtgccattgttttacatttttgcaagtctctacgtctggcttaataggtgttgaattctcatatctgcttctgcattcactctcctgtaatatgctcttttgatttaactacatgtagaaaatccagcctgacacagttatgtagttaaaatggggagattattttaatatagacttttcagataattgtgtatattctttgacatgatgccaaaacttgacaagtggtagtttcttaaaagttagttgtaatggggaatctaaaaccaatcaataaactttttatactctgtcacataaaaatttattggtctatcttatactctgaatggatttattaaccagacatgattttgtaacattaggtattagtcatttggaaaacattggttcaccgagtgaaccacagatgcatttcattataaaacatgaagtcatgatataaatacagtataaatataataacaataaaaatcagataattcattaatatcattgtcgacttcatcagaagaggctttaagcactgagaagctgtcatggtcatggtgatgagttttccaaaattctagcttgtgcttgaaagtttaactttcataactgatagcaaatagtgtcagttgttttctttaacatgtcagtctcacttcggtcatcttccagaaaatatctgctaaatacctaaatctgaataacctgaggtaaacgtttttttgtttgtttttttttttttttttttttttttagatggagtctcactctgttacccagcctggagtgcagtggtgtgatcttggctcactgcaagctctgcctcctgggttcacaccaatctcctgcctcagcctcctgagtagctaggactacaggagcctgccaccacgactggttaatttttttttgtatttttagtagagacggtgtttcactgtattaaccaggatggtctcgatctcctgaccttgtaatccgcctgcctcggcctcccaaagtgctgagattacaggtgtaaaccattgcgcccggcctaaccttagtttttatgtaagtcattctttcacataaaagatggcattccatgaaaagattgagtagttcagcttgcaattcaatcatgcagatacttttcttcaagacatccaggaaaaaaaacccatcatgcttcaatagggagaaatgctttgcgtgtactccccattttctcatacagttttttaaaaagtgtgtttattaagaattcaacaagttattttgaacgtggcaatgctgtgaattcttttactgacttttcatcctgcaggcattcagcaattcaactgaagggtcgtgtttaaaaaaaattatacttttggctgggtgcagtggctcacgcctgcaatcccagcactttgggaggacgagggaggtggatcatgaggttaagaggtcgagaccattctggctaacatggtgaaaccccgtctgtactaaaaatagaaaaaaaattagccgagtgtggtggtgcgcgcctgtagtccaggctactcgggaggctgaggcaggagaatggagtgaacctgggagacggagcttgcagtgagccaagattatgccactgcattccagcctgggtgacagaacgagactctgtctcaaaaaaaaaaaaaaaaaaagttatactttttattgcattattaagtgtattcttaagtgaaataagtttttgcttttatttgtttcattgtaagtatgtcgtgatgcagaatacagtaactactggcatggtttggtgctactgccatgatttatgccaaggtgccagcagctttacctcccattgcttttgcaacaccagtacgacatcagcaaagttggtccaggataagtcaatagattaaggaaatattcaacactttgaatattttagcaccacttgtgtgtgttgtcaagcattcacataaaaaataatcttctttgatgattagttggttctgatactggacaaatgcaagcaaaatagccatgcttgtagattcttctgtttataaggcaaaagtaaaattatgcagaagacgtggcaacgcagtctctttttccagctaaatttttaattcagtaagttactttgaaggtggcaatgctgtggattcttttgctgacttttcttccagcaggcattcagcaattcaactgtacaaggttttattatttctcagttactatatatgtgtttctctagttaatgcaattcaatgactttacccatttatagttcaaaatatataagcaataatttttggcttttaggagttcattacatctgaatttaacatatttagtcctttatctttaaactctgaatgtgtttttaatatattttgttgaattttcttttgtattaatatattgagtataattcagttaaggagagtaatgtgactctgtttctgaaaacagtttttgttactaggaaaagagtttcacccatctacactaaatacgtgttgaataaatactcaaagaatatttgtttgaagggatgcaacattatgggtctgctgatatgcatataccataggcgaacccagcaaggatgaacaataaaggtaccgctgccacagagtttgggttgggatgtattttttcttccagtttatgtcaccacacccagctaatttcttcttctgctgctgctgcttcttctttcttctttcttcttctttttttttttcttttaagagacaggctctcactatgtttcccaggctggtcttgaactcttggccccaagcgaccctttggccttggcctcttgaagtgctaggattataggtgtgagccgctgcaactggccaagaagaggttttgaattagtagcatggactgttagtaagggagagaatttagaagtcatctagtcctctgatgcatgcaagtcctgagagcttaagcggcttgcctgagttcacctgctaattaatggtagggctgagccaacaagttaatgttttggtataccgtggagctgaattaagagcaaattcacatgctaactttcagggcaactccctgccataagaagaactgcattatctagtttaattgccaccaccacaaaaagatcatgatgtatattaaggtaataggagcttcatgctgaaagggaggggagtaaaaccattgccaagcagaaatgctggagatttccactcttgccctgttcacagcttagatttggtaactaagctgttaaagaaaatcatgacatgctaacccagtctttttttttttttccttttagtcagtggttctccaactttagtgtggataagaattattattcagggatgtgtgttaattaatgggggatttaaggatattcaagccaattttgctaataagcaatatttgccaaccttgaaatctaactctggtgggatggaaatctactttactccaatgcattaaaaatttagtatttaacacatttgagtgtttgctaaattaaaattttgaatataaacttcaaaaagtaaaattaagtgttttggggaaaccctggaaattactgctttctatgttaatacctactaagcccattcctggtttcaaagccagggtttaagaggttttattataattacattttgtaaacttctacccttctctccttttctttttctgtaatccagcaatatatccgacttgcctttctcccctcttcttccaagtcccagaacattcttttctggagcatttaaatcccaaaggagaactgtgagctctaagccaccaatcaaagccaacttttacagtgtcttcttttgtctttctatttgtaggcaactcctgcccatctctccactccctgaaacccacaactatcccctcaggccccgccataactgctttttcccacctggcaaacagcctcactgaattctgggtggcaggcattaaccagacttcaacacaaatgcgcctgtcgaaaatggcaccaagttaggtgaagaacaaagacactctggcttcaaagaggaagctccagtttttgcacagaaggagtttcacacaacttcggttaacaacaacaatcacctcaggggaagaaaaggcccagactacaaagaaatgccaaacaagcagtcctcagtccttcctttctttctctggcgtgttttgcacaaaacctgatcaggagaggagggctttgataatcacttggaccatgactgctgctagtagcacttcttctgcttcatatatctcagcaatttgcgggcatctgagtgttccatgcttacccaggtttagagtgtgaacacacacacacacacacacacacacacacacacacacacacaccatgaaatgggattggctggctagaaaaagattctggcgacttcccaaagattacaggccaagtaatgtttttccttttttctttctttttttctacaattccctctctatttttcttactcttccagtcaactgctgatgtgtggctgtacagcaatgacaaatacatactcaccctaattgccacgtttttgaggaaaagaagttgaaaatggtgggaaagtggcagctgactgcacagggagacggaatgaaatttcgaaataatgaacaatttaaaaatgttacttttctcctctctctaaactcaaagcagagaatttttaaaaaactgtttccatcttgataaaaccctaattaaaaataaaagggctaattaaaaataaaaataaaaggactctttgtggaatgaggcaggcattaaataagtaaatcagacaaattcaatatgctttcatttctatacctattctattaagtcacctcttccaggttgtaacatgacagctctcttttcttcctcaatctctcactttctttcttttcccttctctatctcaaattgtcgagctgttactgtctcttctatcccctcttggtctctgttatcacagaagtggacaggagccaggtctagctgtggttttttgccatgtcagtagccacaccagttgttgataaaaatctggcaccgtgagatgaggccatctgtggtgaagtttaaacctatttacctccctggcaagctggttgaagcctccctttctctgtattcagtgaggctgaagatgacaaatgcagtgggattaaagccatgggatgaagtttggggcaaaacaaaaccctttcccaaagacagagctcatgatagctattagctgtgaggataagcaaatccccagtgtctggagcatgcagccaagagacattccagctctgtgtcccactctgtgtacttgaaggagacagacaactggctgagttacagtctggactttgggtactgggagatgcaaactggactctgccacttctttgttaaaggaccttggaataatcctgggctgtattttgtgatttgcagggtaaaacccctgttttagagaactgttctcaaatataatgagctacagaacaaaactaccacacttgtgacctccaaataggactccacagcttgaccaattacctgaaccataacactacggtccaaaagctttggttgcttccaaaaatccaatcaacccttacagctaccaatgaggctattcagacatgcatgaagtaagctctgaagtcaatgccaaatgctttggacaatggcagcgtccctgggcagaggccaatttaccatgaagctaataaagctgaagcttctaggcctcttttgagacccccaagaaggatgctagcaatgtgtccccatgtttgtatttttgttgcaaaatttataaaagtagggtgttttaagcccaatgagttgactgctttctctatttctactttccctctgttcgatttccctttccgttacacggagttggagtgatccaaggcagttgagttagagatacatttagtgtgggtttagcgggataaatttgtgagaatcaaagtctcatccatatgctgctttactggctttactgctggccatcagtataggaatggtttcttggtccatgcctacagctcagtgtactgacccacctggcaaggtacacagaaagaggcagagccagaagttgactcccaatatctccacatgaaagtgtcccgcagtgtttggcactggaaatatgtgggcagtggaggagaaaccagatttgaaatgtgtggagccagaggctactctgtggaatggagataatatctatatttttaaggttattatgaagattaaacacaataaggtatgtgtcagtgttaaccggtatctagtataaatggttggtaaggaaaagtatttttgtttcttatttgaaggatctgactatattcattatgaaaaccagatatcagctggtcgcggtgtctcacgcctgtagtcccagcactttgggaggccgagatgggcggatcacctgaggtcaggagttcaagaccagcctggccaacatcgtgaaaccctgtctctataaaaatacaaaaaaaaaaaaaaaaaattagccaggcataatggtgggtgcctgtaatcccagctcctcaggaggctgaggcacgtgaatcacttgaacctgggaggcagaggttgcagtgagctgagatcacgccattgcactccagcttgggcaacagagcaagattctgtcagaaaaaaaaaaaaaagaaagaaaaaagaaagaaacccagatatcagaatatcagaatgcttgggagattgtgatagctcttgaaacattattttaaaaaacctattgttacttttttctccttttttctttattctcaaagtgaattgaaaaatattgaaaatcctgctatttgaattctagttaatagagattctcccactctaaaaggattaaaaatttaaaacactctcaagatgcctcatagcaacattagtaataagaattaggacaccccccagatgccaatggttaagaagcaaagtccatctgatattattaagccgctctctgctttattgattgctaggctctctgaggatgggaagaacatctttgggtttagtaatatacagtgcctgtctcagcacataggtgctcaacagtgactaatacacctctctaattgttctttttattggttcctagactcagactggactctatcccgcctgagtttcacagatgaagttgaaatggaccacttgctctccatttggtatcatttctaaagtaatggctgaaatcatccctaactggagagagaaaaaaaataaaataaaatgacacctgaaacattcttgttagttaataagcaataggctggttagaaacaactttttctctgtagaaaaaggtccatacatccttgtcccctacctagtctaccttctgtttcttttctatttttcctgcaccatccaaaaaaaagaggtgcctcatttaactaaaagcaagtttccccacattggacagcctgatccacaccccttttagcctcggcatcaccttggtgaaactccaagaatgtgcccatacacaaaagagaatttgctcctctttctgagaaactgatttctcatggcacaaccaggtttgccagagccagttggaagtttagcaatcttaactgtgcttcagaaggtcagacccagccgaaacccaggctactaagtatctaggtattggcacctcggggtggatggcttggggagagagaagggggtgggggtggagagagagagagagtgagagagagagagagagatgcgaggggaccccatgtgttccacaaattgcctctccccaacacccacccagccatgagtatatgaaataattcctcctttgtccgccagctggctttcaaagctattgggatgagcctgctggacctgtctgggaagcttgttaaactgcacggagtaagtcagggaaagggaggggtagggaaaagattaaagggcgaatacagtctgtgtgaggcagtggctctgactctaaagaagcagatgatctaaggaaaggaagagcttccctctaaaaccagagactgcatgcaatgcaaatgacctgtgtgcagctgcctctggcaggcagccacccgcctccaaagaataaagtcagagcaacaattcactcctgaaccctgaagcttagtgacttcaaacaagaaaaaagaaaagtgacatgcttttttccccctttcccgagtgaactcatcctttccccaaattgtgctgatgacctcatcatctgcagctgtgtgctccaagctctctcaccccctcaatccctggggatcacatctggtgtggagccttggtacctggggctacaacatctggaaatgaccgcctttacaagtggggtgttttgtaaccaccttttactctgtttgatgcagccaaggggaagggaaatcttcagcatctttttcttgggagatagccctctcgtctttgtgcaataaggatttgcagggacagtgatgtcagggttagtgtttcaggtaccttttcatttttcacctttacattcatgagtgactgttggtctaacctgagaaatgatattggtctctttgaaccaatcctgcttgtgtttgtttgatggtctggcttttggtttgtttatgtcctcactgacaaaggtaatgttattgtcgatatgaaaaatcaccccaattatggcctggctcggctcatgcctgtaatcccagaactttgggaggccaaggtgggcagatcacttgaggccaggagttcaagaccagcttggccaacacggtaaaaccctgtctctctaaaaaatacaaaaattagctgggcatggtggtgcatgcctgtagtgtcagctactcgggagggtgagctgggagtatcaccttagcctgggaggtcaaggctgcagtgagctgtgattgtgccactgcattctagcctgggtaacagagtgagacccagtctcaaaaaaaaaaaaaaaaaaaaaagagagagagagaaaatacatcatcccaattagcagaattaaatgggctttagaaactacaatggtgaaaatggccctaaactatttatgtctatgggaaaacatatacatttaggaaggggactcttttcctattgtgagaatatacattgatccaactaagtttggaaaacaatttggcaatcctctctatataaaggaacttaaaaatgctcatatactttcattctgaaatttcatttctagaaatctcttatccaagtaatatagaaattctaaactatagtatgagatcttcattccagtattatttactatttactgcaataaaacaaaaagaatccccccatcacataaaacagagacaacctaatccaatgttcaacattagaagaagggctgtgtaaattatgttacatccatataatggaatgttatgtagtcattaaaaatgaaaattatgcaatgccttgtttatataatgctagaaaatatcagaatataagcatgatttctactttatacaaggcatatatgcatggacaaaggaattgaaagaatatatatgccaattccacaagtgttgtttttaggaggggatgatgttactattatttgtttttttatgcattttcatgttttcaacttttccacagtgagcttgctttacttttataattaggaaaataaagttattttaaaaggtgggaaaatgcaaatcctttgcaggcctccttggcagaatgtaatgaattattatcctatgcactataaactaaagtggtgtattagctaggcctgacataagaaaatggcaaactgtaggggagtttatatttaattctagctgattgttattatgagaaaatataaatggctcagagccactgaatctgatttttctagataagtcctaaatcccgattttaaagtggaatccactgatttttaaataaaggcgataaattcacatttaaaaaaatcaattacatatgttgggccagcaaaatatccagcctatgtggcattattttgaaactcactagttagaaaatgcaagtgcagtcctgtggagacagtcaccagccttgggggctgcggggcatttcacttcacttcattactattaataatgctgcagtgaaagccttctacttatttcttttcacagctaggcaggtatctccctaaggtaaactgtaaaaagatggatttcagattcaaagattacattgattttttatacatattgtcaaatagtgttccagcaagttcaaatgcattacttccattaactgttcatggtagcccttctttttcacactatcataagtatagagtttggtcaagctttgtcatagatgaacgtttatatcaaattatatttatattatattcgcttaatgctattaaacagatattgtatgtttattgacctttggtatttcttcttttattatttgcctgttcatgttttttgcccatttttaagttgtctctgactttttcttatggttttatataaccttttttttgtataccatggacagtagctatcatatgaattaagttaaaaaatttttttttcttttaatcttgtataatgggtaaggtttttttgttattttaatgtatgccatgagactattttaagtgggaaattaattttgcttcagagaatatcttgaggagtcacttagatgataaagagtgagggagcagttcatcaggaaactgtgaagcaaagggctagccaaactcataggcaggctggaaaacattaaatggaagacacactaataagagaaaagtaggagatttttgcaatacatataattgataaaggattagtattgagtatatatatgaataacttacaaattgagagaaaaaggcagacaaccaatttaaaaaacagactaaagatttagacagacacttcacaaaagaagaaatccaaatggtcaataaatacacgaaaatttcctaaaatctaatgagtaatcagataaatataaattaaaacatcaataaaaacacacttagatgtttgctgatgccaaatgtttttgaagatgtggaatatcagaaattctcctaaatcactgattggactataaatgcctagtgtagggacacagaaaaatgtgtgtataaataatagttattatattaaggtatatatacagtcatatacattgaagcattgtttataatttcccctaactggaaacaatgcaaatagccatcaacagtaaaatagatgaataattgtaatatgaaaactatacagctgcgaacatgaatacattaaaattacatgttccagcatggacaaatcttatcaacatgagctggggaagaaaactgagacaaaaagaacatatccaatattccattaataaaaagttcaaaaagaaactaatttacatggtttacggatgtatacctaggtaataaaactataaagaaaaacacgaatgtagttactagcaatcttagaatattatttatttctagcagtggagtagtggttgtgatgggaaaagatgtagtgtgtgtgtgcatgcgtgtgtgtgtctgtctgtgtgtgtttcctaaaatgtcaatggtgctgttttacttgatccaggtgttctctatttttctgcatttaataatcaaatagaaatgtggagagttagaaaaagtagagaaatgagaggatgtgaaaaaaaatactgtgagagacagggatagacaacatggcaagaaactaaagcctgcagaaaaatattgttaataatatattccaaatgggctatacaaaggagttcttaggataaagctacctgatattcaatttgatattgctggcatttcttttcacattctaaaccttcaataaactctgttaaataaatattttgaatgagattttaggaaaatcaaagaaaagtaaccaacctataaattaatttagaacaaggattttttgagaaaggtgaggagtggccatgagcatgtgagcccctgaatgtgtacagtaatcttggagaagggatgaagagtaccaaaggatctggaatcgggcttcagtcaaatggatttgagtctctaaagaatagtgccttacctgatgcccagagatattggtttatggcagtattttctcttctttcttccatacagaagtctaagacttataggtaatcagatttattggtctttattctttgatttctggttttcatgacatgcttaaaagacattttatcatgtttgagcatctaaatccttgatttgtccagagttctacttagtggaaagatggaaggagtgcttacttttgttttcccaaaaaaaaacccagctcaatctttttctctgataatttgaaatacctcatttaaccatgtgttaaattttcatatttacacacactctgtcctattccattgattctattcctgtgctacttctatttgattactataattctttgataaatcttaaagtctgatagggaaagtcttccttgtcagtattttcttggcattgcccctttgattattctttcaaccgataggatcattttgccatatttaaaaacaaaacaaaacaaaaaccctcttgggacttctgtagataagtcattgaatttacaaataactttcagtagatacacagaatattctgtttaagaacttagtgtctctaattattcagttattttttgtatgtctctctattgggttacatattttaaaaatcaacatcctaaatatttatcatctttaaactatcctgtttatcagtttcagcatccagtattaattttagaatctatattgatagacatttgcttatatattaaaagatcaactacatttcattaggggatgtcagttgggtgttaaaatacattacatatattaaaaataaattatatataatttctatttaagggaaagtcttcccagattctggcactgggttgataatctttcttttgggtggtgtgagctttcaagttttcttgcttttctttttcttcttagaaattttaaagggaagctgggagaataccccaggaaactctagccaggtaccattttaaagcagaagtctgttcactgactaataaataataaaatttcaaggcatgatttatatgccttaatgctactcagggttacaaatccagtttgtactttatttcaaacccattcctttcaccttaattggtatatgcatccaatattttgaatgtagatgatttcagggtatactcaatatcaaggcatgtggactgttctaccacctgttattgtttcttttcaccagaagaaactagagcagggatcttgctacttttatttaattctgactttagacctcttatgataatcaaatgtcaattgcccaagactagggatggaaaagcactatactgtgtgctggggggttcttcaaataaaagattgggtaatttatatttttaatataagtgatttagaccctgaggctttgatctaattaagtagagaatcaaattagctggagattaaatgaagatagaatgaggggaagtcttgctggctcttgagttttctaagaaaggctctttgcagtgcagtggttctcaaccttggctgcatgttggaattaatcaaggagcttcaaaaaaatactgatgcccaggccccaggcccagagatttcaatgcagtttgtctgatgagcagcccccgtatcaggaatttaaaagtcttcccaactgattctataataatatgcagctgaggttaataatgacatagttcttaatcccagttgaactaagtgccacctggaggctggtttaaaaatatacattccagggctctatctggatcccttctgatacaatggactgaattaggctctaggaatctgcatttctaataagtgtccatgtgattctgatgttaatgattcctcctctacaagatgtatctgactgtagtcacctctctccccatccacctttaactcagctctcagaatatctttcttaaatatatatatatatcttcccaatttaaaacattcactggctgccccttgtctacaaaatagtctttagtgcaactttccaggcctccccagccccagcctttgtccatcttcttggccttctcacccacttcatcccaatctctgtctaccatgctcattgcatcctttcctgattaacttctggcttcttttagagtctttgcttaagcagttacctctgacttcatagacctttcccatcttcaaccacctaatcctgctcttctagcagctggaattccaacactttcatgaaaatttgtttgatcttctaaaattaggatattcacactttcctccacatgcctattgcaactgatctgcacctctcccttatttgctttggtttggttggacctgagctgcggaaagttgagttcatcttacccctctgtgcatagcatcttatcttcatgggtcaatgccaggatcctctaatatgtttgaactgttcataaacatgtgtgtaccctcctaaaataagacatgctgcctcaagtatagttggttttgttctggaaacctcactctttttttcacttcaaatttcttttatgatctatccacacaactaaaattaaatcaaattcatttcatctacccactgcatagcatcccttagagggcacttaccaccacattttactcttcttttcccgtcttaatggatatctagtttgccctgaattctctactgccacaaggaggccacactgaacattctcttaggtggcccctggtggatccatatgataatttttttagatatatgccagagaatgtaattacctagccatagggaataaactctcttagtttctccagatactgtcggaatgctttctggactagctgtgcagttacacctcacttctggtcttaggcactcacctcctatagtgtacttatccctggtgaggattatggtcccataaatcatgctggcacgggaaggcaccatttatgaacttatttataggaaaaagtgaatcaggatcttgaagttgcatgtgattgtgcaaaaccctttgagatatttttatgtccgcagaaacagtaagtatataaactacatacttactaaggagatcatcaatgatattttataagctaaaagcaataatagatgtttttatgaatggaagtaagagatccaaaggtcttgtctgtcctgcaaaaaaaaaaaaaaggtccggaaaacatggtgattacaccttgattaggccaattttatgaccctaagtgactcaaagagcactttatctgagatttttgctgcaggggaaataatctttcaaagtcaattcacaaatattgaagttttagagacgggaagaatgttagtgtggaaattgctgttagagagcaagctccttgagaagagcatggaaaaataattgtgtacagttaacacttttggagaactttttatgtaccaagtactgtactaaacaatgtataaacattatctaatcttcattaatcctgtgaataggtaccatttttgtcatccctttttaaagatgaaaacactcagagaatttacataattttcccgaagtcatacaattgctaagtagcaaagccagaatttaaatctagggatttttttaatttttattttttaattccagatttcaagctcatgactaatacagaaaaagcacaggtttggagtccaacagaccaggttcaaattcttgatttatccataacttactagttgtatgatgctgggagaaattatttaacctttctgagcctcacttttctctaaacaatgggactagtaggagtatgttctccagagagttatgagtataaatgagcacaatatatgatgtatattagatgcttagtaaatgttacttcccttattacatcgcttcttaccagcttctggcataggttagacatttatatgtttattgaaaaacacaatagatgattaaaaatttttaattattatctgaagtttcacctttattaatttggtaggacaaagatctgagagaggtaggaggatgggccctaaaaggattgtcttgacaagccagaggaaaacctaggctattttgcagtttccctgaggactgccctggcatagtcccttccaagcatagtcaatgagttacctgacttatctccagaaatggagaaacaaagataccagcagagcaaccacatacaagctcattttgcctcttttgccaggcttcatgcagggagtgttgcgggttcacacagctatgaaccaatgcaaactctcccagggaaccgctggagaggaaattaattaacccctgccatggcttcccagtggggtgccgggaattaagctgtcattcctcctggatgcttggatcagtcccactctggctgtcttcgagtctgaatgaatagcccatctcccctcccctcccagcacccttagactgagaatgctgctccaggcaggtaagatgagcattccctttcagaggcagaattgtgcagtcactgccacttgtttctagggctggaaacttaggagaaacctcttccagggggatcataatcagaaatccgtagctaaagtaatgcgatttgcagagaccttgagaaagtagctttagctgtggacaccaaggaaactgctcagcatttgggattctctggcatctagaccattgttagctctccaaagggaggctcatgccatgtgaaattcaaagctgttgagagctccacttttaatgagatctttcaaaggggatagctcaaatggtccttaagaatcataatgtcaggtggatttcatggtctagacagatctgacattgcccactccccacactttctttctttaagatttcttccataaaccaacaataacaaaaaaataaagttcttatgggaaggtattgatttattaatagaagctactggttttcggcattgatggtcccagggactttcactacccagttatgatgactggctttccccaccaagcctccagagctcccagcagtcgatttatcaacacaggatgacaacttcattgttgttctctggaaactctggctcttaagaactacttggggttttaggctagaaatgcctttgggagagcattcttgtgtggagtagtaaatctgctttaaaaacactggatcttttgaaaattgagatcgaaccaacttcttgcttttcccaaccaacatcccgaaggaagcatgttttctcctggaactctctaagagcaaatcaactgggaaaaaaaaaaaaaaaagaaaaaaaaagaaaagccaccctaatttctggcagtctagaactgtgggagtttagcttgggtaacccagatattataacagcttgtgtaaacaaaggaactcacattaatatgaataactcagatttcctgcttgtattaatttcccaatgctgctgtaacaaattactacaaatttggtagcttaaaacagcacacatttttcctgttacatttctggaggctggaagcctaccatcagttttactgggctacaatccatgtgccagcaggactcgttcctttaggcagctctagggagcatctgtttccttgctttttccagtttctagaggccatcttcattccttagctcgtggcttcttctcccgtcatcctagctcctgcttctgttgtcatttccccaacttacctgactctgacccttctgcctccctcttgtaaggaccactgtgactacatcaagcccaccaagatcatttcaggctattctccccatttcaaaatccttaataaaattttcaagcccttttcaccatatacataaatgtaaagtaacactcacagattttgagaattagaatgtggatgtagctggggagccattattctgcttaccacactactcttgctctcatttgctcatgcaggacctttggctcctgcaatgatccctaaagtgttacttggagttcctaatgggtgcccctgacccaccccatttgttcacagcagactccctattgttaaggctggcccactcctcagaaagtgagctaaggaaacctcatgatggcacccaagatgggaactccaaggaaaccaggggtccactgtccagcagcactggatccctggaagagaagtggagagtgttctctaatttggggatgcaccttgtcgcatggacactgtttgtagcagaaattctacaaggcctcccttgaaaagagcttctgactctaatcctcttctgacaggatagaaaaccaatccaagaggccaggtggggatcaggacacaggcatgatgccaaattcagccctatgatgtgccaagtactgtgctattgttggggcttcagagatgaaagacagtcccacctcctgaggatctgcacagtctaactgttaaagcagactttccacattttcatgagcggaggaatcatgtgggatcctgagaaaattaaaattttgattcagtgggtctgaggtgggcatagagattctgcatttctaacactttgagtagcaagggtctaggggagactgaccataaacagatgattaattatggtgtggtctgagaagtgcattgccacaagatgctcagatgtcgtgggtgcaaaggaatgcacctagctaagaatgggagaaggagagggaatgactcctagaggaagtgacccctggacagagtcttcaactttgaatgaaagttttccaggtaaagaactggagagaatgtaggcagggagacagagcagcatgaacaaagagatttggagagaggaagttctagaactgcaagaattgaagcatgactgcagctgagagctgaagaatagaggaagggcatgagatgaggctgttgaggtaggcaaagtgagcgtgatcattcaggactttgtactccaggctcagaagtttggacttggttgagtaagcaacggggggtcaggaaaaggagaaaataaaggcagagaattctctcttttactatctgttctgaaaaatgtccaccaagttttgattggcaaattactgggtaattaagtgaatgataaaaaaaaactttgtttttaaaaagtaggtcttatgtagaacctatgggcatatcaaaacaatgccatatttgaggtcagccaagatctgttccattatagaatggtgctaggggccaagccaggttctgacaccactggaaataagcctgggtgcatggatgggatgggatggggatgggggagaataggaccagctctgctggctcatgagacagggagcactgtctccaggcctagctttccctcaaaatgccttttctagtctagtcagcatattactttaaaaaatcttcatagagatgccatttttggagagtgtgcatagggacaagactcagaacttgatccccatgctccactcccacccacacccctgcccaaaggtcagaatgaagttgtagaaacaggcatggatgtaattgctaaaggaaaattataatctggagggtaaagatgcccaagatgaataaaaatgtctctcgttgattaaatacttactctgtgccaggctttgtactaggactttaaaatatatcataacatttaatcctatataatttgaggagataggcattatttttcctctttttttttcagatgagaaaaccaaggcttaaagatatattttcattttccaaggaggtgcggttggagattgtaaaaattaggatttgaacttgggaatgcttaaccataaagctgactctacaaaatcacctgaatcaacagcaaaagtaggttgtagttcaggtaggtagctggcaaaggatgagttcaatgtgttggagtagggaggtggtccaggcaaagtggttgagaatctgggggtagccatccatgtggctccaggaagacagatggtgaagagagagtccgtaccagggaggtaagccagacagtaagtagggccccggttagaatatctcagtcagaatggtcagaagagacactacagagataagtgttcagagataagcaggttaaacaggatagaggcacagggaaatcgactggggcaaaaatctacttctttgaatatggcactaggtagagatgagcctcagaaacaaggtggacatcaaattttcaagactggtcaaatgatcaggggccattggagctcctaaagagtcccccctattacgctatgtgctcacagtggactcattattcttaaggccggccccctcctcagaaagtgagctaaggaagcctcatcatggcacccaagacagaactccaaggctcctaaacaatacatgtattttaattgaccacttggtgtaagccccaagaggccaggaaccagttttcttccaatcacaaaagcaaagcaaactgagaccttggagagggactggcatacagctggagttcagtacatctcagataaataaatgcctgagtgtgggggtgtctgcttttccaattaagcttcattttgcaatcaaatctagctttttacccccttccctacctggcttccagtctctacaaactttagagtgcttgagtcaccttgggggctattttaaaatgcaaattatcaggaccgccttcagtagatctgaggttgggggctgagtaatgttttttcttttcttttcttttttttttttttttgagatggagtctcgctctgtctcccaggctggagtgcagtggcgcaacctcggctcactgcaagctctgcttcccgggttcacgccattctcctgcctcagcctcccgaatagctgggactacaggcgcccacaaccacgcccagctaattttttgtatttttagtagagacggggtttcaccgtgttagccaggatggtctagatctcctgacctcttgatccgcccacctcggcctcccaaagtgctgggattacaggcgtgagccgcgatgcctggcctgttttttctttttttaaaatttatttatattaacaaataatattgtatatatttattgtgtacaatatgatgttttgaaatatggatgcattgtggaatgtcctaatcaagctaattaacatatgcattacctcccatactttttgtgtggtgagaacacttggtaatttttaagaatacgatacacggttaagtatagtcatcatgttgcataatagatctcttgaacttattcctcctctctaaatacaattttgtatcctttgaccaacatctccccaacatccctccctgctcaacacagataaccaccattctactctgcttgcgtaagttcagcttttttagatttcatatgtaagtgagatcatggagtatttgtttttccgtgcctgacttatttcacttagcataatgtcctccagatatatccatgttgttgcaaatgacaagatttccttaggttgaatagtattttatgtgtatatatgccacattttttttaatccattcatctgtgatggacactaggttgattccatgtcttaactatcatgaataacactgcagtgaacatgagagtgtagttatctgtttgacatactgatttcatttcctttggatatatactcaagcagtgagattgctggatcacatatggtagttctatttttgattttttgaggaccctccatactgttctccatatggttgtactagtttacattcccatcagcctatgcaagggcttcctttccttcacaacctcaccagcacttgttatcttttgtgttttttgttttattttgtttttgttgtttttgtttgtttgtttgagatggagtctcgctctgttgccaggctggagtgcagtggcgtgatctcagctcactgagacctccacctcctgagttcaagtgattctcctgcctcagcctcctgagtagctgggattacaggggcccaccagcataccggctaatttttgtaattttagtagagacagggtttcaccatgttggccaggatggtctcgtttctcttgatctcgtggtctgcccgcctcagcctccaaaagtgctgggattaacaggcgtgagcctctgcacccagcctatcttttgctttttttgacaataggcattcaaacaggtatgaggtaatatctcattgtagttttaatttccatttccgtgataattaatgtggctgagcattttttcatgaacctgttggccatttgtatgtctccttttgagaactgtctattcaggttctttgcccatttttaaattgggttatttgttttcttatcattgagtagtttgagttccttacacattttgtgtattaaccccttatcagatgtatggtttgcaaatattttctcccattctgtaattgtatttctctcaatcactctgttgattgttttcttcaccatgtagaagcttttgagtttgatggggctgagtactttttaactagcaccagtgaaattctgatgcaggtgatacaaggtttgcattttgaaaaccattgatctacactcttctgaaccttataatctggggctacttgaccctttccctctctccctctaggcctacctctagctctcaagatcagtcctgaccatagatatgtcttgagtctatgctttcatcccccaaatgattccatcctctgaagcctcttccatcctctgctcatctaaaagttacccattcttcaaggcccagagcaagtgcatatcctgcatgaatctgttcttgctagcattagctctgaggttgggcaactctacaagttgctaaaagcattccctaaaaaggagcttctgttgtcaagtatgtttaggaaataattgttattcaaagttaagcaggttccttttctgctgtcttctcagagcctccaacatgctagtaagcaatatagtttagttgccagtaagcaactctccaaaggaacatggctgtgtttctgtagaaagcagttttgaggacatcctgcttcactctgcactcatcacaacttctgtgatcttctttcttatatttatgatccataatacaaaatagggcacttacttatattatggttaatcttctctttccagctgtgccaaacactccctgaggtcaggaatcagctatgatacttagttctccccacacctatctttgggatgtttacacaatcagagctcactaaatgctcccgtgaagatagaattccttttcccaagtccaggtacgagccactaaggtagatctagattttaggttcagttcaaaactgtggtctccccagggagtgtttcttctaagagactttttaaaacatgagagttaaaaaaaatcctgccttatctttttgcagagaggactgaactattaagctcattttacaaatcaactttaaaaggaatagttgcctcttaaaggaatcttagaacattcagacaagtaaaaagattgtggcccaatgtatacctattgttaccattttggttcttatcatgaagttttattttctgcctttatacttatacatgaatgtgaattcatttcttttctaccatgcttcttttttgtatcatactttaaattctggggtacatgtgcacaacgtgtaggtttgttacgtaggtatacatgtgcctgttggtttgctgcacccatcaactcgtcatttgcattaggtatttctcctaatgctatccctctgccagcacccccgccccgacaggccctggtgtgtgatgttcccctccctgtgtccacgtgttctcattgttcaactcccacttatgggtgataacatgcagtgtttggtttcctgtccttgtgatagtttgctgagaatgatggtttccagcttcatccatgttcctgcaaaggacatgaattcatcattttttatggctgcatagtattccatggtgtatatgtgccacattttctttatccagtctatcattgatggacatttaggttggttccaagtctttgctattgtgaatagtaccacaataaacataggtgtgcatgtgtctttatagtagcatgatttataatcctttgggtatatacccagtaatgggatggctgggtcaaatggtatttctagttctggatccttgaggaatcactcgaggaatcactgttttccacaatggttgaactaatttacattcccaccaacagtgtaaaagcgttcctatttaaccacatcctctccagcatctgttgtttcctgactttttaatgattgccattctgactggtgtgagatagtatctcattgtggttttgatttgcatttctgtaataaccagtgatgatgagcattttttcatatgtctgttggctacataaatgtcttcttttgataagtgtctgttcatatcctttgcccacttttcaatggggttttttcttgtaaatttgtttgagttcattgtagattctggatattagccctttgtcagatggatagattgcaaaatttttctcccattctataggttgcctattcattctgctgataatttcttttgctgtgcagaagctctttaatttaattagatcccatttgtcaattttggcttttgttgccattgcttttggtgttttagtcatgaagtctttgcccatgcctatgtcctgaatggtattgctgaggttttcttctagcatttgtatggttttaggtcttacctttaagtctttaatccatcttgagtcaatttttgtataaggtgtaaggaagggatccagtgtcagctttctacacacggtagccaattttcccagcaccatttattaaataggcaatcctttccccatttcttgtttttgtcaggtttgtcaaagatcagatggttgtagatgtgtggtgttatttatgaggcctctgttctgttccattggtctatatccctgttttggtaccagtaccatgccgttttggtgactgtaaccctgtagcatagtttgaagtcatctaccacgcttctttatgtttccgccagagcaggatgacagtgctggtggactttaaaatacatcatcacatttagtcctatatgatttgatgatataggctttattttttctttttttttttcagatgagaaaactaaggcttagagagatatttttatttcccaaggatatacggctgtagattgtaagaactaggatttgaacttgagactagttaactacaaagctattagtcagtatccctaacaatctgggctccaatttggtacctggagttttctctcgaatgccaagaatttttctgcatggactgtctctgaagacaatttctttttgacatgaacatgtgctgaaggtggcaggaggggctcatgaccaaagagagctgccaaagaggagccctgctctcaagaaggtgtcagtgtcagaaaggacagagcccactgtaagcttagttcagggcaagcaagagaaacggggaagaaacagctcacttttagtggcaagctatgctattacaagaaaattaagagaaagcaaagctcttaactttccatttgtcttctcttctgtgttaaggaatattatctttaaactgaagaggagcaaacctacatggcttggaggtttgtgtgtttcccttgatgtaggaaaagcacaggttagttgaggagtgaaccagatagcaaaacttatgcccaagtctttaggctctaattattaatgtatcgggaaacttgaaataattctaaatgtgatcattcagccatgccaataatctccatggaattattaagaactggagacatgccaaaaagtccttattttcaaaagtagtaggaaagacaaaggatttctgaaacttcccttggaaaaatttttggatgaatttttaaaaatggatggtttataagtacttgaaaaattaaatggagatcactggaagtcaatatgagtttattacaaagacgggtaacagacacaccatttctttcttaaaataatgagatttaaataagacatccatttattaagagataataaccaatatctatatggtgattaatatttataaaatgtgtaacctcagctgatcataatagcaagtcttgaatcaggtgttattagtgaatttgtccctcaatttacaaacaagaaaacttttaaaaaaagaaatcatagaggagttaagtaaatttttacaatcttcctagtaaattgtggaatttaaagagagattttctaactccacaacctacacttgtttcttataccacactctatctagattttgtgtatgttgattttagccaggcaatggccaaaatctttactgatgtcctcatgggacatctggagcacaatgggtgactgtaaatatactgtgttggttactggttgaaccaatataaccagtggatattgatttgtggtttaatgtcatcttaggaaaaatttttggtcataagtgtgccaaactcccttttgtgcagttctgttcaataatttttagcaatatttagagagaaatagaagcaatatgtttatcaggtaatactagcacactctgcaattcaaaacttagttttgcacttaaccctcagtctgtcctagagcatatagtctattctactccattttgttatgctgatttttttctagtcaatttaaatgttattatctcagtctcaatctattcactttgggataaagcactgtctttgaaggcttcttccccttccctttccttcttcctttctttgggaagacatctgtgcacagagggaagctttcaaaaacaacatcgtggttccaggaggagggctccctagcttctgtgtccttgtccagtctctgctggtgatgaaatgggtcccatctggcccttgggcatggaccagcaactgctgatgtttgaatattttatcaccgccatcagtcatgatgatctcatgttctggaccacctgtccgtacaccaggacatttcattcctttttttctccgattggggcatgtgggacttctcattctctagcgtgctttggtcaagctatagggtatggtgtgcactacctcagaacccttgccctgaagacatcccatggttctgtactgaagggcaatatgcctgagtggttgttttccagacaagcaaggcacagtccccttgggccccaagagtcgtcttccacttactcatgatttctacggtcttctcttccagctgcccccaaccttcagtttctaaattgagatattaggaaacctggtgggaaatgaggggatagagggggtcacagtaattctctttacctagctggaggtctgccatatgcaagggaatttttcaaactctttgaagaagattccccaagtgattgaagtgtgattttggacacaggtctttctgagcccaagctggtcttatggagtcatagtagtatggtgctcagtaaagggtagttattctgagcatcctcctaggtatgtggcttgagagtatacctgctgactcacttgagttttctttaaaaactctaaatgtatcaatatgttggagaagcaagttgtacttgacacatctcctggcacttatataaaagaatcctagaagcacaggcagtttctcttttatgagacatgtactaaaaatgtagaggcaggggtcaatgccagccaggctaggtgagctctgttaagtttatcctctgggcataagtctattcctccttatcagcagtttttcatatttagtttgccgtttcacaaaggatggcagcagaaaagtgagttcctgaggggtgaggtaggggaaggtggaaaaaggaaacccacagctagcatttgtctcattaaaatctgtcaaagtcagaggaacagaaggcagcaaggagttaaaatcagatgtcagtagctttcagaatatgttgacatgtgggggagcaaactgtagtgacagtgtacccttcagctgccttggctctcagctggtaataataaagccctttgcacactgcactggggaggcagacagcagtctagcacccgaggacaggaggtgcaaaggacagtaacagctgataggttataggaccttaccatgacttactgtcttttaagaaacattttctcttgctgaaattggattaggaaagccagtgtgattttgtttgtaagaagtactgtgaagatggtttcactctgaacagttcagatcattaacctttttacctgtacttgtaaggctgaaaatatttacacttatattaaaggaacaaactgaaccttatcaatccagactctatagttaatagcagatgctgtaagtgatacagtcatttacttagaatggtgaggttgaatattgacttgaattaaggtattattgtatagtgtaaaaaagtaaggaggcagatagataggggttcaaatcttggctctccacttactgagcgtgtcccctcggcaatctccgtaatttctcagtgactcagttttcctcatcttcaaaagagagatgcttatttcttgctttcaaagtcattgtgaaaatttacataatagtgtaaatagtataatagtatactgtatgtggtatagtcaactctcaatagatactagttttcttgtcttgcatgttttctttatattttagaatctatttaatctacttatattttagaatctgtttatttaatttcttgctcacccatagcctaaaggatcaattaaggacttatagctactccaggatacactttggttccccaatcttgcatctgactctatatgttccaaacataccactcacttcctctcaagacttgatcagatcatctaacggggtcaacacctctacctaaattcctgctgctcagaaaaagggtcatttgtgctcttttggtggctctgacctcagcctgtagagtaggtatttttctgctgcaacaaagaagacaaagtaactgctggtgagaaataatttagaggaaggaaaaggatatttctttctagagaggttggggcaggaaaaaaggcgaagtaaatacggtaataacaggtttggattaacatttttaaaatcagaaatcaggaaatctggcctggtaaggccttttttttacttttgaaagtttaaataaaaagtcatactacagatatgaacttaaattgacaaacagatatttaacaaatggcctatatcaagaataaagataataagtaaaagtaaaaaacttcacagaaatgagtaaaaataaatgtcagccaatctaatatttgctatggagacctatggtcaaaataaccatggtaataatttaaaatagacatttctgtgaatcaaagactaagaagagtgcatagtaaagactgtgttaataaatattgctactattaaaacatataaggaacaatggatagtaaggaagttctaattttccacacttctccatcctcacactttagataactgttagaagtttggtgcatatttctcagaattctaaagcttttattcataagcatatatttaataggcttatttgcagatttttcaacttgctttttgtatttagtatctttacatttcaatacatttatattttctcaaactagcaagggaaaaatagacatgaaagtcaacgtttacaagcaaagtagacctaagacccatagtcaccaatgtctaacttcctcatttatacccctggctgaattcctggaaataaaacttatgcatcttcatcggtgtctatggttggcacttctcatcggcaagatagtacactgtgtttccagccattgctgtttccagtccctttccgagtttatttctagtggggaagattataggaagttattttaatgactacatttctgaaaaaggttttttattactctccaaaacctttattgacttctctttttatactggaaatttcaggtagaatattctctgactgatctacaaggctgttgattgtttttctgtgattatgatttactatctgattcatctaactgaaatcacagctataatgttataaatcataaatcatttgaccttttccagtaaaatgaagtaaatcagaagatattatactcagaaatggctcaattggggcaaatagaagaaaagactcactatttcatttttaagcctcaagatcacctaacaaatctgagcttcatggaaccgtagcctagaaccatgaccaaaaacctgaaaaacctagcttttagcatgtgcctctaaggtaagaacgaacgaaaaagcccaagtgttgttacggtttcatggaagcatgagactggtcagtacctctctatttctctctcaccgggtcctcactttatctttttgcccttccaaatcctccacatccttcctagctcagctcacaccctctccatgatctcttctctggctttttcagaccttagtatttctctaacccacaaagcttcttaaaccttcagtctaattaattcatccctccatccttccatcatacagttatttatctaataacagatcttggaatacaaaggtaagtgaattgatgattttcaatctaaaggaacttacagtttacttagattatcactaaagagtaataacacactgtaaattctatcattatttcaaaactgagagtcttctttctcctaaaatactaaggttttaatatttgtttgtttgctttaaagaaagtgtgtgacagattctttgtattcaagccacagagagcactttgacggtttttagtgtatcttgcattgtatttaaagtaacataataattttcccacatatatttcttttttgattttttaaaaactgtgctaaaatatacatagcataatatttatcattttaactatttgtaagtgtataattcagtagcattaagtaattcattatgttgtataactatcaccattctctatacctcaaactttttcttttcttaaattcttttttcccacaggttattggagaataggtggtctttgattacatgaatgagttctttagtgttgattggtgagattttggtgcacacatcatctgagcagtgtacactgcacccaatttgtcgttttttatccctaccgccttcccacctttccccctgagtccccaaaatccattgtatcattcttatgtcttcacatcctcatagcttagctcccacttacgagtgagaacatacaatgtttgattttccattcctgaattacttcacttagaataatagtctccaatatcatccaggttgctacaaatgccattaattcattcctttttatggctaagtagtagtccatcatatatatatatatataaaaaattcagaaactgatatatatatatatcagcttctttatccactcactggttgatgggcgtttgggtttgattacacatttttgcaattgtgaattgtgctgctataagcatgtgtgtgcaagtatctttttcctacaatgacttcttttcctctaggtggatacccagtagtgggattgctggaccaaatagtagttctacctttagttctttaaggaattgccacactgttttccatagtggttgtactagtttacactcccacaagcaatgtagacgtgttccctgttcacagcatccacaccaacatctattattttttaatttttgtttatggccattcttgcaggaataaggcggtattgcattgtggttttcatttgcatttcctggatcattagtgatgttgagcattttttcatatgttctttgcccatttgtgtatcttcttttgggaaatgtctattcatgtccttagcccactttttgatgggattttttttttcttgctaatttgttccagtttgctgtagattctggatattagtcctttgtcagatgtatagattgtgaagtttttcttccactctgtgggttgtctgtttactctgctgactgttccttttgcagtgcaaaagctctttagtttaattaagtcccagctatttatcctttttttcttttaattgcttttgcttttcggttcttggtcatgaaatccttgcctaagccaatgtctagaagggtttttccgacattatcttctggaatttttataattttaggtcttagatttaagtccttaatccgtcttgagttgatttttgtataaggtgagagatgaggatctagtttcattctcctacatgtggcttgccaattatccagcatcatttgttgaataggatgtcctttcctcacttgatgtatttggttgctttgtcaaagatgagctggctataagtatttcggtttatttctgggttctctattctgttacattggtctatgtgcctacttttataccagtaacatgctgttttggtgactatggttttctagtatagtttgaaattacataatgtgatgcctccagttttgttctttttgcttattcttacttgggctttgtgggttcttttttggttccatatgaattttagaattgtttttctctagttctgtgaagaatgatgtggtattttgatgggaattgcattgaacttatagattgcttttgacagtatgtttattttcactgtgttgattctacctatgtacgagcatggaacatgtttccatttgtttgtgtgttctatgatttatttcagcagtgttttgtagttttccttgtagaagtcttttacctccacggttaggtatattcctaaggttttattttttgatttttaatttttaatttttgcagctactataaaaggggttgagttcttaatttgattctcagcttggtcactgttggtgtataggagagctactgatttgtgtacattaattttgtatctggaaactttgctgaattcttttatcagttccaggagctttttggaggagtctttagggttttctaggtatataatcatatcatcaacaaacagtgacagtttgacttcatctttgctaatttggatgcccttgatttctttctcttgtctgattgctctggctaggacttccagtactatgttgaagagaagtggtgagagtgggcatctttgtcttgttccagttctcagagggaatgccttcagcttttccccgttcagtattatgttggttgtgggtttgtcacaggtggcttttattaaattgaggtatgtcccttgtatgccaattttactgagttttaatcataaagggttgctggattttgtcaaatgttttttctgcatctgttgagatgatcatgtaatttttgcttttaattctttttatgtggtgtatcacatttattgtcttgtttatgttaaaccatctctgcaaccctggtatgaaacccacttgatcgtggtggattatcttttgatacgttgttggatttagttagctagtattttgttaaggatttttgtatatatgttcattaagatattggtctgtagttatgtctttcctggttttggtattaaagtgatacaggcttcacagaatgatttaggaaggattccctcttcctctatcttgtgaaatagtgtcaataggattggtaccaattcttcttcgaatgtctggtagaattcatctgtgagtccatctggtcctggacttttttttgctggtaatttttttatttcatgttaaattcactgcttgttattgggctgttcagggtatctaattcttcctgatttaagctaggagagttgtatctttccagaaatttatccatctcctctaggttttcaagtttatgtgcataaagatgttcatagtagccttgaatgatcttttgtatttctgtggtgtcagttgtaatatctccagtttcatttctaattgagcttatttggatttctctcttcttttcttggttactcttgctaatgttctatcaattttatctatcttttcaaagaactagctttttgttttatttgtcttttgtattgtttttgtttgtttcaatttcattaaattctgctctgatactggttatttcctttcttctgctgggtttgggtttggtttgttcttgtttctctagttcctggtgtgacctaagattgcctgtgctctttcagactttttgatgtaggcatttagggctatgaactttcctcttagcactgcctttgctatatcccagaggttttgtcactatcattgttcagtttgaagaattttttaatttctgttttgatttcattgttgacccagtgatcattccggagcagattatttaatttccatgtatttgcatggttttgaaggctccttttggagttcatttccaggtttattccactgtggtctgagagagtgcttgatataatttcaattttcttaaatttattgaggcttgtactgtggcctatcatatggtctatcttggaggaagttccatgcactgatgaatagaaggtatattctgtggttgttgggtagaatgttctgtaaatatttgttaagtccattcattccagggtatagtttaaatccattttttctttgttgactttctgtcttgatgacttgtctagtgctgtcagtggagcattgaagtcccccacttttattgtgttgctagctcatttcttaggtctagtagtaattgttttataaatttgggagctctagttttaggtgcttatatagttaggattttgatattttcctgttggataaggccttttatcattatataatgtccttctttgtctttttaaactgctgttgctttaaagtttgttttgtctgatataagaatagctactcccatttgcttttggtgttcatttgcatggaatgtctttttccacccctttgccttaagtttatgtgagtccttatgtgttcggtgagtctcttgaaggtagcagacagatggttggtgaattcttatccattctgcaattctgtaccttttaagtggagcatttaggccatttacattcaactttagtatttatatgtgaggtactattctattcatcatgctatttgttgcctgtataccttgtttttttttattgtattttttataggtcctgtgagatttatgcttaaagaggttctgttttgatgtgtttccaggatttgtttcaagatttggagctccttttagcagttcttgtagtgctggcttggtagtggcaaattctctcagcatttgtttgtctgaaaaagagtatatctttccttcatttataaggcttagttttgctggacacaaaattcttggctgataattgtttcctttaaggaggctgaagatagggccccaatcccttctagtttgtagggtttctgctgaaaaatctgatgttaatctgataggttttcctttataggttacctggtgcttttgtctcacagctcttaagattcttttcctcttcttaattttagataacctgatgacaatgtgcctaggcagtaacctttttgtgcatgaatttcctgggtgttctttgagcttcttgtatttggatgactaggtctctagcaaggccaggcaagttttcctctattcttccactaaatatgttttacaaacttttagatttttcttcttcctcaggaacactgattattcttatgaaagatacaatgaatttctgagtttctcttcaaagatttagtctgctaacttccttgtcctttgttctcaaactcaactttcctgtttctccttgtccctagttactgtaaaacagcctacccccttcccatcagctctaatcaataactcacatctgttcccttggttacctgcacccatttttcccccaaaactgcacatctcacaagctttgccactgtaccccatgtcccccttgccttccatgtttagaaaaatattttcaagtagccaatcggctcagctcagattgtgcgtctgaccccagcccatgggggagggacaccgaggtagggattgtgttaaggagataaaaaacccctggtctcctttgctctctgtgctcttgcaatcttagttgatgggagtgctacccttctgcagaagtaaattgccttgctgagacaacttttgcctgagtgctggtttcactttgtggcaccaagcatttattcctagaagtatttttatatcaaacatttaggttttgttgtttaacataatcccagacttcttggaggctttgttcatgtcttcttattcttttttttttttctttttgtctttgttggattgggttaattcgaaaatcttgtctttgagctctgaagttctttcttctgcctgttcagttctattgctgagattttccagagtattttgcatttctataagtgtgccaattgtttcctgaagttctgattgtttttgcttatgctgtctatttcattgaatatttatcccttcacttcttgtatcacttttttgatttatttaaactggctttgcctttctctagtgcctccttgttttacctaataactgaccttctgaattcttttttcaggtaaatcagggatttcttcttggtttggaaccattgctgttgacctagtgtgattttttgggggggtgtcaaagaactttgttttgtcatattaccagagtcggttttctggtttcttctcatttggataggctatgtctgggaaggtttagggctcaaggctcttgttcagattcttttgtttcatggggtgttcccttgatgtagtactctccctgttttcctagggatgtggcttcctgggagccaagctacagtgattgttatctctcttctggatccaatcacccagcaggtctaccaggcttcaggctaacactgggggttgtctgcacaaagttctgtgatgtgaactgtctgcagatccctggattccacacctgctagtatttgaggtgtctcctgggtcctgcaggagcaatccacttccttcagagaatttgtgagttctcttcactttcctgatttattcctgcagtagtcctggagcaaaagttcatgacacgaggctccacatgctgctctgtccatctgagtgggagctgcaatctagtactttttcctgtctgtcatgatcctcttaaatctatactccaaactttttcatgatcccagcataaactctgtactcattaaacactaacttccttctcagcccctgattatctctaattctactttgtctatctatgaatttgcctattctacatacttcatgtaagtgtgatcttacagtgggtccttctgtgtctggcttatttcacttatactatattttcaatgcccacctattttgtaatatgtatcaatatgtcatttcttttaatgactgagtaatttttcattgtgtgtatataccacacttggtttatgcattcatctattgatggacattgggttgtttacatctttggctactgtgaatagtactggtatgaacattggcgaacaaatgcctgtttgaatccctggtttcaattgttttgggatacacacctgagagtgaaactgccgggtcatgtggtagttctataactttttgaggaattgccaaattgttctccacagtggctgcatcattttacattcccaccagcaatacacgagggcttcaattcctctacattcttgccagcacttgttattttaccttttcttctttagtttaggcatcccagtagatgtaaagtgttatctcattgcagttttatttgtatttccctaataacgaatgatatgaagcatcttttcatgttcttgttggctatttatatatctttttttgaaaaatatcttttcaagtcctttgcccattttgaattggattacttccttttttgttgagttgaatgagttctttatatattctagatattaattagcagatacatgatttttaaatattttctttcattctgtaggttatctttttgctatcttgataaactgataatttgatgaagttgtatttatctattttttatttcgttacctgttatcttggtgtcatatcccatacttttttaagctttttagtttgaaataattttaagcttagagaacagctgaaagaataatacagagatgtccaattatactctttatcagattgactagtttttagtcattttgccacatttgtttaatctttctctttcaatcctctataactatctatctaggtctgatagacatacataagtatagattggtagacatgtagattgatatatgcacacatcacatacatatatttgaatacattttttctgtaccatttgagagtagtttgcatggataatgaccctatgggacttcagtggtttgaaaccctgatcagtgtcaaacaaggaaagagtgccaaggctttctttccagctattgacaggtacagcacaacagcaagagggagaggtaaagcctaaaaattgccagcagtcgaatataaaaaaaaaaaacagggctgggcatggtggctcatggctgtaatcccagatacctgggaagttgaggtgggaggattgcttgaggccaaaaatttgagactgcagtaagctatgatcttgccactgcactccagcctgagtgaaaaggtgagacccagtatcttgtattataattcacctctgttttactgatgattgaaacatttcttacacatacttattggaacaacaagatgttctagtctcaccttataccttgcctgctttagcagtggaatcaatcatttgtccaagggacactgatcctttactggggaatggtatttagaaaccaagatttgggtgctaggtgtgctcattgctatgggtgtgtcattgcttctaggtctttatctgcctacctatatctatctatctatttgcaaaatcacagatttgaactgctgccaatttcagctgaacccacaggattctttcttgccttccccgattccatatctgtatgttcctttctccacagtaagaacttcagcttccaacaacacaaacacatttactcattttctcaaacctaaaagacacaaaaaattttttcagaattgctacacagacataccattataaaaacaaatgtatgaaagagttcaagatttgcttgccattcttttttcccctggattgagaatgtatacagtcaaagtcttttgttcaaaagttaattaaacgtatccttttatttttcccattcagtgtgtttacaacattcatttgaaatacagtaggattgcagggtgcagtggctcacacctataatattaacactttgggaggctgatgtgtatagattgcttgggcctaggagttcaaaaccagcctctacaaaaataaaaaaagagctgggtgtggtggtgtgcgcctgtagtcccagctactcaggaggctgaggtgaaaggttaggttgagcctgggcagttaggctgtggtgagctatgattgtgccactgtgttctagcctgggtaacataaaataaattcagttgagtttatatgtttctgtttgcatttggtattagggttttttctttttctactgccatccttactgatttaattttacctttttaatatgaaggacagtaacacatttcaaaagtcaaaaccatacataaaagtatatccagagaagtatcctccctctactattccttttatccctgttctttcataccttttgtaagtaaccaattgtactattttctggcttaaacttactgtgtttctttttgcaaaaataagcagatatctgcattttctttcttacataagaggaaacataccatatatactcctgtacattgttattttttcacctaataaggtatcctggaaataatttttatcaatttacagagatcttctccctctgttttacagttgcataatagatgttgttgatatactttagtttgttcaatcaaccttctaagacccacctgaatatgaacatgcttaaatatttggtcctcctatttttggacacttagatagtttccaatgttttgccattgcaagtaatgctgtaatgaataatcatatgcatatttattttcatattgttaaaagtttaatttcaagatagatttatagagttgggattgctacatagtaattttgttggatattgctaaattcccctttatagaagctgtatcattctgcagtcctaccagcaatgtgagtgtgcttgtttccccagagctttgccaacagattatagtcaacttttgaatttttgccaatctgatgggtgataaattatatttatgtcatttgaattgtgtcaatcttataatgtttaatttttttatatgtttaaagtcatttttacatatttttggtgaattttttgctcatgtcttttttccattttcctataggatgtctcatgtttccatcccccttgcccaatttaaaaaagctctttatacatttgggataatagttctttttctgtgatacatattgcaaatgttgctaccaatttgtcatttgtttttgtttctggtgtgtttattttttatgcaaaaaccttttacttttatgtgatcaaatttatcaattttttcattgtcacacgtggattttgagtcacatttagaaagcctttttcctttacccaagttatagacacattaattaggttttgttctagtacttatacaacttaatttttaaaaaacatggatccctgatacatttagagtttattcttgtgtatggtgggggcaatggttgtatttttttcttttttcaaatgtctacccaaatgtcttaacaccatttatttctctgtttgcctcagtcatttgagataccactttattacatactaaatatccacattagagtgctctgtttctgttctatttcattgatctttctagtcatgtgccattaccacacctttaattacagaggcattttagtacttttaaatatttggtagggctcatagctcaacccatatctcttccttttcagttattttcctagctattttatatgtttatttttccaaatgaacttcagaatcaacttgtctagtttgcaggaaaaaaaaatttgtagcatttttattggggttgaattgaatttataaattagttcaaagagaactgacatcctgatgatgttgagatattcttatgaagaataaggtagtaggcttttccgtgttattttcatatctttctttttttattattattatactttaagttttagggtacatgtgcacaatgtgcaggttagttacatatgtatacatgtgccatgctggtgtgctgcacccattaactcgtcatttagcattaggtatatctcctaaagctatccctcccccctccccccaccccacaacagtccccagagtgtgatgttctccttcctgtgtccatgtgttctcattgttcaattcccacctatgagtgagaatatgcggtgtttcgtttgttgttcttgcgatagtttactgagaatgatgatttccaatttcatccatgtccctaaaaaggacatgaactcatcattttttatggctgcatagtattccatggtgtatatgtgccacattttcttaatccagtctatcattgttggacatttgggtgggttccaagtctttgctattgtgaatagtgccacaataaacataggtgtgcatgtgtctttatagcagcatgatttatagtcctttgggtatatacccagtaatgggatggctgggtcaaatggtatttctagttctagatccctgaggaatcgccacactgacttccacaatggttgaactagtttacagtcccaccaacagtgtaaaagtgttcctatttctccacatcctctccagcacctgttgtttcctgactttttaatgatcgccattctaactggtgtgagatggtatctcatcgtggttttgatttgcatttctctgatggccagtgatggtaagcattttttcatgtgtttttttcgctgcataaatgtcttcttttgagaagtgtctgttcatgtcctttgcccactttttgatggggttgtttgtttttttcttgtaaatttgtttgagttcattgtagattctggatattagccctttgtcagatgagtaggttgtgaaaattttctcccattttgtaggttgcctgttcactcggatggtagcttcttttgctgtgcagaaggtctttagtttaatgagatcccatttgtccattttggcttttgttgccattgcttttggtattttagacatgaagtccttgcccatgcctatgtcctgaatggtaatgcctaggttttcttctagggtttttatggttttaggtctaacatgtaagtctttaatccatcttgaattaatttttgtataagatataaggaagggatccagtttcagctttctccatatggctagccagttttcccagcaccatttattaaatagggaatcctttccccattgcttgtttttgtcaggtttgtcaaagatcagatagttgtagatatgcggcgttacttctgagggctctgttctgttccattggtctatatctctgttttggtaccagtaccgtgctgttttggttactgtagccttgtagtatagtttgaagtcaggtagcatgatgcctccagctttgttcttttggcttaggattgacttggtgatgcgggctcttttgtggttccatatgaactttaaagtagttttttccaattctgtgaagaaagtcattggtagcttgatggggatggcattgaatctgtaaattaccttgggcagtatgaccattttcatggtattgattcttcctacccatgagcatggaatgttcttccatttctttgtatcctcttttatttccttgagcagtggtttgtagttctccttgaagaggtccttcacgtcccttgtaagttggattcctaggtattttattctctttgaagcaattgtgaatgggagttcactcatgatttggctctctgtttgtctgttattggtatataagaatgcttgtgatttttgcacattgattttgtatcctgagactttgctgaagttgcttatcagcttaaggagattttggactgagacgatggggttttctagatataaaatcatgtcatctgcaaacagggacaatttgacttcctcttttcctagttgaataccctttgtttccttctcctgcctaattgccctggccagaacttccaacactatgttgaataggagttgtgagagagggtatccctgtcttctgccagttttcaaagggaatgcttccagtttttgcccattcggtatgatattggctgtgagtttgtcatagatagctcttattattttgagatatgtcccatcaatacctaatttattgagagtttttatcatgaagagttgttaaattttatcaaaggccttttctgcatctattgagataatcatgtggtttttgtctttggtgctgattatgtgctggattacatttattgttttgcgtatattgaaccagtcttgcatcccagggatgaagcccacttgatcatgatgtataagctttttgatgtgctgctggattcggttttccagtattttattgaggatttttgcatcaatgttcatcaaggatattggtctaaaattctcttttttggttgtgtctctgcccagctttggtatcaggatgatgctggcctcatcaaatgagttagggaggattccctctttttctattgattggaatagtttcagaaggaatggtaccagttcctccttgtacttctggtagaattcggctgtgaatccatctggtcctggactctttttggttggtaagctactgattattgccacaatttcagagcctgttattgttctattcagaaattcaacttcttcctggtttagtcttgggagggtgtatgtgtttcaagagtattttatgatttgcttcatacaagtttagaactttttttggtaaatttatgcctaggcattttatttttgttgctaatataaatgaagttttctcttttgaattatatcttctaactattgtttgtgtagatgaagcctattttgtttttcttttaagaggtgtcttgctatgttgcataataacatagctgtgaaactggcctcaaacttctggctcaagcagtactcctgcctcagtccctggaatacctgagactacaggttcacatcacaatgccaagtttgagttactgaattttataggttaattttatatcttgctatcttgctgaattatttaagttttatcattgattctccagagtttaccatttatactgttatccatctgcatatagacagagttttatttgtctttcaattcttatgcatctaattattttgttgtatgtaatcgcattagctagtatttccagtaaaatattaaacagtagcgaatatagtaggttttctagctttttcccaactcctattgggaatgtagcatatcctcattaactaagatatatatgtagatacatagatatgtgtgtggtatgatgtttgtgtgtgtgtgtgtgtgtgtgtgtgtgtatcttcatgttttcatgtcaaataaatcaaattaaatatccaaactgaagaaatatgcatcattcttattttctggagagatttttttaggaatgggtgtcaaatttgtcaaaaactttttcaggatttaaggaggtaataagtcttttagacttattatagggaattatattaatatagtttctcatattgaaccatcctttcatcccttagataaacctcacttgataatgatatattttcttaatgaggtattaaaatctgttggctgatatgttatttaggatttttcatcaatattcatcagggatattggcctgtaactttcttttttgtactatttttaaaaatcaggttcctgtatcaatgttacacttacttcaaaaagaatttttaattaattttctgtgctctaaaacaatttatgtagctttgggattatctcgtctttaaagatctattagaattcctctatgaaagcacctgagcctggtgattttgatgagatagcttattgataattttggtatcttctctagaaatttgtcatttaaagcctcttgtctcttttaatgtcagttttgtcaaagcttattttcataagaatttatgcattcaatctaagttttcaaatttaattgtatagaagtgtatataacagtatttcataattttttaaagaagttttatccatatcaagaggtaattcctccaagtcatgtcattttctacatttatgttttctcattttttaaattaaattatttggtagttttttcattttattgacttctcttttaaggaactagtgttttgatatattaacttaatctataggttttctgctttatgctttattttctgctctgatcttttttgtgttttcttttggctttttttttctgttttaggcttttgagttagaaattataattatttttaaaacatttcatttgtattattcaagatgtttaaggttatgacttttcctcttacctgttatttaaatgtatcccatagattctaatacgtaggtttttatcatcattatttttcggaaattctgtaatttctgatttttcctttcgctcacaagttgtttaatagaatattttataattttttacatgaaatggtttttttgatttattaataattgatagttaaaaaattaaccagttttgttcatatttgtacaatataaaacatattgatactttataaactaccatatcaatttttgtgaatgccgcatatgtacttgagaagaaggtatattttctattataagtgtgtaatgcttgacatatatttatgatatctatcataatttttagggtttttataaccttacttattttttgtccacttgacctaagacaggtcagtatgagagtagtatgttaaagtcttctgttactaatgtgtttttctatgtttctccttgaggtatgagtaattattctttacacaggtgtttacagtgtcatttgggacacaggtatttataactgttaaatgttcattgacaattgcagcttttagcactataaagtattttctgcttcctttaaaaatgcattttggtctgaattttatgttatctgatattaagattgcaacctcagctttcttatgatttccattatctagtaagtcattggccacttctttatttttgccctttatgaattactgttttaggtgtgagtcttatgttcagcatagagctatattttgctttacaaacccatttgaaaatattttcttttaataagcaaggtaagcctatccacacttattattactgatatttctgtatcaattgtcatattgttataatttctgtgcatattatgctatatctactgtgcttatttcttcagatggcatgacttctttgtatattttaaactttattttggtatttatcaaatacaaaataccaaatactacttgtatttttgttacatttgtggttaccattatatctagttctgctttttgttgtctttagtcaccatttttacttaatcttttattatctgatctgctgatattaaatgaatgttatttgctgacatccacctattccctatacaaggataaatcatcttatttgacttttccctttctctctccttcctcattttctcacttttggggaataacattctttctgctttgtcacacatactactcttcctccctacccctatcatttaccgcaatcaaatctgttatatgctctatcagtccatctccataaatttctacttatatattggttaaaatatgttcattctgtaatacatccatggggtgaaaattggtttctggggccaagggtaaaaaaatcttagatgttacaatggtgtgtagtctttcaaaagaccatagcatataaagagatagtgtatatgcaaggtattaaaatttcatcgtgatgggatgtgtgtgtaggcaggtctgaaaaggctcctaagaggggcgttaatgggggaaaaaagttgagaaacattgctctagtagactcttcaggaatggttcgtgtgtatgatattccacatattactgcacgttgaagatttttttatatagtcgattcttgaagcgaagcttgccttggtataaatcttgacttgtgcttcctttccttaaatttcttgaaaatgcaatctctcagtggccatattttgttttatgttgctattgagaactcgaatgtaagtaagcctaatatttttgccctcacagataatttgatcattttgtctgaagatctctgaggatattttttctttgtctttaaaacaatagttttactaggatagtctaggacttgatcagaatatttctaattcagttttcccagatatataatgggtcctttcaacatagattcaggatccttttatttttggaaagttttatttagttatagtttaaatatgcacagctgctccataattttgtttttcctttctcagagactcccattataagtgcaccaagtcttctttgccttgttttctctgtgaccacttttacttccttcttttctcattttttattctttcagttatttccctaccttttttcaatatgtctgtcttattctttttaggctgctaatataaaatgccatcgactgagtaattaattatagacaacagaattgtatttcttattgttctggatgggaagtctaggatcaagatcctgggaagttgcaagtttgatgtctgatgacggccctgttcttcataaatggcaccttctatgtgtcctcaaatggcataaggcgtagaaggggcaaataggcttgctgaagcccttttataaaagcactaatctgaatcatgggggtggacccctcctgacctaatcacctactaaaggctccgcttcttaatcccataaacttggaggttatgttgtaatgtgtgaatattggagggacacaaacattcagacctgtgtaacctcttattaaatttttattttaatctattcttccttgtgcaacttataattcatccttcatttatgagatggttttgtctttttattcagtttctttcctgagttcaggccattcttattgcatttcttcctgtttctttccatatccattttttagttcttaaatttttgattctatgtattaaaagatacttctctaaatggttgcttaagaatattaatttattttggagtttagttatggttttcttctgctgtatggtttattgggagagaagtttcaactgaaactcacatttttgtttgcttactttcttcttataggatctttgcatagcactgggttgcttttttagatttgattcatagatattttgtggacaggatttctagttttaagggtaccctctttcttggtatcatgaagcacagtttctctaatagatgatgctaatggtgatggaaacagggagaggggtgagtatattttatttctctaatttctgtaggattaataattttatatttttcctttttatttctctttttctcttcactgccacatctccaatactgtattttctgtatttgattctccaccagaaacaaggtttcttgtggaaacagaaagtacagtttttctgtatttgtctgtatttgagagttactggttgcaacctccagtatctctcactttaaagtccctttcctataggtgtagttgtgaaatatgaagtcccagatatgtgctcagtattttagcaattaatgttgacttttatctttccgagggtggttttctttttctgtttcacccatgtattctgttcaattcccctgtttttcatgaagtctctcaaagacagagtctttcattccactctctgagaatatagtgccaatggagctctgtagaaattttaaaattagtgttatttcttgtgggtaatttgaaattcgtggcttttttttcaggtgatgctaaatatgtgggtcatgtgtggtttatttattccctcttattgatcctccagtttgtagggagatttgattcatgtggccataattgtccttaatagaaaacactcctatggtttaacaaatttactgtgttttgtgtttcttctgtgtcttccccacttacttttcaaagttgtgagtacttactagatgtgcaacaaatgaattaatatacaaattataataaattgcttttttaaagtggtttttgccttgtcttattgctttggctcaaagttattgtggctttagtaaacgttctagtcttagaaccaataatttctcaggataaccactcttaattggaaaaccaattacaacttgagtctggtgaacagaaggatctccttcctttacctttgtcttggatctttgtattattgacttggaaaaatgttaattgatgtgttgcagtactgcagcaataattacctttaaatggaaatagctgttttatacttagtgcacaagaacagtgcaagggtgcaagactctaatacacagataaactctagacattggtggaacatttggtagatgaaaaagcttgtttaggattcagtataaacaggaaaggcaaagacaacagtaggatgccactgtttaacaaaaggaaattaagtttccctttttctgaattactggagagagtttagcaacatatgtgccttgggtgaagagttgatgaataaaagatctgagacagtttgtgacttccaaaatggcaagtaataaagatgttgcaaataggatccagcaggaaggtggggctgaccaatagactagagagatgaggactttactgaaatggagctgaaaggaattattctgggtcatttcatagattcactgtgtgatatggtataaggtcttgggcagctgggaggttaaacccagaatcaaatgcttcccaaggccttgaatatctgctccagagaaggaatatagtgtcaagatttgtgagataaatttgttttgcctaattaggtcatctaggaatacttagagtctatatgtattttgcccaagtaatgtttgacatgaatatcatacaatattttctgttaattacatttctcaacataacattgtggtaagagtgcttgtattttataaaatctcaggagtagtggtgagggagaatatgccatccagcaatgtttcatgaaactaattacctgagggaattcagaaaaacttgtccagatggatacactacacaggtagagtaataggcttttataaaagatgaagtattctaattataaataaattattataatgcatgacaattttaaattactctccttattttgtgttgtatttagtttttattgaaaagccaaacaaagcagatagtaatttgtcatccatttttagttttactttttaattactttgaagtcattcaggataggtggattttgatttcaaatactattcagaaacaatttttatttacttaaaattaaactatgatgaatacgtattcacctttggtttttaaaattatgttgatggcatctgaaagagttaatagaagctgcttcaattatgccctttatatctgtgtaactcctattttgcttaattttctttccatgcctaaggacatacaatagttatcatttattgtatgatttttaaaatgtttattaaatatttctttcaatttttgcaggaaaacataaatattcacaaaaaccacatattcttggcttctgttttttgttgttataattcctttagttacatctgaaacaaacagaaaaatccacaaatatctaagaggcaaaaaataaatgatctcttctgtaattgtaagatgatcttgttctataaattcagccaagggaagagtaaagagaaaaaataaagtcagtccaatattaggagtccttgctttctctatgtgtatacgtgagtggaggcgagggtaaaggtgatggtggacaggtggtatgaggaatacaggtacttttattttaagcactattggctaagaaggcatgcattttaatttgtttgaaatataacacttacaatgctccttgttaattctctacataacagctaattgccaccctagttttttttttttttctttttctttttttttttccagttgggcagagaccacagcctgtgttggaaagtaaaaacacagcccttgccttccttctttccttgatggggatggccgtttgacccaatggtgaccattgatattgggaatatcagtgaaggaatttgttgaaggaacttacaggaaatctctttttccctgatagcgagatgcttgaggagaatttccttacccctctggccttacttgccccattcccaccagggttgtatgagcatatgatgcttggaatggctacagccatcttgggttatgcagagggccgtgacacacagaggatggcagggggaaacacatctggaaagtctggatccctgaggttgttgagttactgcatcaatctggagatcactgtacctctgggcttcaatttttcaagtcagttttaatcttatattctgttacatggagcccaatacattttattaagtgggtatccaatttttttttttttttaaccttagaaaacactgagttggcaaagaatctgacatggttataactacaccttacgtaatgttacctgactgatacctatagagtcacacgtttcctttttggaagcctaagacccatggatttctttataattattgtaattccaaaaccctgttaaaatcccatctccgctgcatttctttcgcatctagtgaaaaccgtttagccatttctagtttgcattttaaccttccccagattctctcctcctttttcatctgtcccaccaatcaacatgaagtgctccattgaatccagaagagttctctgtctaaacacaccaggctgtcagtacccagtgtgacttccccatttgtcaccttacaatttgtgcttgctttctgctcaggcatcaaatagtttgattttattattattttagtatacacacaggtctttttcatgatggaagtttctagataggtggaatcatgtatgttttccctaatttgctattgtatctcatttatagagtaatcatatacatcagactaaatcaaacaactggagtaacagtatagagtaaccatatacactagactaagttaaaccaatggaacaaaatatccatatttagaactttcccaagaaatctggggtatacagttgcacaatttatgcaacagcaatctgcaaagagctgcttaataattagcctactcatcacacagtatctgttgaatatttactcttttttccagcaaaaatatttattaaaacatttaaaagcaacacatgcttatatagaaaatttagaaactgcagacagaaataaacaaaaattactcaagtccctatattccaaaacaatgcagttaacattttggtgttttgccctgcaatactttttttctgcataggtttcagtaggaatttgtgttcgtttgtttgaagctattgaccagacagaactgagactataggagaaactgaagaagtgttatattaggaaagcttccctaaaactcctcctgagcccatagtaatcatagaacaataattacaattttgattgtttattatcttcaagatgatgtcccttcattttcaaaatactgtaattatgaagtcatattattatttgtattttaaagatgaggtacctaggtcagagaaattaaagaatttgcctgagatgaaacacgtggtaagtcctaaagctggaaatgaagttcatgtctgacttgacttcaaagcaggtgttcttttttctcttatgcttttacccaattaccaaacatcagacccagcagggagttgtttggttccagtccttttattttataaatgaagatagtatcaagaaggatgctttggaaattaggcctagagtttgctctttttagattcagtttctcctacagtctcagttctggtctggtcaatagcttcaaaccaaagaacaaaaattccttctgaaccctttgcagagaaaaattgttacagagcaaaacatcaaaatgttaacagctttgttttggaatatagggacttgggtaatttttgtttatttctttttgtctgaggtttctaaattttctgtataagcatgtgttgcttttaaatgttttaacttaagctctgtttgtcggtctctagcctctttctgcctttcccctctgtacaacccctagtactaggcaccgtacaaattactccaaatggtgaaaatcaacaatcactaacgctccaaattctaagagttttgaggcactctttgacaaaagatagtgcctttcacttaatgtgcccattctcagatgccatccctaaaagcaaggccccattttacacccaatccagctttcaaaaggagtgaacatttcagggaagaggaaggaggagaggttacagagtctaaagctgacagaggacagccaaaatcagtttatttggggtgtacttgctttcttaagcctgcatcctagtcaaaactggacacagctgtcctttttcaaggcaatttcactcccagactgattgtttggatttcagcttgttgtttaatagttctagaattcaaacagtcaccttgaggcaagaaggttagcactccattaagatggatggggaaagttcacacctctcacttttactttatttctttgcttttctttccatttgcctgcaaactcagcaaagctaaagcacatttactacacagtctgtttttatacccactgggctgaaaagttgatttactaaagaacttggattttccaggaaaaggaaaagtccacagagagttttaaagtctgcaaaatacgtgggattatcagaggaatacgaaaccttatgctagatcctttggttcttaaatcaatccccaaagaggttttaaagctcatgtgcttcttggatgattcttctggaccttcttataaatataaatctccctcttcatataatatttgttaagagggagagctaaaaccggcagcatttatgtgaaacactaggctggtgtatttttgttctgttagctttcacaaatgttgatggaaaagcaatggaagggaattaatatttgctgagtgcttagcatgtgaaaacccaaggctggataccatgggagatggtgaagaataacacctggttcagtcgcttacctttgatgaaggaaaaacatacaattttcactaatataagccccagactccgagaacagttataatagaaattcatgcaacaggtccataaagaaaggaatgagttcttttgattggggcatttaaaacaacttattggaggtgagattcaaaaccaatttgggggatctagtaggggaaagattaactgagtgggagagttcctttagcaaaagatgaaagtgaaccagaatatgtagtattgagagctgagagctactcttagttatctatagtgggtaaggcagagactggtgacattccccacccttgcctcccatttatgaacatagagaaagaccacgttcctcagtcccacttgtggttaagtggggtcatgtgactgttttctggcaaatggaatgaaggtagagtgatgcatgccttttctcctaactttcttgcctggcttgtttggctagctgaatgcagaggatctagcaaagccctctgaggaagcacttacagatggtggtcccataaaagaaaagccaagatactgtaaccatggaacagaaggccatgcactaaatacctgaacagactgtgaaaggaacaagattgattgtgttaagccactgagattatttgctgttgttatggaagtcggcattatagtggggatggtaaggctgaaagggtaggttaaaagatctataaaatcctaccaaagcaagtcattcacaggaattatgataataaagtaatttaaatagtaataagctttgaattgatatatgccaacattgggaagaggggaaggcccattctttctgatgtggacttctatgaatcattttcttggggtggttttatgctgataacttaattaggggttctaagtaaaaatgttagaaagtggggagtttcttcgctacagaggattcttgagcatttcatagcttatggaaagcagaaacagacttggggtgctctgaggagataagtctaaagctggctggtttgggatgacttttattgctttatttgattgtaagagtaatacatattccctgtagaaaatttggaaaatataaaaatgtcaatggaataaaataaccatttgtttatgtttcagtgtgttttattccagttcttctctttgtctctttctctatatattacatgtaaatataggtaaaaatcatactatatttatttttcgttattaaatttctttataaacttaattttaaatagttgtataactttttcattatatgaatatgccataatttttactatttctcataaagctgaatacaattatttccagggattttttgttattttgacaagaatgaatatcattattcacaaatatttgcctggattcttgactatatttttaggctagattcctagaaatagagtttgtagtccaagagtttgaaaaattataaaagaccttggtgggcataggaaattagctttctagaaagattccagcagtttacttttccatcagcagaatatgagactacctgtcttataacctattcaatgcatttaatgcattgaatagtagcattacaaattatctactatatatagttttcttgataggtcacagattgaagaacaataaatccatgatgtatgtggtaacctattttcagttggccaagtggctgtctcttgctgatataagaataaatatttcattttaaggaaccacaggcatcctctgatcatagtctgtaataatccagttgcatttagtacaggctgggctaacctgtgaacaaatcaccccaaaatttcagtggtttaacacaacagaatcttatttcttgttcaagctatatgacctgcaggtcagttgcgggtacttcacccattcataagtactgtaacctagagaagggaatatgataaatcatgtctttactctttaatttttcacctggaaggaatacatgtcgtttctattcacatctcctatagtcacatgccacagtgactataagggtgtgggaagtgacaatgctaccatgttcctagggaaagaacagagaatattcagtggacagcactaatgactatcacccgtgactggcctttaacctttgaggaaggggctgtatccgtagctaacctcctctgtagtgactcctaaaagtgtcccttggcaattttttcctactgagtttctcagacatgggtcagcaaactagcccgtgggccaaatgtggcctgctgcctgtttttgtatggtctgctagctaagagtgttttttacatttttaaatagttggaaaaagtcaaaagaaaagtaatattgttgacacatgaaaattatataaaattcaaatatatgtccataaaatattttattagaacacagccattttaacttgtttatatattacctgtaactgattgcatgatgtagtagcaaaattgagcagccacaatggaaactttatagtctgtatacagagttaaatatttatcatcgagcccattacagaaaaagtttgccaatctctgatcttagacatgaccctaaggaaaattaggatcatttcaatatggctgcctgaaaaaaaatcatccctatggaagttactatttgctaactttatcaaattcaggttaatatattcaaaacaaaaacaaaaagtctcctcattgttggtgtgcattattacagtggttgtgcctgagccatagatggaagagtgatgagaactgaatcccaacggccaaactggactgagattagagaggaaagtcattagagttaccaggagtttgcctgagttggatattgcagttggaagctggactagatgagtttctcaccaggacttttcacctccttgaggatttgttatacaaatctgctcagtgtttcataatcaacctggatacaaatataagccctcattgcctcctgttaaaatacatccattcatacatacattaaaaaggaaggaaagattggctctccatgttgaagaaaaccccccgagttttgccatctactttcccagcttattgctgctggaagtatttcacttacaactgtgatttttaaaaaatgttttgaatttctccttagacgtttcataagcatttaaatagaattggctttctgggtgacttaccagctgtgccatgtggggttttcaaggggtatgtgctccatccactgtcaaaatattccttgtgttgagactgggacttctaaagtaacatgttggtccagggacaagtgctatttctctttgtttagtgttgaaataataatacaccagttagtaatgctagggatggaatgagagacacatcacatgcatattccaactgaggtcaaaatccattcttttgaaatgtcaagaatgacattcgctaatccccatgtatatagattccatttatttgcgcacttaaattaactcctttctaatccagctacacagctgccaaagacttcccttgaaaggcatcttcttttaaagtagtcataactcacatccagctctgattgcaggaatgcctcctttgacttcatgcccatagtcaaaggtacagaagcgttttatctaatttcaaagggtaagttttacctacttggaaacagacacctctgatagctttcctttcttgttgcatcctctttcttttttcacttagttttattttatacaagactttttaatcattgaccattctatgtcattcatagggaggtgattattattaaaatattgtgtgtagatttccaattatatgatatatatttacatatctcattaaaaattaagtggctaccctttcccctttcaaatcgatgtaaaaatgcacactttgaagagtatacttatccggacagtcaggcagaacttttgaaatccaggtcacccaggaaaagctaggatatacagttgtcttgcccatatagtacccatctgactctagaacacaggagattctttagactgattatagaaagtgataatatgtcaatgacaataatgcattgtggaggtaaagcattctcctatacattacctcatttaattttcccagtcctcctctgagactgagaaggcaagtgttattatcgacatttcatgaataagaaaactgaaactcaaaaagactaactgacttggatgaggaagtcaagccttggaagagattaggtctagttttctttgccccaggttagttgcacccctttgtgatgctgtctccccaagacaggtagagttgatactgaccacgggccatcctctgaaatttgtgagtttatttcagaagggaagcctcaatgtgatcttcttttcttgtaataaacatatcttctgaaagtggaatactgaaaaaaagtcaggttaagggttgaagcctatgagttggggtctgtttgatcaagaatttacggcatatctacattgggcacttgccaaactcaggaatagctcttttctctagctttggcccaatttttatttcttttaaaataagatatgaaacaaattttcagacatcaagacttgacatgaaaaaccaatcaaggcataattatgttgcccatttatttttgtctcaaaatggtattatacaatattcacacattaccacatggttttccttcccctgtgaaatttttaccttttttacatgtttagcagacctggggatcctaactttggaggtgaggcaatctcaaatctcagaggactgggcctccgactcaaaggagagagctgccctggatctttttataacctttctccaggcaatactgaatgccaggaaaggtatccaaacccaagtcaatacttcatttgtggtgagttcgtgatcaggcatttctctgttctttaacagcaaggtaaacagtaaaccaggacaactttttgacaagaatttatccttgaaacttggaaagctggtcttagggccagctcatagggggttgtacgttattctttaaataataggacactatcatcacatgctatcaaggagagcaagagtggagacagtggagtcagctgagggcagtactgatgttgtacataagagcctgactagtggagtcgcagtgggagtggaggtgagaattgtgaagagaagaacattgagaaattgacttggcaatggatgcccactctgccactgtcccccagctgtggggatgacaaactcagatcaagggtatctcttgccttctaggagcttacgggttacctgcatttggaattgaaaatacagaatggaggtgaggtgttgatcatattgatgacagggtgtctttcagcaggccccacagggtggctatcctgtaggtttaaaaaccaattttaccactatactgagaggatccatatctcagggaggatttacagaaacccagtacacagactggcagagagtttactgcctgcatgttcccctatactcagctttctcaagttagatctttggggaaaccatattgtattcataattttgcctagtgagcatagaatcaggatcagaataagttacaggaattaggcaataataaattatctaattatcacctaaaattaaaattctcacctaagagagcatgtggcacttgctcccctcagagagatactttgccagtggaactaagacacctgatgtcagagactcagacttccttttctctcaacacgactcagacagaacctaccaacatttgccttccagactctctctgcttctgatgctgatgatcccttgcccctccaccttacattctttcttttgatatattaataactcaggcaagtcccagttctctggatcactatttctgggactctacattttagaaatagtaacacaaatcagtgaaaaaatatattcacaagaatgttaattgcagccttttttaataccccagattggcaatgagctatgtgttcatcagttgggggattgggtaaataaaagatattataattatttaatgccatactatgcaaccattagcaagactgcatagaaaaatatgtactgacttgacaagatatacaaaataaaatgttaatataaaaccaaattatattataaaaacaaattttatatctatatatatagcagaatcccatctttgtgaaaaagaaatacatgtatgtatggctatttgtatatgacatatacatatatgcatatacacatatacatatatgtgcttgtatatcaaatttaagcacagaataaatccaggaaaatagtgcttttatatgttaacagtggttatccctgaggaaggggtaggattgtatatgttggatgtgacctgggacttttgcctcttcctgtatatatgtgtaattgcacacgtgcacacacacacacacacacatacatgtgatggaatcataggagcaatttacttttttttaaaaaaaagaactcctttcttttctttctttgcccaccagttcctgaaaatcttacattcttaggaaaatcactataatcgagaataaattactattcactgttgagatcgatgactactaaaaaaatataaattgatcctatgggcttctaggaaactgagagattgcttccaaatgcatgggggtaaaagtggagagacagtgaagagatgaaaaaatgttatatcccccatgttatatcccccactataacccttacttttgcagaccataaggcttgctttcatagagcaacgagcccacttttaaatagtctttaatattgcccctgctgaagttatcaaaatgcctataaattccagtattgggggcacctatactgcagctccctgactgcctcttgagttggaatttgccacagttattccatatgaaatcctgaattccaatttttggttcacaaaatacgttttctctactcaggtctaactacagcactttgcctgtaacaattacttgataagtagttgctgctcggtggattatcaggtgcgtttaaggaaaataacatatctgatgatcatctttaaactcaaaagtctattatccttctttggaaggacaggattattgcttgaggcctcttcaagccatctaatcaagaatagaaaactatcagaatgaaatgaactagcaccactgaagttttcttttttttttaaactaacatttccaaagagcatttacagagtgttttatgaatgaatgcagaatatagcaccgaacgaggcaaacctttcttatgaggacagccgtatagttaaatccaagcatgcaagattgaatgaccccgattgacaacccttgccctctgttacaaacaaatgggaccaggaatgtggtccccccacagtgcactgggggatgcctgcacccactaccctctgccatccatctcctcctcctctgatttgtgtgtgtttttgttaaacagtggatcttgctatgcttttcagaaagctgacaagaagcaagctgaaaattaaaaatgggtgccgagaggctttacgggagtctaaataaacagcccgacaggaaagacgtgtggcaggctaaggtttcaggctagtggtcggagcgagctaacagacatccgtataacagaaggctgtgtttgttttccctgtccctgctctagcaaatttattgggttatctgtcttattttgacacttgggtgtttaaggtttctgttttaggtgtctaaagacataaaaaaattattgtacagtttacattcctggcagaagctttgacatgtgctagctgaaaagttcctatctgccagtgatttcacagaaaaagcctcagagagttgggttttcatagagggtccaagaatcctctgtgaaaagcaccaagaacaaagggtttcttcttttatttctgtccttatcttcctattgtctagtgaagagtggccaccaagccatttgcttcccgttgtactggatttttacttaccatgtaacatataggaaaccttacccctgtcttgtagaggaagagattatttccatcagtggagcttgcactcaacatagatcaacaagatacagtttgatttgctgtagaggtcaggaaggcacggcagtgttgagtgaattctagatgttatgataacgcaccatcaaaatattagagtcatatgtgtataaatattgacattttgatgatggatgtactaaaccacccacaagcaatgttaatatatttcttcttttcagaataccaatttggaaataattttacttataaatgtatacctgccttgtttctcaaaggttttgtggctgcagtaactaattaaggagtggtagggaatttaaatagctctctgacataaacctattttcattcattcattcaaatggcattcaataaacactcatgtatttaattgttaggaagcagaaacagacatgggagaaaagtataaaacacagtctgtggctccaatggaagcttatagttttttctctcatcatcttttgcagtagacaaactgcctggcatagtctggtcgaattttcatgataccaggtgatcagcactaagtcaaggcaggaaaaacagtctatttttttccctagggcaaatagctttgcagcagctgaggcaatttgagcatattactttttgtttctttgttcagttttccttttcttctgtatctttttctcctcttttctctatggcccaagattgggagttggcagctggtagctataatttctctgcctcacaatgctcttggcaaaggctcatcattccagccactggacaaatagttttctcttcttgggcactctcttttcccacctgctgcatttgcatgtcacttccactcacctcactattggtaaaggctgccattttgtgcaaaaatcacagatttttagaatcagcagacctacatttgaatgcagactctgtcacttcattggtgggtgactctgagcctcagtttataattggtaaaaatgtgtatagtcatatctgtttcacagaaagcttacatgtgatcatgcattgaatggagcgagcatggcccctggctccagcagatgacctccttccttcttcaggtcgtataagacatggaaaggccgggcacggtggttcatgcctgtaatcccagcactttgggaagccaaggtgggtggataacttgaggtcaggagttcgagaccagcctgaccaacacggtgaaaccccgtctctacaaaaaatacaaaaattagctgggcgtggtggcaggtgcctgtcatcccagctccttgggaggctgaggcaggagaatctcttgaacccaggggtggaggctgcagtgagctgagattgtgccactgcacttcatcccaggctgcagagtgagactccatgtcaaaaaaataaaaacaaaataaaaataaaaattaaaaaagacatggagaaatgaggcatttgagagagccaaagaaaatagttgtgtcgtagaaactttatcgttcattgctttcctgttcatttcagacaaacgtagtgtaaattaattttttaaaaaacaaaaatatttaagtgaccttgcagtctggtttataatggatatatattaatactatgtccatgtctgaaaacaggctttgggaggcaaataaaaaatacgtaacacaaattttatttgctagtagcttaggaacaacttgaagagacatttgtacaataaaaagtcaaatattaataaaagtaagtacttcatgggtgttactaatcaatcggtaattattgagcaggtaagtattctttcctgcagaactcttcgaagagcctttaatctgttaacatacagtaagaatctctaaaaagggaaatagtaagcaaagtcttctacacctatttcatcatcgaactctttaaataataataattattattatttcagtagagtctcattctgtcatccaggctggagtgcagtggtgtaattttggcccactgcaacctctgcctcccaggttccaatagttctcctgcctcagcctcccagttagctgggattatacgcacctgccactacactgagctaattttcgtgttttgagtagagatggggttttgccatgttggcgaggctggtcttgaactcctgagctcaagtgattcacctgccttggcctctcaaatgctgggattacaggcgtgagccaccgtggcccgcctttttaaattattttaatcttatctttatagcgtattaggtgcagaaagagaggttggggtgatggaagggcttgagtgagcataaggacgctaccctgcagtagcgtcgtttctagaaagggcagcatcatgattcaagtatcaaagagatgtcttagaaagggtgtgtggtggtgatatactagatcatgaggcagggctttctcaagtattatagaatgatcagaatatcagccagatgacagttaattaaggagatgttaggctgtgacataccgtcagctggtagcagaagactcttcacagtcatttcagaagtgaaatatgagaccaagccaagagagttgtagctcaagagggattattcgggataggagaattagaggcttgatagattttaagggtaaaaccacaacaatgagacgaccacaaatggtcttggagtaaggggggctaactgcaggatcaagtccctacacagagtagagagaaataagacagcgagcgtaggccggggaagctgctgagacatggaagagatagaggaaagacagctgtcttgcctctatctcttaccaggtgagcctcatcaagtgctgtattcattcttaattataccagctgtcctgtggcatagaaatggtggttttcaatttgtagacatggaaacttgcccaagcttacacagccactacatggtgggcggatcaggcatttgaaccctggttttgctgctcccaaagccataaaatataagtgatgatacagaaatcttctgaggaggagaggagagatgataaaggagctcatggttagtagcctcagtttttcaggaggcgagacaaggagattgatttgagtggtggttgaattggaggtgagggaaagcaggtgagcggtagaggaaagagtttggaattttcaattttggaaaggcaggactttcgtttctaaggcaatggagacatatttgcaagttagcagcagactcacacagtataaatacaataatcataatgtattgtccaaaccaggatccttttgagagaagtggggggttgtgggtggataacatcaagagcctggagatggaccattatcatgggatggctcaggccaagtttagtacagtgagcagctaatatggaagggaaattcagggggtgcagaacaggaggtgagaaattctgaggtcagggtttcagatagctgatgaactgagagccagaaataagggggtcttatttttcttttttgcctgcttaagaactgcatccaatagctgtaaatacaatggtctatgctttccagtctgcctgagtcttcacaagggaatagaaagtttaccatcagaagatgccaaacacaaccaacttgcagctgtgcccagctatggcacaccaactgcagcaggcacccaaatctaccatgtcacttgatcagtgtgatttacctttcacttgagtgctttcaacgctggcagaagcaggttttgaacaaaaatgcattccactctctctgtgtacagatctgcctccctcccccacaaaagacaaaaactcgggaacacctgagtcagcttcagtagctggaaatgtagcagtttaacagcaaataaaggcctgtccaatggctgacgaatcaaattaaattctaaacaaacaactctctcgccgcatctcagtcagttttagaatcaatgcaagtgatttatggttccttagggttgtattctcttttcaatgtgctgggatttccacatgtagctaccatttaccactaatgagcagcacgcatcagtccccgggcacctggaagggaacgcaccgcatagtctcattcagcagcacgggctgtttccatgcaaaaggggctccttagctgggtcaggggcctgggcctgctggatagaagctgttaatgcaaagtgctgacagccttcagtcttttcctcccagaagcatcagtgctttttaatttaatggttctctggtgtgtgagaaccctttgggacaaatttgtttctccagtcttagtgtgtggattcagacaggaggcagataggggcagaggagagcattggttcctgtattgtttcctttgttatcatttgataaaagtgagtcttgggtctatatttttatgggaacaaaataataccccagcacacagcacagcatcttgcacatagcttcatagatatttgtggaataaatgaatagatgacaggcaaaggcacacataaagtgtctatatcttgaatcaagtgctttggaattctctgtacagtgtgtgctggcccaggagggagctagtcaaaggggagagagcccggtaaagctgccattttttgaatgctttacactatgctaggccttgttctaactcttaatttcattcattgctcacaatagtctttttaggtatatattgctgccatccccattttatgggtgcggaaactgaggcacagagggactaaagcgacttgcctgaggactcacagggagtaaggggtagccctgggattttaatacaggcagtcggcctccagaggccctgcatttaatcactacataatagacagttctcagaggccttttccatttgggtagtagagttgtttccccaaggcagttaaaagactagctgtactttcaaaatggcaaaaaaacccaaaaagatgtatttgcagcctctgagttctcagcttccgtagcaattagcaatgtagaagtgaattaatttacacaattggtttcagaccaaagaaagtggagggtgaccatgaggcggggaggagtgggggtgagaacagatttctaagctgtttttgaggcagattttatctttttgaagatgaagttgaaataaggaaaatagaaaggcagagactttgaattggcatcatcaatgaggccttcgcctgggagcgaaatgacttcttgaggttggaacttgagcctcatctactggggaggattcttctttccgacacagacatgtcacctcctgtctgcatgaggtgagttaaccttctagcgaaatagaataataagaaccctgaaaaaggtattttataaatgaaaccttagttccctgagaaaatacagctcctacatgagcaaggagatttagaatctttccatgagatcctgggatagaggaggaatcgcttactcctaagattttaagttccgtacaaagctgaggtaaatgcccacaaaaattgacctcagaacaaatagtctgcaaataaaataataggcaaaacattttggaatctgttttcaaacctaacctaaaatttcaggatccagatttcataaggaaaagagagtcagtcacctgtattgaaatttgatttaaaaactagtttctagaaaagtaataagtaagctccaggacctcctgggaaaacaaatggctcttaaaaatcttaaactgcattgtagagatttttatgaatgagcaacatatggattaaattactcatatctgaaaaaaatcaaatgacaaagcacatttggcagttttattgagcctgcattatttggaaaatagtccctagatacctgggaaatcctaaatgaagcctagttttaccagccatctttgagaaatcaaatttagctattcatatccaaagggctgtctccattagagtgtatagaggttaggattaaaaaaaagttaccttggttttctaagttctgataggttccaaagatagtggacctgggcaatgaccacatgtataacttccttaactctcagggctgtggacaatggaataatgttccttctcagcttctttgtctcagtttccctctttcttggatcgtcttagtactcattttggcagataggctgaaaacttgactattcactctgttctctaacttttaaacttagttatcatcaatattgagtgagatatgttttctgaaaaataatctgtggtcaatttattgcaaacattatgattcctgtggctgtttttcattcaacatgtgaggctattgggggaaacctccttgactctgtttaaaaatattgttactgtttgtagctctaaaaatagcctaaacatttattgagcggtgtagtaagagaactagtaaagatacccaaggtaaataaaaaggtcctggattgatttttattattaagcatagaaaggaatagaagccatgagttcctggcccagtggcctagggctcttttactttcatatctagttcacagtgtcaacatatcacatgccaaaatacagacacaagtatttccaagactatcttaacattttggacaaaaactataaagatttgatgtgacatgagatgtaagccctctttttcaataagtcacagtagcagagcttaaacccagctcttccaatttcaacttcagtgctctctctgccagagtatattccttagacctgtaaaaatcctagactcctccactggcattaagtattgagcagtggagacacatcatatattaaagtttttaaattcaactatgcaagtgatcttttaaataccatgaaaatgccttaaatttcatttgcataggtgcctcttattatagacttttattactgtatgcattattcatttacacacacatcaatgaacagggttttcaacacaaaacatgtgtgttactctttgtgggtggcttatgggatgttcaacagtactttcgaccatacttactatgtgcctcacatccaaacttcagatgccaaccttgtgtgagatgtgcctccatttaatataatgttgatacatcagagagcattatctctcttaattagcgtaaacacaccctttttgctagtcatactcaatttgcccatctccacttcttgcttttaatgcggcgtaaagtccttgtgagaaggttaaaaaggtggtattaagagaaaatgtgtttagacacattttgggtaaaattactgtgctgttggtcactctgaggaagtccatcttctgccaaagtaagacagctgagaaaataagtgttttaggggatgctctgtttcactacttttctgaatcattgctattgttatgtattccttagaagctgtgatcagttatcattaatcctaagtgagacctgtttcttgaaaaaataatttgtggtcaatttgttgcaaactttatgattcccttggctatctttcactcagtatggggggcaaagtggtaaatatgttggggcaatttcagcattaaggcttcctttcttgtgagaaaaattggtaaatgtgaaaaatggtttaaattaatctgaagaacaattccagagagtacaatctaagtgttaagtgtggaatgatttttttgggttgcccttggtcacttatcctgtttatttgcctttgcatatacttttctttcttctgggcatgttccttctcagctcctttgtctcagtttccctctttcttgaatcctcttagtactcattttggcagataggctgaaaacttgactattcactctgttccccaacttttaaacttagttatcatcaatactgaatgagatatgttttctagctttatctagctactgcttctcctcctttaaaactcaatttaagcactatgttctccaggaagcactctgtaactaaccagcgttattgagttgcctctcttccaggcttctgtcgtggggtttacttgttctataataatagatttgtcagtaaataccagaaatagacccctcaaatgcaaagaggggttgtcatttcactcccaatgcccagccaccagcctagtatctggcacatagtagatcttcagtaaatgtttgttgagtggctaataaatgagtggctaagtcgtgctgctgaatgtccaacaccaattttgagtggaaatcaagaaaaagccttgctctttctttattatgtttcaaaatgtgtcttgtctttggaaaaggaaaaacacattctccaactccacgaaatatatgaatatattttggagcctggagcttgaagtttcagccacagaaatgcattctcagaaattaaaattaaaaaaaaataagcaaaactagttcgagcacataatttttcagcctcattcacatgtttatagatttctgtgtagttgtaacccctctgtggttatcacttaaggggagacatgattgtttattaagcatcttccacgactcaggcacagtgataaactctacgtatgttatcgcagttaatacttacaatgacctcgtgtgctagaatcgttatcttcatattgcagatagctaagtgctctctgcaattacttaccccacgataagctaagtaatagtctaataagtggcagaaacaggattggaactgacatctggcttttaattactgaggtaattaaaaatgaaaattttaaattgtaattaaaaattaaaattttaaattgtaattaaaaattaaaattttaaattgtaattaaaaattaaaattttaaattgtaattaaaaattaaatttaaaaaataaaaatgattttgtcaggtcgaatttcttggaatagatttattgggttagaatttaaatttgtctgattttaaaataattgttgctaaatcagtttccaaaaggattgggagaatcaattcagtcttctccaccaggctgcaaatttcttgaaggatttgagtcttatcccttgatctcagaacccagcacaatgctgggcacatggaggcttctaaaaagatgtctgcttaataaattattgaataaatgtaccctgccaccagcactatacattttctttgaaactcacataatgtggtgcctgagaaatacataaacctacaaaaggcagacagattttgtttgtccctgaatataagaaaaaagatgactttttggaaagcagatttgcttttctggagaagaagttgatatctgtactttggcaagcaacaaaaagtatacctttccatttctgcatagcagaatttagtgagtcacttgaatatatgtgatctgaataaattctagactgtttagtggcccaggtgcagttagacacacagtccagcaagcaaaagtaattaaaatatagttccagcctttattagaatttttcaaagaaaactaatgggactctaataacacttttcaaaattttcctctttctcttgcctccaattttcttacatcttcagttgctctcattcctaccaatctctaaatccctattctaaaactatgcaaaattgtactagactctttaacctgaaggctctttcggtttcctttcttggactcccaatggcctcaactctgctggaagttgctgtgaggccttcagactccagttgccctggcctctgtgactccaggtctcctttcctcccttctcattggaagtagatttcttttgttattgttgtttttgttttttaagggaaaccctccttgagaagtttaaaacaaatgacaacaacaaaaatccttaactttgttatatgtatttcttcttcgatatatatctatctttgtaataggcagtattcagaatcagttcatccacctgaagcattgcttctcaaatcatggtagacctttcaggtggcctcaccaagctttgccaatttttctataggaagctttcttgagtatctttctggctctccatatccacagcttcagctctcatcgatatcatagttttcatgaagctgtgaatctatgtgtacatcgttgggttagttccctaaactttgtcctccatggtctgctcctgttttctttcactaacacctccttcttttcaactcagccacctccagctatttggaagtttcccctctgtcaaaacaggaaagattcaaatagaatttaccttattaagttaaactgaattcatattcagatacttctcataggtatttgtcttttaaaactttttctgacccacttgtgaaataaaatctcttcactatatcttaggcaggctgagcttactgttcagttgtttgttttattttcctgaattaaaccacttaccctgattcaaattcagttttatggcttttaagagttgggtaagtgatgttgagtaactttggcaatgtataccaataaatagagaaataatgaagtaaatgaaacttttgtgttttcagaagatagattagaataattatcttaatctttcttgtttgttattttagacatttgaaatatcgagaaaaattgacaatttagagaaactgcatattagctttgtgattgtaatttgcgatgcttaattattatttgtgtttaatttgaaagtgagaatatagttttataagcagtgttgcatatttaagaaaaactgattttttaaagtttaaaatgtatcctattagatttataaaaattttgcttatattgtttgtaagtttgccctgtgagatattttatgtttgtgaaagaatcagttataccaaatttgaaatgtgtaaatgtgtatcattcaagagcttaatctgagaagcagatccagtaggagatgtgtgtgtgtgtgtgtatacatacatgtgcatgcatgcatgtatgatttattacaaggaattggcttttggaaagcaagggctaagcaagtctgaggtctgtaaggcaggccattagaagggaaaatcctctgccctactttttaggctttccaactgattaagtcaggctcacccagaataatctctcccttagttaaagtgaacagaataaggattcaaatctcttcatagctgcattgagattgaaatttggttcattaactgggggactgcagcctagccacattgacaaatcaaaacaccatcacaaaatgtttctgatattttaattaatttaatttttaaatagattataccacttagtaagatctaacctgctacatttgtagttaaacatactacaaactaaaagtaaaagctatattttttgagatttttaaaaacagaataacaaaatttataaattgaacctaaaaacataagaaaacctaagttttagcatttataattttagcagttatgattaaccaaatagctttaaataatcctttctgtgtatgaaactttgcacaggtgtgaaaaattgacagacatactggcagagtggaattgggtagtccagggtcctgagacatagcatgagaattagtgaaagtggaatccacgccattggggagtgagatttgaggtctttaaaagatatttttatcagtgtttgagataatggttaaaacacttataatgtgacccatgtagtctagtctccgaactgtatcatggccccaaaaaaccccaaaaactcaaaaagcaaaaatccagcaatccacagaaagttcaaaataacctaaaggttttacttgcatttcttgatgcaatagtggatcacagtaacacatttaaaagaattcctcttgtctctatcatctaactctttcacatagcacatcagcaactcttgcagcaaacttttctctaattctcggttccaatgggtgtgctgatttttcttttcccctttctgcttctgcgcggtgaagcccaaataactgttctaaccaaggaggaccctccttggaagacagggagatctaaagacaggagtaggtagaagggacagactgtgaaagttcaactgctaactggtttgggtttgcctcatgaggacgctaattcagtgttactatcagaaaaaaatagccacatttacagtattaatagtatggatactagaaaacttgaagtgagaaaagaaaaagctaaaatgtgttcagttatgtagcacaacaattacacttaattacataaactgtttaccatttatgccaaattattcccaaagcacagtcacaattatgcaccccattagctacatacatcagattaacctggccataaattttattctcttatgacactaaacctgtgtgttcattccttttaaattattgctgcttttgctcaatggcctgcatatgctgccttgtcatctgcttataaattaagaaaatttagagggacccttgtctttgatatgcccagcacatccctgaaccttttgcagtcgtctatagcagctctccagctttcagcttttcttcttttccaatttattaacccacaggaataagaataatcaaaagcctcctatggctcacagctttccctcatcacaggaaagctcctgaatcttacttcttaggcctttgacttttgctacaacaaagctatattttcctttaaacaggaaatctgtgtggggcatcttcctttaagaccttgggcctttcctgaggaatctgaagtgtgaaggagttttgttttccaaggtatatcttgacaggtgtgcttatccctgcattcaaattatttgtctactttggattctgtgtccacttcatctgcctcttgtccagtcatcatgctagtcctcaagcatgaacagtgggaaacacagacgggcctggaatctgggcgccctgtctgggcttacattgacaatgggattaataatctactgtgaggggagatgatattgtggcctttggagatctcctcccacagggctaagagtctttgctctccttgtgtgcacagggcgcgtattgcttctttgaaaagcaagccctgctttgaactgctggacccccttttataaacaggaagtttctggatctgggtatttgttacagagcccacattcttgaaaatagaagaaatctcaggctattgttcttcattattttcgtcattgtggtttgtgaatgctgtccctccagcccccatgcaggagataagggcaggaaagtcatgctgggacaggttactgaggctgggtctgggcagggtatcctatgtgatgtccaaaaagcaggagtgggcaatgaaagggtaaggagtcttggatgattttttccaccttcaccattcccacacagctctggccaccattgccttgcatctgcaatctaacacaacagtcttctaactggtctcctgctctgcatcctacaacacattcttcacttagcagccagagtggtgctgtttttcaaatagtaatcagatcatgttttcccttgcctaaaactctgcaatggcttccctcataaacttacaggccttacaggctctgattcatttcccatttcctatttcctacatttcccattaaatcaacaaattctctacccttcctaattctgcttcagctaatctagccttttttaaacaacccaaagcctttcctgccttaggttcttgcttgtgtggtttcctttgcctggaagactcttcccctgagatccttctgaatgcaagatttcagctcacatgtcacctcagagaggccttccttgaccacccaggctgaactagatccccctctctccctattattttccatcgtgccatctattttatttttttcataacaccgagagcttgtgaaattacctatttcattcatttatttcttgtctcttttcaatgagctaactttcttgagagtagatatttatggcttattctctgtggtatcttcagtgtctaagacaatggtcaccacatacttggagttttgtacatatttaagaaataaaatgttcctggcatacaattattagctagtcttataattatacacaggagaactgggttgccataaagatgacaaaggtgtgtggttgaggattaagttttagattcaaagggaaagactctctaaatagcagcttcagatcagaagaaatagaattgcaggccaaaactaccttctaggaaatcttaacctctgtgtgtgtgtgtgtgtgtgtgtgtgtgtgtgtgtgtagtaaattatacataatataaaatttaccattagttacatttagcacattcccaatgctgtgcaagcatttcctttacatagttcctgaacattttcctgaataccaaaggaagcctttcactcttcaagcagtgtctcttattctcctccccatctctaatccttggcagtcattaatctactttctgtctccatggatttgcctattttggatatttcatgtaaatcaattcacaaaacttgtggtctttttttgcctggcttcttttgcttagcatcttttcaaggttcatccatgttgtagcatgtatcagtgcttcattcctttttatgagtgaataatattcaattatgtggatataccataatttgtttatctgttcatcagctggtggtcatttaggttgtttccatcttttggctattgtaaatagtgctatgtgaatattcgtgtacaagtttttgtttgaacttctgtttttaattcttcgtgtaaattactggtggaattgctgggtcctatggtaattctatgtttaatgtatcaaacagttttcagcagcagctgcaccattttacatttccaccagcaatgtttgaggattctaatttctccatattgtcttcaccaactcacttttctgtgtttttaaaattatagccattctcatgggtgtgaagtatctcgtttatagttttgatttgcacttccctaataactaatgatactgagcatattttcatgagcttgctgaccacttgtatggccatttctctcagaagaaatgtctactcatgtcctttgcccatttcaaaagtgggttgattggttttttttgctgttgagttatgagttctttatatattctagatattaggctcttatgagagatattatttgaaaatattttctccatcctgtgacttgtctttcattttctttatagtatccatcgatgcacagaagtttttacttttgaagtccattttatatatttttaattttgttgctcatgctcttggcatcatatgtacgagtcctttgctaaatccaaagtcgtgaagatatacccctatatattcttcaaagagttttatgtctttttcacttaatttttgaattaaatttgtatgtggtatgaggtaagggtcaaacttcattcttttgcatgtaaatgtctgattgtccaagcaccatttattgaagagattattctttccccattgagcggtcttagcacctttgttgaaaatcagttgactgtaaatgtaggatttgtttctggattcttaattctgcaaaaaatcttaacttcacactacaaatatattctgagatcctggggaaaaagacctttgaaaattctgggctcccttttgaatgttgttctgattaatatggttttaacacattagagtaatgcagcccaatagttaaaattataattactctagttttgagatcaaagtctacttagatgctattagcattattattagcagtaacagtaataggaattatatatagtctctatttacttgaatcttaacatcttttaagacataagatccaacaataaatattagattaatgtttctctcagggcctgtgtctctcatctggcaacatttgaagatgatatctcttccctcaccagtccattcagaatcctaaaaattaaatgatggacagagaagagaagaaaaattaggtggactatagtatgtatttatttctaaaacacacaaaccatctgcctttcctaccctttctttcaccataaagacttaagcagctgacttggacctggggatgtgggtccccctgaaatcaatctgaaattacacgatttcattttaaagcccaggaacatgaagcaaaaccaaaaggcttaaggaatggaattggcattcctacatagtagaaatgctactacgtagtaggcattggttgattttgggctgtgttgcacccactttcccttaaaaaaaaattcttcattttctttggaaaatcagctatttgattgggaaaaaaaattgggtgttaatagagtgaccgtctctcctctagttaagaaactgccacaagactaaaaatgctagtaatttattcatgcctactgcctgacattggtctagttgctgcttccgtgccctccagagcactatggttagcacttcttgccatgactgttccctaaccttcccgtctgtctcttatccttctcataagtgtccttgatcttaagttagaaccctaactggaacaatgacttaagtctttcctcaagttatctcattgaaaatctctgcaatatacctgcacattaaatgttttacagagaaggaaacagactcacagagaggtcccatccctggaaagagatgaaactggggattaaacccaggtcttattgaagacagtatcctttattttttccatttttgcacctcctgagctgggtaagcttttgtgcttagaagtttttctgaagttaaagaattctctccattgttgttaaaataactaaaacatgtaagtaattgccttaatataaaaatgatgttttcataaaagaaaaggttaaactaaagtttcctggtttcaaaaaaatattaaaatcaatcagcaagatgaagccccctccctctttcagaatgtttgctggggattctgggcagaggcttagataattgagaggattagaatgaaggaatgaaggagagaggaaacattccctcaggcagaaagggaaccagagcattgggaaaatgtgtctggatacaacagaaaatgtggacaaagcaaaaatatttttaaagacatgaagagaagaggggttagggtggggtaaagaaaagggggagaaggcaagaaaaatctatagaaaaaaagagatgaaatgaagtttgatctggttttaatttatgtcaattgacaaatccatgaaagctgttctaggcatggctattccctctgttatgtaagtaactgaaaccagttcagaatgtattttttctcctcttcctaaaaatatgatataccctatagacagaggcaacaccaataaaattccctgcctctggcactacattctccccctctcctacacacattctgttcctgcctacaattcaggactggtataattaagagaattaaggatatgcatgaacataaaatatatgtgtgtttaattgtactgtcaaactgaaaacacaaagatcagtggtggatgagcaaaattcctcttctaagattttgttgaaaacttttgatccttaaagcctcactcatttccggcactttccctaactttggggtaaggatgaaagaaaaatatgttcaattgtgtcaattgtattcaaatgtatttttaaaatttaatgtgctgaattctaaaaagaatttatggatgattatgtaggcatgtatggtgatgtttccacagaaaattaaccttgctgattgattgccgtggataaactagtggaagcaggaagcttaagggcaattaactgacagaagtttaatatctagaaaaaaaaaatctaaaagtcagtaagtcagtgaataacctagtagaaaaatgagtaaaaggcatgatcaggttttcatagaagaactatgaacattttcataaatatgtaaataaatgcttaaactactcaagatatttcaaattgaaaccaaagaaagatatgttttcacacatactagcttggcaaaaattaaaaatgcaggcagaggactttggggaagagtaagattgtagaatagaaaactccaccgatcatctctcctgcaaggataccaatttgacaactatctacacacacaaaaaaaacacctttgtaagaaccaaaaatcgggtgagcactcacagtgcctggttttgacttcatatcactgaataatgccctgaagtggcaggaaaaacagtcttgactagccagcaccagccctcccctcccagatcctctggcagctgcagagtggtgtggagagcaattctgtatgctggaaagagggagagcacagcaattgtgagtaattgaactcagcactgtcctgctagagcagaaaggaaaaccaaaccaaattcagcttacacacacccatggagggagcttttaaaccagccctagccagaggggaattgccaatttccacagtcagaacttgagtttccacaaccctcaccaccatgggctagagtgctctggagccccaaataaactttgagagatagtctaggccacaaggactgcaactcataggtgagtccctagtgctgacctgggcccagtggaatgaggggacacattacctactgagataccagctggggcagctaagggagtactggcatcaccttcccctgaccctgtactataaaatttgtataggtgtcttatagtcttatatgtataggaagttttaaatctgtacctgtgttgagtgtatttactgactataagacttttaaaggtttaaaaataagtgcctatgttatattaatgcaacgtgcagttgagcagataaaggttcaaattctagttttgcaatttcctacttttgtgaccttagtcaagtcactttccttctctgagccttagtttcctcatctgtaaaatgaatacatatatccaggtcataataggagttctaaaaattgagtattatgattacttttatgtatgtattatttattctcctagatagtaagttccatgaggacataatcatatctgattcattttaaaaaaatctcacagcaccttgtactaatctttttaaaggaactcttatgaactgggcattttgtacttgttattcattaaagcctcatggcaagattatgcagttggctttaccacttcactgaggctcagagaagttaaggtagttgcctgttagtgagcatctggatttgaatctagatctattgtttgtccatgctctttctaccataacaaggtgctacttccagctgtgttcagcatatgtttgttttatgcatttgatggtcttatcttcaataaatgaatcttcccttgggctacccaatattcttaccctctgttttctcttctgaaagtaataaagcctctgttgattatacttactgactataagcagatgtgttgccagattagtttaggcagagggccacagacctaagagagggaactgggggcacattaaacttttatggagtgagaggattatgaaaagtctagtgcatagggcaccagatttccacactggtccataacacatgagaagtgggtaggtgagggaataaatgaaagttagcatgaaggcactaggtacgtaacaaaggaaagaagaaagggaacagaaagatgtcagcagaaactgagcagcaacatggcatctgaagaaaagtcatcaaaatgcagttggctttgacggtggaaacttgaatttgttttcattaaatttccctgtattcaaaatttttataatgagcaagcttttgtaatgaaaaagataccaaaacttttttcttcttcttctttttttttaaataacatgtttgcctattttctctacaggtttatggtacagaatcagattcttttttttttttaagcttttgggaaccttgaaaatattctagtgtgaagcccttctccctttcctactataatcaaacaccatatcctcctgtctattacatacatggcactttgccaagacaggatatattgggaggaatcgtatagttatgctcaggagatgtattgagaaggaaattataaaaggagttacatatgccaggtgtccaccattgtatcaaggatgaatagaaagtattggaaaggctgttaactcatttcagtgcattcacaaaacaacttttcatgctattctatgagataaagatattcctggtattttaagcctaataatcaggaatagggaagaagccaaggttttgaacagttaggtatagtattttcaaaatgctagtgagcactatactttgcattttcttcaatatttgcagtaatagttttttgttctagcctcaagctcaactggaagatagttgatgcttactatttttctttaatccaggaattatctaaaacaagagagtggaaaatttaccaatgctatttttagagaaggagaaataattaaagcattgttacttactagatgtgtgacgttaatgataattaccactgttaattgtttatcttatttttctaggcactttgcttatattagctcagtccacatgacaatcctatgaggcagacgttattttttctattgtacagttatagaaaatgtaattgataaaagttcagtattttttcaaagtctcattcatataagtacaaatataagatttgaagctagatctgcctgattttgagtttataatcttgattactgttctgtacctcctacttggacaagttatttaaactttctgaatctttgctttgtcatttgaaaagtagagaaaatatttcttccttcatcattttgttatgaggagaaaaattaataaactatgatctgaatgttgatgccctccaaaaattatatgttgaaatcctaaccttcaaggtgatagtattaggcagtggggcctttgggaggtaattatatcatgaaggtaaagccttcataattgggattttgccttataaaagggaccccacagagctagcttatagtttccattatgtgaggacacagctagaaggtaccatctatgaccagacaggaggtcttcactagatactgaatctgccttgatcttgaacctcctagcctctagaactgtgaaaaacaaattcctgttatttataagccatctagtctattataagccacctagtctagttatagcatcctgaatagaatgagtcgaaaacaaagcatcgaatgggtgatcagtagatgttgctggtctttaagacaagagctgaaatctccaggaatgacatttattgactggctctcagtaaaaattgaactgagatttaggtcctcattttagattttcaagttttatggaaattggtcaaaaaagaaaaattgcaacactaaaaatatgtgcgcttatccaaaacaagggcaagaagacaggaagatttaatttcaaatgatttctctaggcatcaaaagaggggataagtcaaaaattaagaagtagagtttttttgttgttgtttgttgtttgttttttcgagacagagtctagctctgtcgcccaggctggagtgcagtggtgcaatctcgactcactgcaatctctgcttcctgggttcaagcaattctcctgcctcagcttcaagtagctgggattacaggtgcccaccaccatgcccagctaattttttgtatttttagtagagacagggtttcaccgtgttggccaggctggtctcaaactcctgacttcaagtgatctgcccacgtcagcctcccaaagtgctgggattacaggcgtgagccaccgtgccctgcctaaaaagtaatgttttaaatgaacaaacaacacaaattcatgacattgggatcgaaatgcaatcaactgctttcccttgtatgcctgattgtcagcaagtgtgcagaactatcggatgtatagggagcactctggtcctcaaaacaagggcgggcttagtagacaagtaatcagtgcatttgcacagggccttatgcctagaatggttccatgcttggttaaatgctctgctaacactgtcttgaaattcttgtaacttgtgaacaagagacccttattttcattttgtacttaacccagcaaattaggtatccagtcttgcttggaacgtttggtgcccccagctcatctcagtgaaatgccctcagtccaatgaacacattctcaggagatgccttggaatgctgcattagcagatttctcttttccttttgtttttgttagcaagcaatcttccgttcattctttgaagttgtgtataatgcatgctacgtgtaaagctctagatgtataaggatgaaagtaatataattaaaaggggtctggatatttttttaagaaggaaaaataacagcaccatctccaagatgtatgtgttaaggacaataatattttggaataacttttttagagagaagtttcaaatttctgcttaggagtggctttgagtagggtctggatatcggtgttttcttaaaacactgcatgtctttctaatgtgcaatgaggattgagaaccactgagttataaatttgctggaaaaaatggacattcccggtaagcacttataacacgtttcttcagaaatcctctagagcatttatatgtgatcaaatttgtattcctgggtaactacagctttgcatatagtaggtgcttagccaaattttgttggcagatgggaaatcaaatataactttaatctatttgttaaataacattatgcacatgatcttcccataaactttttggcctttaaaaaaagttttccaacccctggacaaatatttgcaaggtggtatttttaaaaatttcatttataatagcatcaaataaatctaacaaaaaatttataagattgttacactgaaaaccacattatatttctggggaaaaataaagaaggcctaggtaaatgacagctatacaaagttcatggattggaagacttcatattgctaacatgccatttatttccaaattgacctataaatgcaattcaatttcaattgaaatcccaataggcttttctatagaaattaggaggtgattctaaatacaaaggatctagtatgcctgaaacaattttgaaaaaaagactgagaaagaacaacaaagttggggaggagccatagtacctaatttcaaaacttataaaagttcagtaattaaacacgtatactggttaaagaataggcaaataaataaaggaaatagagtacagtttgcaaataggcctatatatatatatacaatcaattgatttgcaataaagatgccaaggaaattcaatgaaagaagatattatttttcataaatggatctgggtcaattggataaccaaccttgatccctgtcaccatacaaaacattaatttgaaataaatctgaaagtgatcataagtctataaaatctccagaagctatgcaaccttggattaggcaaagctgctgcttttccttatttttttttccccaacttttattttaggttcagagggtagatatgcagatttgttacatgggtaaatgttacatggggtttgatatacagataattctatcacccaggtaatcaacatagtactcaatagatagtttttcagtcctcacccttctcccaacttccaccttcaagtaggccctagtgtctatttttcccttctttgtgtccatgtatactcaatgtttagctctcacttatgagaacaagtggtatttgattttctgtttcggcattaattcacttaggataatggcctccagctccaactccagctgcaaaggacatgagctcattctttttcatggctatgtagtatgccatggtgtacatgtaccacattttctttatccaggccaccatttatgggcatcttggttgattccatgtctttgctattatgaatagaggcaaagcttcttaatagggcataggaaatttctaaccataaagtaaaaatctgatacatttacccaatcaaagtttagatctatttttcaaaacagtggaaaactaaaaggcaagccacagatgagaaaaaatacttgtgtgtgaagaatgatcagagagatacaatgttgctggtgttaaaaatcaagaaagagggtaacaaatgaaggaaaatgtgggtggtttctagaagctggagtagtcaggggaacagattgaaacacagccctgccgatgctcttgatctcagcccagtgagacttgtgtcacacttctaacctacaaaactggaaggcaataaatttgtgttgttccgatcctctaagtttgtcaaaattgtcacagcagcaatataaagttaatacaattccttaggattttctatgtaaacaattttgttgtctctgaataaacacagttttacttcttcctttctaatctttatgactattacttttttgatttccttattgcactgtatgggaactcctgtacaatgctgaacagaaaagatgagctcaggcattcttgtcttgtttcccatctttggggaaagcattcagccttacactattcattaggatattagctgtaggctttttatggttgctctttatctgattgagaaagttctcttcttttccaggtttgctaagagtgtttatcatggaagtgttaaattttgtcaagtgtttttttcctgcaggtattgagatgattatgactttacctcctttttttctaccaatgtggaaaacaactgatggatttttgaatgttataccaactttgcatttttggaattcctgttttatatatcgatggatttgattttctaaattttgttgagaatatatttttactcaaattttataatcggcataacaaattacaaaaaaatgtagtgatttaaagcaacatgtgttacctcacagtttctgtgagtcaagagctggccatagtctaattggatcctaggcttagagtctcacaaggctacagtccaggtgttggccatgctatattctcgttggaaggctaaactaagcaaagatctgcttccaagcttgattaggttattagtataattatcttacagttgtacaattgagggccttagcttcttgctggctgttgtctgaaggctgcgttcagttcttgaaggctgcgttcatttctttaaaaccactctcaattctttgccatgtggacctcccaacatggccacttcttcaaagccagctaagacatttctctggagtgagtctcctagcaagacatagtcttaaataatgtgatgaaatcatgagagtgacatctcaccacctttgacatattttattggttagaagcaagtcacagtacccatctgcactcaagggaggggagaagatgatatcagggcatgaacacaaggaggcaagactaccctatacttgtttaccacagcatctatgttcatgagagatattagcctattatttttggtcttctaatgtctttatcaggttgtgttattagagttacggaggtcacttttgaaaatgattttcattttcatatgcttcttttcctctttttttacttttaactgatttttcagaaataaataccaggttgaattgtagatataaatacctaaggttttgttggtaaaacataggctgtaaaataaaaaataaaaaaaaacttaagaacagcatcaatagttttttaaatataagaagtgaatccacaatgtccaacaaaacttgttggttatctctcaagcatcagtcaggggcccctggaagctttattcatttatgtctttttttattcgtctttcataatgtttctagtttcttggtagaatttcagcagaattaaacttaaattgttcagaaatgtataatgaatttccttcaacttctatgcaatgactgattgatctgggttggtaaattaacagctgataacagcaaggtacatactggtagtggcagttgggtcttattgtgtagttcttgtgcaataaataattaaagaggaagtttcttttttctttcgattctcaccagctctacacaggggtagataagtcgcctatgagccacaatatgcatattaaactcttgggttcagaaggttgacttactctttatcctaaggcagattgggcactagacattccttctataatggagtaataatttaatataaagatgtgctcatagttaagctgaaggtggtaagacttgagccctagagtcagtcagactctgcttaaagtatgacactgactcttactagcttaataaccttgggagttatttgtaatattaataacaactctgatgccctctttcttcatctgtaaaattagtgtaatagtatactgatttcaaagactttcaggagaattaaatgaggtaattcatgtataatgctcagcataagttttgacacataataagcccttagtaaatgttagcaattactattattgctattgtaaaggggaaatagtatggaccttggaatcaaacagacctggcaccgtttactaggtatatgaccttgtacaagctagttgacttctctgagtttcagtttcctcacttttaaagcgacaaacataataagtactttgttagattgtcatttagcatactgcctattgtctacaaggcacttttaaaagcatttatattagacactttaaaaaggtgaattttcttcctcatcttttctccagtactctcttagcaggtttattacatacaaacgtggcagctggtttcttgttgtcatagtaaagacatagctaggctgctgttacaaaagaccatgaaatgaaaaaaatgacagaattatctctttcatgtaagaggctagtatgtagcctgatatcagagatacagtctccttccatgctgttgctctgtcctcctccacattgcaacttctgggacaggaaagaaaggaagaaaagaacatacttctttattttgaggaatttttcgagaagtcatataccttccttctgctaataccccactggccagaacctagttgtctgaccacacctgcttacaagggaaggagatgttatctttggctgggcatgatgatggcgtagtcggtggggctctcagtcactgccaaaatacattactagcctaatcctgccagatgaaatgaaggtgagagactggatttccttccaaagtagtagaggtatatttcctgggggttgagtggaaagatcatacaattgttcaaaagatgaaagctagtatgcttgcaagactgatcttatgtttgattattaacagggcttaacctgactgtggctgcttttgtttctcatttctctcctttattacaattggatgatctaagttacctattatcttcaactttcattaagcgcagaaacaactcttcttctgctctcttgcctcagagtcaatgaactgatcaataagtagttactgagcttctagaattcatttctttatgcatccattctctcatttatacacattccataagtatgcattgaatttttactttgcagtatgttctgggaatattaatacatcctagacatgatctcaggcctaaaggaactctcatttagtaattgaaagacagaagcattgaaaagacggcacagtatggtaggtgctgagaaagaattaagcacaggatgctatgaaagcccattggagaactacgaagagcgaagttagcctctgaactgaatccgttgttatgatggatgatgtgatgaattcaagagaaacataggacctggtcttgttttctgggcaccctctatcagaatgcccagagaacaatgaatgctttctttgaaaccacacctcataaagtgcttaagggttctaagatctgcaggcattcagagaagaggaagatccataaggacctaagcagacagcaaaagcttttgaataagtgaagtgtcaaaggtctggatacatttagagctatgagaatggcattctggtgtgagagctgtttgaacagactcatggtgcatgctgggctcctgaattaggaaaatggactagagtctattattaagtttctttcaaatggcacatatcttactttttggtcttgagacaacttcagaataattcccagtaacttctgccctgtcctgtgtggcttctcaccaaatacagttcatagaaatggacaatggcagaattgtgtttaatgctgcttaagatttccattgtgagttggcagccttagtatataattttctcagataaaaaaatctcttgccttgggattttgccaaaaattactttgccccaattagattctagtctgatgcaatcattgcttaaaattgtctcaaattgaaaccatctaatagccaattttggaatgaagaagatgggagaaattcaacacactatggatagtccatttattgagtgtgtgatccaggaacaggagaaaagcagagctctcaatgtattctgccttggacacagtgtgtcagtgagtttcataacagggtgttcttcaccggcagatccttttgttggcttagcataaatcaagccttcaaaggaagcacaatttgatcatatcttaagaaatcaagtttgacgtgttcattggatactcttctttctgttcattgtacaggcattgttggggctcagaaaacaataccctaaagtgtgatgatttggcttgctgggtactttgaattaaaggaaattggaggtgacttggaaactgcctcagaatcagggtctttctaagtttcccttgtttctccccacaagcacaggaaagaattctctttgacgtttccgtatctgactgagggtagttcttccaaaagaaacacaattgccttcaatctcctgcccgaaatctccattaaccagggaagattcatcaccaaagaagaaattaaagttctccctttaccaatctgggcagaatttcatctattctcctgagggacattacctgagacactttatctgcatgataagataacctttgtttgcagtgcaattctgcccctcaccttcccataacttgctgccactttccccagagcccagaggaactttgtcccaggctattgtatgttctttgggcccattaatttcccctaaaattaattgattcttcctctaaaatttcccacaacccccattttcctctcctctatgaaaagcgtatttaagtttcaaccttctggcctttctttgagtttcatactttgtgtgacttctgtgcacttgcattttaataaatttgtatgtcttttcccctgtcagtccgtcttttgtcaatttgttttatagaatcaaattctcaagctttcaggggtagaaggaaagtttcttttgtccctacagcatcttacagagaggctggccagagggtgttttggaattgggccatatcctggttcctcaaatagtgactgagcactagctctctgaatggaatttggagaagggcgtgaccccactggttggtgctaaaatgcgtggagattcatagcacatggtagatactcattatatttatgaatgaatgaataaatgaattaattaacattattgggccagaatatcccctcctccatgacaagataggcttctcttcttccaaatatttctccttggaacttttgggatggtgtactgcattattcttgggtattttctttatttcatttataagaaaatattagcagtaatgtcatgaagttccttggaaacagtttgtcctttcacaccttgctttaggctttactagctgggaccgcagcagcctttagcataggactagtttagctccacaactgaggtgattacctgataagcactcttcctgataccttaggtgtcataaggtttttccacatggtagagggaacatagacttttcctggccctgtgtgagctgcatgaattatttcatctgtcccctttgcggtggttctttccttgacctcagatagtttcctcacacaaacgtgctatttgggagtggaaatgggggttcctgcgcagatctttggaccactctttctgttcagctctctcttctctaacactgccatgcagactcaatcaacctcagcctctcagaactcccaagcctgtctcttcaaaccaggaaaaccactggctgccatctggattctcttttcctacgatgtggtctggaatcactttccaggcaaaaagtgggggcaatcatagggttcacctcatttgtttcccctctctcagggattgctatcccaagctgcctgttgttcagtggctgaaactattgttttatatttttttctgattgctttagttgttttatgtggaaatgtaaatctgaatgcagttactccatcttgattgaaagaggaagtcagtgcataaaaatttatatagaagaccattcatcaaagcattatagtttatgaagaataattgaaaataggcaaaaggcaagagtatatatatgctgtttaatataatggatacacatatgtatgcatttcacaacgtgttcagagaaaaaaaatgacttgaaagcaaatataccaaaatgttaataatgccatattttacaaatttttataaccaatatagaataattatagaaatattaaccaaaatttaaaaagtggacatttcagttaaaaactagtgaagctaagtttcagcatgtcaagatatttatctggcaatctacttttaatgaacataataatcatcatcataacaaatataaatagctctcttttacttgccaagcactattttatgtgctttttactattaatcatttaatgctcaaacagtcctgtgaacagtaataattctgtttccattgaggaaatggaggcacagagaattgaagtcacttttcacagctggtaaatggtgcagccaggatttggctccagggagtgcgggcatagagtctgttcttcatcaccatgccatgctgcctggttccctagaactatggggtttgaaagacctggagtgatttcttgaccagtcctgggggagagccccagatgacttggccaaagatcagcaaaaagacatggagatactgcattgcaaaagagggttctatgccccaaaactctgaggatggagctcatggtagggtggctgccaggcatgtcacattagccaaacagctaatgtaatagagccacaagttgaacccagaattacttgcttcacttgtgtctttgttttttccagccctaaccgtgtgtctctcaccacatgattgttagtctgacgttcagagatgggagacctaactttgttttcttgtactctaccaactagataaaagaaagatggtggtagggcaggggaggtggggggtggctggtgagggtagaagtcatgggggctgttcaagattgacacactaaaaattaggtgattcgccttcagacaagccacctctcgggtccccaggaaccacactccccagcaaatctgagcagggagaaaaagggctgacacagaccctacagaatgtccatctaggcagggcttcccgtacactgacaccctggggttattattgctttgagtatatgagatcactcagaatggaatgcctcattataggtttaaacccaagctataaatcaaacatttttcctttaatatggggaagtttcagattattttcaagaaacctggtgcaaagtgaggtaatcttttatggtaaagaggatgaataacttaaactgcattcccataaatttctttaacctggaaggaaggctttaagtctatctgcatacatagcacatctgatttttcctttgaataatgtgtgaagtgttttaaacagaccagcaaattcacagggttttaaagcctcctgcagattcggccttgctttctgcagccagacaagtgtcgaaaattatcgaggattgtgttcttactttgacgaaatgttcttttttttccttcaggcagagagatcttgtttacaattatttcttcattctgtgtcccaaacttccagtttgcagagatagaaaaatcaatatgaatagcttagtgctaacaaatgaggctccaattaccaataattttatgcaatatgacaaagatttttgtccagttagctctactttttttcattttcttaatggtgtttggcataggtggacctagttattattcaaaactatatctggaagcgtggttttcctctgtttcttccaaatgttcactgattttaaaatgatattattttgaagatgaaaatcaacaaatctttacacaagattcttcaacttttccaaacaagaacattttcattttagattttttttaatctttttggttgaaataatgaaagaagggctggagaagcatcccccagtggacaatggggaccagataatagtctcttaataagccattaacattctgatgctagattttattacatctactgatgtgttaaaccagtgcttttcaaactttaatgtccatcccagtcctttggggaacctattaagatgcagattctgtctcagtaggtctaggaggggcccaggagtctacatttctaacaagctctcagctgatatagatgctgctgctccatgagaagaaaggattaaagcacttttgtatcagttagggccctggtagaaacagatggcatattcaaattggaaatttgagaagagattaataaagggcttatttataaatatgcagacattgtttagaaaagcaataagagacggtgcagtgcctctaggctaataacacctggagagggcactaaccctagatctcaagaggcaaggagagagaacagttaacacctggagagggatagctggactgacagcaaagcctgggcattcagtagggagatctggctaacctccatgaccctgtagaagctaatgggtgagggataggaatatatgtctctgtcaccctcttcctgctctcccactcctaccggtgcctcccatttgccaaatcgaaccaaatgcagtagggcaagggaaccaggttgatgccatccaccataagtcagcttcccagggctactagcaagatggaaaagggaaagtgaagctagaagggtgacaggaagatatccagcagcacattttacttgaattcacaggtgctttaaacatatctaccatatttcaccttatgatcaagtatatttataagatgctattttttaaacatactaccaagaaaaaaagtgctgccaattaaacctatgacatgccattgattgtaaaatggatcctcatttgagagatgttaaaatttgataaaaacatatttcagtcttagaattggtgaaatatagtattgtgtttttcataaatcttgttcaaaaccagaggaaggaaagatcactatgaaactataatttttcaaatgattggatgcaaaatgaattttcattggatcaacatttttttccttcccttaaaataatttaaaatttaattctaatatcaataagagtcaagacaattcaccaaagagaagatctagtaacaataggtactttttagccacacttttactgactctgggtggcatagaagacttgccttcctgtagtttggagaccaagaaaaggaagaggagactggtaaaactgtaatatgattaaagtacacagagtcagcctttgattgttataatcacttaagttagtgtaagagtgaaaaaaaaaagtgcatttagtgaaagaagttggactactttgggtgagattttattttggcgttgatttgattatttacagaagcttttagactgttgatatcacatatcaacagattttcttgaattcctaacacaattgggtcaacttcagagcaaaagcaaaatttcctgctataaaatatactacatgtcaattattttcttgctttaatatagcaactaaaaattctataatatggtgaccttatgtttagggtttaaatggtttacaaaaccccacatatccagagggctcatttttaaagccagttgaagccttaaatttcttccgctgtgggctcaggttcttcatgaaatgagtgagtagtactagatttcttctaaaatccctacagttcagattacttgacgttgaaatagaaagctttaatatgataaaaaattaaccctgtatatatgtaagaaaaaagaacacagtttctttgtgtaaaaagaagacaataactgcataaacatgaggaaatctttaaagaaaaatgttaatggaaatatccagctaaaattccagaatcaagttgaaaaagtggcatcccatatgactgaaagaaatttgattggtattatttgtgtgctctccttgtgtgttgggttcctctagaccacgcccttgggtttggtaactacctaggaggactctcaggactcagcatgtagttgtactcatggccatgatttatgaccatgaagggatccaaagcaaaatcaatagagggaataggtgtatgggcaaactccagaggaaaccaggagcaagtttccaaaagtttcccagtattcacgcaagatacacttaattcctccagaaacaagttgtgatgacacatgtgaactgtcatctcccaagggatgttcattaggaactcagtacccaggatttttactgggggctggtcacatacacactctctacttagcatatactaaagcttgagacttgcagaagggaagcaagtattcggcataagccatttgcagtttaggcacaatgaaccactcttgtcagttagggtcgtggaaacattcctgaaattcaagtccctagatgccagccaggggcttagcttgcaagcaggtctttctgagggtagcagtctcaggcttgctatgttaatttttttctgcataatctcgttcactagtctgcattagatttgaggttacatacatagtcatatatcacttaaggataaattttgagaaatgtgggacttttttgtcattgtctgtgaacgtcagagagtatacgtacccaaacctagatgacagtatagcctattacacacctaggctgtatggaatactctgtcactcctgggctacaagtctgtacaacatgttactgtagtgaatattgaaggcagttgtaacacagtggtaagcatttgcctatctaaacacatctaaacatggaaaaggtacagttaaaatatgcattatcatcttatgtgactactgtcagtatatgtgctctattgttgactaaaatgtttttacatggcacatgactattttaaaaattattttcatttatgttttcttttttcttaattttattattactatactttaagctttagggaacatgtgcacaatgtgcaggttagttacatatgtatacttgtgccatgctggtgtgctgcacccattaactcatcatttaacattaggtatatctcctaatgctatccctcccccctcccccaacccgacaacagtccccaaagtgtgatgttccccttcctgtgtccatgtgttctcattgttcaattcccacctatgagtgagaatatgcagtgtttggttttttgttcttgcgatagtttactgagaatgatgatttccaacttcatccatgtccctacaaaggacatgaactcatcattgttgatggctgcatagtattccatggtgtatatgtgccaagttttcttaatccagtctatcactgttggacatttgggttggttccaagtctttgctattgtgaatagtgccgcaataaacatacgtgtgcatgtgtctttatagcagcatgatttatagtcctttgggtatatacccagtaatgggatggctgggtcaaatggtatttctagttttagatccctgaggaatcgccacactgacttccacaatggttgaactagtttacagtcccatcaacggtgtaaaagtgttcctatttctccatatcctctccagtacctgttgtttcctgaaattttaatgattgccattctaactggtgtgagatggtatctcattgtggtttgatttgcatttctctgatggccagcgatggtgagcattttttcatgtgttttttggctgtataaatgtcttcttttgtgaagtgtctgttcatgtccttcaaccactttttgatggggttgtttgtttttttcttgtaaatttgtttgagttcattgtagattctggatctacagtgaactttgtcagatgagtaggttgcgaaaattttctcccattttgtaggttgcctgttcactctgatggtagtttcttttgctgtgctgaagctctttaggttaattagatcccatttgtcaattttggcttttgttgccattgcttttggtgttttagacatgaagtccttgcccatgcctatgtcctgaatggtaatgcctaggttttcttttagggtttttatggttttaggtctaacatttaagtctttaatccaacttgaattaatttttgtataaggtgtaaggaagggatccagtttcagctttctccatatggctagccagttttcccagcaccatttatgaaatggggaatcctttccccattgcttgtttttctcaggtttgtcaaagatcagatagttgtagatatgcggcattatttctgagggttctgttctgttccattgatctatatctctgttttggtaccagcaccatgctgttttggtgactgtagccttgtagtatagtttgaagtcaggtagcatgatgcctccagctttgttcttttggcttaggattgacttggcaatgtgggctcttttttggttccatatgaacttcaaagtagttttttccaattctgtgaagaaagtcattggtagcttgatggggatggcattgaatctataaattaccttggacagtatggccattttcacgatattgattcttcctacccatgagcatggaatgttcttccatttctttgtatcctcttttatttcactgagcagtggtttgtagttctccttgaagagctccttcacatcccttgtaagttggattcctaggtattttattctctttgaagcaattgtgaatgggaattcactcatggctctctgtttgtctgttattggtgtataagaatccttgtgatttttgtacattgattttgtatcctgagactttgctgaagttgcttatcagcttaaggagatttttggctgagacaatggggttttctagatacacaatcatgtcgtctgcaaacagggacaatttgacttcctcttttcctaattgaataccctttatttccttctcctgcctaattgccctggccagaacttccaacactgtgttgaataggagtggtgagagagggcatccctgtcttgtgccagttttcaaagggaatgcttccagtttttgtccattcagtatggtattggctgtgggtttgtcatagatagctcttattattttgagatatgtcccatcaatacctaatttattgagagtttttagcatgaagggttgttgaattttgtcaaaggccttttctgcatctattgagataatcatgtggtttttgtctttggttctgtttacatgctggattacatttattgatttgcatgtattgaaccagccttgcatcccagggatgaagcccacttgatcatggtagataagctttttgatgtgctgctggattcggtttgccagtattttattgaggatttttgcatcaacgttcatcaaggatattggtctaaaattctcttttttggttgtgtctctgcccggctttggtatcacgatgatgctggcctcatcaaatgagttagggagtattccctctttttctattgattggaatagtttcagaaggaatggtactggctcctccttgtacctctggtagaattcggctgtgaatccatctgttcctggactctttttggttggtaagctattgattattgccacaatttcagatcctgttattggtctattcagagattcaacttcttcctggtttagtcttgggagggtgtaagtgtcaaggaatttatccatttcttctagattttctagttcatttgcgtagaggtgtttgtagtattctctgatggtagtttgtatttctgtgggatcagtggtgatattccctttatcattttttattgcgtctatttgattcttctctcttttcttctttattagtcttgccagcggtttatcaattttgttgatcctttcaaaaaaccagctcctggattcattaattttttgaaggattttttgtgtctctatttccttcagttctgctctgattttagttacttcttgccttctgctagcttttgaatgtgtttgctcttgctttttagttcttttaattgtgatgttagggtgtcaattttggatctttcctgctttctcttgtgggcatttagtgctataaatttccctctacacactgctttgaatgcgtcccggagattctggtatgttgtgtctttgttctcattggtttcaaagaacatctttatttctgccttcatttcattatgtacccagtagtcattcaggagcaggttgttcagtttccatgtagttgagtggttttgagtgagattcttaatcctgagttctagtttgattgcactgtggtctgagagacagtttgttataatttctgttcttttacatttgctgaggagagctttacttccaagtatgtggtcaattttggaataggtgtggtgtggtgctgaaaaaaatgtatattctgttgatttggggtggagagttctgtagatgtctattaggtccgcttggtgcaaagctgagttcgattcctgggtatccttgttgactttctgtctcgttgatctgtctaatgttgacaatggggtgttaaagtctcccattattattgtgtgggagtctaagtctctttgtaggtaactcaggacttgctttatgaatctgggtgctcctgtattgggtgcatatatatttaagatagttagctcttcttgttgaattgatccctttaccattatgtaatggccttctttgtctcttttgatctttgttggtttaaagtctgttttatcagagaataggattgcaacccctacctttttttgttttccatttgcttggtagatcttcctccgttcttttattttgagcctatgtgtgtctctgcacatgagatgggtttcctgaatacagcacactggtgggtcttgactctttatccagtttgccagtgtgtcttttaattggagcatttagtccatttacatttaaagttaatattgttatgtgtgagtttgatcctgtcattatgatgttagctggttattttgctagttagttgatgcagtttcttcctagccttgatggtctttacaatttggcatgattttgcagtggctggtactggttgttcctttccatgtttagtgcttccttcaggagctcttttagggcaggcctggtggtgacaaaatctctcagcatttgcttgtctgtaaagtattttatttctccttcacttatgaagcttagtttggctggatatgaaattctgggttgaaagttcttttctttaagaatgctgaatattggcccccactctcttctggcttgtagcgtttctgctgagagatccactgttagtctgatgggcttccctttgtgggtaacccgacctttctctctgactgcccttaacattttttccttcatttcaactttggtgaatctgacaattatgtgtcttggagttgctcttctcgaggagtatctttgtggcgttctctgtatttcctgaatgtgaatgttggcctgccttgctagattgggaaaggtctcctggataatatctagcagagtgttttccaacttggttccattctccccatcactttcaggtacaccaatcagatgtagatttggtcttttcacatagtcccatatttcttggaggctttgttcatttctttttattattttttctctaaacttcccttctcacttcatttcattcatttcatcttccatcactgataccctttcttccagttgatcgcatcggctgctgaggcttctgcattcttcatgtagttcttgagccttggctttcagctccatcagctcctttaagcacttctctgttttggttattctagttatacattcttctaaattttttttaaagtttttaacttctttgcctttggtttgaatttcctcctgtagcttggagtagtttgatcgtctgaagccttcttctctcaactcgtcaaagtcattctccatccagctttgttccgttgctggtgaggaactgcgttcctttggaggaggaggggcgctctgctttttagagtttccagtttttctgttctgttttttccccatgtttgtggttttatctacttttggtctttgatgatggtgatgtacaggtgggttttttgtgtggatgtcctttctgtttgttagttttccttctaacagacaggaccctcagctccaggtctcttggagtttgctggaggtccactccagaccctgtttgcctgggaatcagcagcggtggctgcagaacagtggattttcataaaccacgaatgctgttgtctgctcgttcctctggaagttttgtctgaaaggagtacctggccatgtgaggtgtcagtctgcccctgctggggggtgcctcccagttaggctgctcgggggtcaggggtcagggacccacttgaggaggcagtctgcctgttctcagatctccagctgcatgctgggagaaccatgctctcttcaaagctgtcagacagggacttttaagtctgcagaggttactgctgcctttttgtttgtctgtgccctgcccccagaggtggagcttacagaggcaggcaggcctccttgagctgtggtgggctccacccagtttgagcttcccagttgctttgtttacctaagcaagcctgggcaatggtgggtgcccctccctcagcctggctgccaccttgcagtttgatctcagactgctttgctagcagtcagtgagactccgtgggcgtaggacactccaagccaggcgtgggatataatctcctggtgcaccgttttttaagcccatcggaaaagcgcagtattagggtgggagtgacccagttttccaggtaccgtctgtcacccctttctttgactaggaaagggaactccctgatcccttgagcttccagagtgaggcaatgccttgctctgcttctgctggcgcacggtgcactgcacctactgtcctgcgcccactgtctggcactccctagtgagatgaactcagtacctgagatggaaatgcagaaatcacccgtcttctgtgtcgctcatgctgggagctgtagaccggagctgttcctattcggccatcttggctgccagtcttatttatattttctttttttttttggaaatgtctttttttttgcagtgcattttaaaaagtattattatactttaagttctgggatacatgtgcagaatgtgcaggtttgtttcaaaggtttacatgtaccatggtggtttgctgcacccatcaacccgtcatctacattaggtatttctccttatgctgtgtgtccccttccccccccaccccctcacaggccccagtgtgtgatgttcacctccctgtgtctatgtgttctcaatgttcaactcccacttaggagtgggaacatgcagtgtgtggttttttgttcctgtgttaatttgctgagaatgatggtttccagcttcatccatgtccctgcaaaggacatgatctcttacttttttttatggctgcatagtattctgtggtgtatatgtgccacattttgtttactcatatctctgcctagattagtagaaaatctagtctctctcttaggacactttttaccccagaaaccttagttctccatgggcttactcaatctacagaaggtaggtttaggctccaactctttatagaaatagggagaactagggactctgatctggccatgggtgagtacccaaggtttgatcatgttgtttttgtggctaccacagggtgtttcattgtaaacacaagagcttgcacagaatgatactgtctctgtccttcggtataaaggaggctcctaggaacactgaaagagaaaaaagagatctttctctccactgttaagctcagacgtgtttgtcccatgtcactttaggcctaggctccagtgtttgtgaatctttaggcaggctttcaatggtaagggcacagtttccattgggatcacttctttatactggtaccctcccttcccttaaggtaagttcctcagtggcagttcttggtatctttcttttttcttttccttaaaaaaaacatttttttcagacctgagttgataccatttgaagtcatcagcagttataatgtccttactttcccaaagggaaaggtcaggtctccattccttttctccccggaaactccttggcctccttggtttgtaaatttgcccaccccagagatgtctgagtttagtcttccaagaggtatgggtggggcagcctttaggaagccacaaaagttctctcatactattctacaagaacaattaatgtctatatattaatatttcttaactaaggaggctgttttaataagtcttctgaaaacaaagatctgccccaaggcaaacagtttccactaatagacactatatagaaagtaccagcactttttcatggcagcttctcatgttattgcactacagcaaggtactgaacaaaggctctgagggttacacttgaatagtaagtccaattctcagcaaaatgttgatgcaggggcacttctattcctccagcatctgccttggctctgcctgcccagggcatcgttgccgaccttcagacatatttacagaaaagcagatgagaagtcactgagaccttaaatgaaatttaaataaaattacaatttatcttgctaggatttatatttaaaaccacatttctgattgtgaaattcagcactccacttgctaatggaattatcatcaccagaaagatgtgggggtgaaggcagggtttccgcaaaattctggaaatgagaccatagtttcaaggaaggttagccttgcctacttgcacaagttaccactgtgtatttatacctgttgttaagtctgcttctggagagaccacaatacctgtaggaagaaaatgtctgtaagaaatttgcttctttccaagataaaagggccagggggtcaggtagtaggaggatggaaaaaacaaaacaaaaaaccagaagctatccttaaaaagagaaaataatcagtgtagaaggaatttaaataaatactgtgaaatgaaatattcagactgacaacttgaatctgttgtagtaaaaataaatatttttaactttcttatcagtagtagcattggaatattcaaaatttattaatgaattacataatttaaagcatttgttgaacactaagtgtcagacactgtgttagatactggaaatagagtagtgaacttgatgaaagccttccatcttcatgaacttaatgtctaatgagaagcagaccttgtacaaatatctgcacttatgatgagaaatgtgcaagagaaatgcacctgggttcagatgtatatagttgtgtagtaagtgtatctaacctaatatggaacatctgggaagtcttgcctgagaaagagatatttaagctgagaactaaaaggtgagtaggaggccaggcatagggacttatgcttgtaatgccagcactctggaaggccaaggtgggtgtatggcttgagcctggaagtccaagaccagcctgggcgacatggcaaaaccctgtctctacaaaaacaaaacaaaacaaaacaaaaaaacaaaaaaaacaaacaaaaacacacacacacacacaaaaagttagccaagtggcatgcgcctgccatcccagctatggcagggaagctgacgtgggaggatcacctgagcccaggaggacgaggctgtcaattgcaccactgcactccagcctgggtgacagaatgagaccctgtctaaaaaagaaaaaaaaagatgaataggagaagaaaaggatataagcctcataataagagagagtaataaaaatagtcagcatgacacaaaaagtcttcatgaaatgctcatgggtgagtggttattaaaggagacttgtgaaattcccatgagtggtgggatttgggcatatttcagtagaagggggctggagaaaaaaaatccttattgacattctaccattaccaaggccttatgtattgcagctattttctacaaaataaaatggaacaagttatagaattgaggtacctaggaagtgcagttaagtcttgttagtctactttggaggcaggaaaaactatagcttgaatctctgattgttttatgtagggttgatgtttggtcatcccctggaaggagcctgaaaaggatttttgggaagtgtttagagcctggcctttaatacaagcacaaaacaatctgtcttccttttatcctcctggaacctactttttttttgttaaaaattgtttttgaaggaagagctcagggatttcattacaactataagaacgtataggatatacacattttcatcagtctggtgaacaaagagaaaagtcagtaccaaaaagcaacctgtgagcagatttcagttcagaaaaggtaatggttttgttgcctaaagaagaaggaaataaaggtaagtgcccttttccagatgaatgagttattacagttatatgatttgtaatcgtcaaatggcaagggataggcaggggacattatcaagtactttctcctatctctggatagaactatattaacatgtttcaagaaatatcattgtcaaccatttctttcaaaagcctactaaagaagctatacaatctcccttgggaaacctatgccatgttattatcatgctttgatgggtaatgtctagtttcctccagtgactaagctaaatttgtctgctgctacatgtacctttatctttttgttctgttggcagtggaggcagcaaatacattaccatctgcataatgatgtgttttaaagcttttattcctttgctggctttcttttcagtaagttgtgtatatcctaaatcaatactttgaaaggagagcagggtctaaaatcagtggcagaacagctaagagaatgagctaggaacacctctgaaaatactagaccagagttactcattgtaccagtaaagaaactgtgagagatttttccctaaaggagcttgacttggatttaaccatatctttcccttcgtcctgtgttttacaaagagacagtcacaagtgaaacatggattctccagaaatcacttgcatacaggcttataacctggcatgcttgttaaagggatatgatgggtctgaatgtttccttccacttcagggacaaaggggaagtggccagttagtatctttgggaagctgaccaaaggcctttaggtctcttaggcctaatgctgagtttcttatgtttggagcataaggccagtttcctctttggtcaaaaggacaacatggctcctttggtttgggcctagagggtaatgaaaggagatcaaatggaaagataagaagtatataatgccatagaagtatttcttagtatctatcttgattctatttctttgaaatcaaaaaacccagcacctgaaaagagtttgggcatcatagccttatttctaacaaaagttctagacctccccactcatcttattatggattcctgtttgagttctacatttccttgccttgagcactagtaatatagtctgatatcaatgaatatttatgaataaatgttgttaaatgaatgaccttgagtgttattagtcagttattagtcatatctgttcctttgattattttcagaacctgatagctaagtaaccttctctactttgacccttgagtcttttcccccagcttttatactttatatatactttatacctggtaccatcttcttaagattatttaagattcgggccaggcgcggtggctccgcctgtaatcccagcactttgggaggccgaggcgggcgaatcacgaggtcaggagatcgagaccatactggctaacatggtgaaaccccgtctctactaaaaatacaaaaaattagcccggcgtggtgtcgagcgcctgtagtcccagctactcgggagtctgaggcaggagaatggcgtaaacccgggaggcggagcttgcagtgagtcgagatcgcgccactgcactccagcctgggtgacagagcaagactccgtctcaaaaaaaaaaaaaaaaaaaaaaaaaaaaaaaaaaaaaaaattatttaagattctgaaaccctggatccaatctggacattattctacttggtcagcaaccacattgggactgtcttagtgaccttaaagggagaatcagatacccagtccaacctgtaagaagtttgatttgtattctcagtaggagaactcatgtcatagggttcagagttataagaacttagagactggtttaatatcaccagagatctcaaagtgactattagtgtctattagtcttcattaaattgactcccaacatccaactacagtatttttaaagatatagaagaaagagaaagactcatatcaatactgaagactaaatttgttagataactcaatgccactgtctggtggtgaatctttgctgactataatataaagcaggttgaagggtattaaaaacaagttactcagaattcacctcaagatatgatgaattatcgggcaattggagtactctgtccatcagctttgctcccaatcatcctattatatctacagagatagaggccaacaaaatgaactgggcaagaggcaggtagggaatcatggtggtggcagagctaattctcatagctgtaatccccaagtataggatgtagggtggacattggaggaatatttattataggtgtaagccaagaattgtttatcatgtattatattgatttacagtggatgaaaatcaggttgtagggaaaagagaagttacttctttagtaagtttgaactaggtgaaagtcattgggaattggattagaattcagtgcatgtcattctgccttccaagtgtagatttgggaaaaagacgaatcaccacacaagaggcagtaacagagccaaaattacctcaccaaaccacagtgctttctgaaaacaaaatgaaacaaaacaacagaacgataacaaaaaaatttgtaaagaatttcccaactaaaggattaacaaagagaaacattaaaaaaaagaatattcaatccaagccaaagaaataaaactccaatgtaagaaaaaactgagaagaaaagtatctttctaaaataatgttttcttgtaaaatccagaagaaacaaccaggaaattatttggaatgagcaatagagaagtagaacccattgcctctatgaaacagaaagagattcagagataaaatgccaagataaaaaggcaatagaaataattgcaatgagagatgtataaaatatagaaagattagtataacagaattgaaacatacagaaaagtaaaaagaaaaaaccgatgacaggaaagataattgacatggagaacagggaaaggagagtcaataacatgtggataattagtgtccctataggagactaaatcaataatcagtgatacatataagaagatattcctgagagaaagaatgagttatagattaaggtggctcattgagttaaagtaaataaaaagagactcactttgtgtgatacctggtaatactatgatacaaggttgcatactctataacaacagttttcaaatttttggtctcacaatgctattatactcttaaaaattactaaggattctgttttagggttctccatagaagaatcaataggatggacggacggacggacggacggacggacggacggacggatggatggatggatggatacagatatggtttggctgtgttcccacctacatctcatcttcaattgtagctcccataattccacatgttgtggaagggacccagtgggaaataattgaatcatggaggtggtttcccccatactgttctcatgatagtgaataagtctcacaagatctgatgattttataaggggtttccccttttgctcgattctcaattctcttttgtctgctgccatataagacttgcctttcgccttccaccatgcttgtgaggcctccccagccacatggaaatgtgagtccattaaaactcttttttttttaataaattacccagtcttgggtatctttattaacagcatgaaaacgaactaatacagataccatagatagatacataaaaataaggaattggctcacacagttgtggaaatgggtaagtcctaaggtctgcagagtgagtcagtgagctgttcaaccaagaagagccaatgtttcactttgagtctggaagtagaaaaaaaaggcaatgtcccagcagtcagggggaattttctctcacgtggagaaagttcagatttttagttctattcaggctcaactgataggatgaggcccatccacaatagaaaaggcaatctggtttactcagtctacttatttaaatattaatctcatcccaaaacacacttacagaaacacccagaataatgtttgaccaaatatctaggcaccctgtgggccaatcaagttgacggataaaattaaccatcacaggttccaaataacttttgtttacatagattatctttatcaatgtttaccatattagaaattaaatttgagaatttaggaaaatatgtgttcatttgagtaataagcccattacatgttaacatagataggataccttaatgaaaaaactattccaaaacaaaacaaaaattggatttttttccagtttgcaaatctcttcattgtttggcttagaaaacaggatgtcatatctgctacatttaatttgttttaatattttttggttaaagtatatttaaaaatctatcatcacacaaatatgtagttggaaaggtagctttttaatagctttttcagataattattaatattttaaaactactacacccaaacttgaaaagtggcaactttgaaaggttaattataatatgaaaactgaaatattaaataacttttcatacttagttgcagaaaaatccactggtttaccatttcaaatagatctttacctatatatattaacatcatacactggtcatttggaaatacattgtttccctgaataattaagatcttccaaacattgacacatttagttatacaaattttttttaactgataaaatttttatttcacttttgaatttttacacttttcctgattattctgtgtaaggtgaaactagaactgttcaaaagacatacacaaatctagtacatcaataaccggtgatttttcttttttgctatactattttcacaaatttttaaaatcacacttgttaatattgttgcaaacttcattagaaaagtctaactattgaaaagcttacaagctcaccatggtggttaatagttttccaaaattctgtttttcacatgggagcttaaattttatcgttgaccacaaatactcgcagttccttttgttgtagtgacaggctcatttagttcatttaaagaaaacatctgacaaataattgtttaatttagcatagtttatctgttagttgttctttcaagtaaaaaagggttttccagaaaaatgtggttactttagcttgcaactcaaacaattgcccatgtgattttcctcaagatagtcattcttctgtgatgtgatgcagaagtgccttatgagtatttcccatttgtcaaatagaatatataaggacatatagtataatttaatgtcactgtgttgattcttgtcaaggcatcattgcttcggactatcagtccaaatatcaacaccttaaaagaaaataacctcttagtattatgaaaatggttttgacctcatagactccgtgaaaactctcagggaccacactatttttttatttttaaaattttaatttattttaatttcaaatttctgtgagtacatagtaggtgtatatatttatgggctacatgagatacaaacaggtaatgcatgataatcatttcagagtaaatcgggtatccatcacctcaagcatttatcttttgtgttacaatcatgttatacacttttaatgattttaaaatttacagttaaattatttctcaccattgtcaccctattgtgctagcaatactaggtcttattctttctaactactttttttgtacccattaacaatccccaagggaccacacttttagaaccattgttccgtaagcatccaaacagaaaaacaacagttttctacaaaggaataaaacatgttacctctataataataaatgtgacaatataatggagcaatagaaattttgagagacaaagtttatgacccaagaagtcttacatatttttggtaaatgtatttctgtattaaaagacaaatatttcatgagaatcaaaacctcaaactcatgtatatactattttaaagagacagacaaaaaagagtaactcaaaaaagataaaaagaaaaggagactaaatgtacccaaaaacctgaaaataggccgggcgtggtggttcacgcctataatcccagcactttgggaggccgaggcgggtggatcatctgaggtcaggagttcgagaccagcctgactgacatggagaaaccccgtctgtactaaaaatacaaaattagccaggtgtggtcgtgcatgcctgtaatcccagctactcaggaaggctgagacaggagaatcttttgaacctgggaggtggaggtggcggtgagtcgagattgcgctactgcgctccagcctgggcaacgagatcgaaactcggtctaaaaaaaacaaaaaacagaacaaaaaaaccctgaaaatataaagtaagaatcaaaatattatataaatacaattcacataagaaatcattaaacagagctaagacagttatttatgttggccatgatttcattctataaaaaagaaactatttgccatatatcaccttattcaccttaccacccagtccctggcaaccatcattctactttcttcttctatgagttcagctttcagttttaagatgaataagttctggggatctaatgtatagcattctgaccgtgattaataacactgcattgtttactagaaatttgatgagacagcaaattttgtgtcctcatccccctgccctgcacacacaaatggtaactatgggtggtgatgaatgcattaattaacatgactttggtaataagcatacaatgtatccatatatcaaatcatcacattgtacaccttgaatatgaacaatttttgtcaatatttttaatcagaataagaaaagcaaaaggaaagaactattgtctaaaacctttatgaaccaaatatattgtagcggaggtgtccaatcttttggcttccctaacactaatacactaacactaatgatagctgatgagcttaaaaaaaataaaaaagtctatgcataaatcccataaggttttaagaaagtttatgaatttgcgttgggctgcattcaaagccaccctgggcttcaagcagcccatgaaccacagttgggccaagcttatattacatattaaaataaaagctagcatacaaatacaagttgaaagaaaaagaatagaaatggtcaattaacacatctttttctttaaacttttattttaggttcagaggtatatgtgcaggtttgttacacaggtaaactcatgggggtttgttgtacagattatttcatcaccaggtactaagccgagtaaccaatagttatttttttctgatcttctccctccttccactgttcactctcaagtaggccccagggtctgttgttcccctctttgtgtccatgtgttctcatcatttagctcctacttataaatgagaacaggtggtattcggttttctgttcccatgttagtttgctaaggataatgtcctccagctccatccatgttcctgcaaaggacatgacctcattatttttaatggctgcatagtattccatggtatatatgtaccatattttctttatccaatctgccattgatggtcatttaggttgattccatgtctttgctggttattgtgctggcttcattgtgtggttgctttataatgtcactggtctgtgaacttacatgtgtttttgtattggctagtaatggtccttcttttccatatttagagctcttttcaagatctcttataaggcaggccgggtggtaacagactccctcaacatttgcttatccttatctgaaaggatcttatttctccttcactgaggaagcttagtttagtagatataaaattcttggttgaagatttttttttttccttcaagaattttgaatataggtccccagtctcttctggcttgtagggtttctgctgagaggtggtctggtagcctgatggggtttcctttataggtgacttggcctttctctctagctgcctttaatattctttcattctggccttggaaaatctgattatatgacttgaggatgatcttcttatatagaatcttgcaaggggttccctgtatttcctgaatttgactgttggcctctccagtggggttggggaaattttcatgaatgacattcagaatatgttttccaagttgtttgctttcttatcatccctttcagcaatgccaatgattcatagatttgacctctttacgtaatcccatatttctcggaggttttgttcattctttcttattctttttttttctttttctttttttttctgtcatttcagagagccagtcttcaatttctcagattgtttcctcagcttggtctatcctgctattaatatttgctattgtattgtgaaattcttgtggtgtgtttttcatctctgtcagatcagttaggttctgttttatactgtctattttgtctgtcagctcctgtatcatttattgtgattctgtttccttggattgggttttgctgttctcctgaatctcaatgatcttcattcctatccatattctgaattatgtttctgtcatttcagtcaacacagcctggtttaaaaccttttttggagaacttgtacagttgtttggaggacatcagacgctcttgccatttgagttgctggagttcttgcattagttctttctcatctctatatgtgggtgttcctttaactgcaatatagattaagtatagtcagtaggcttcttttcttgatgttttcacagggccaaggatttgtgcagggtctttgtagctcccttgtctttggtttcacggcgggggttgggggtgggggtgttaggtaattttgctgttgaatcttttggtttgacggtgtgatccagtaggtgatgcttagctatagtggtcggttggtagactcttgctcaggcgtggggctcccctatacccctatatttcttcaccaattgcaatcgtgctccctctcaatgctctgatagcgtgggctcctctcccacttgagtgctggctgtagatcgcaacttggcactcccaggctacccacgacagctctggggtgatctcagggcttatgtgccctccccaacttggaagcagcaaagaaaggaaccttagaagtggttgtggccaagggttttttcttgtctcctgggggctccaccccagagagattcaggtcagcaatcactcagtacaatcagccctggatgggggctctgtgctgtgggcctaagccaggggttccctccctggtaataatgagcaggagtgtgggtaggagccatgggagacagagtggcttcctctccttgggtcagctgctgcttgttggaggtgtggataaggcacttagggcctttgctccttttttagtctgaagatagctgggtagcaccaacacagagaaaggggcagaggggctttttgttcctccttgggccctgtcttagaaacacagagctgcagttactgggagtattcagccagtggagagaggtagctgcactaccagtgtgagcttggggttgcgcttgttggggagcagggggtcaagggctcactaggaggagaaactggtctcctctctgtgctgtggtgttctgtggtatgctgtggtgtgctgtaagttctggtgactgtggggtgccgtaagcataggtgtatccctcaggccaaaggtagcagggatagaactgctactgtggcagtggtgggcagggggtggcgggggggctgtcagatgcctctgggagcctctccccagggaaactctgggacactactagtgggcatgttcactctgggtggggtgactgttctgtggtcatgagctaggggccctgcctggtgaagattgggagtgggggttcccagggaagaggggctagactcctctttgtatggtggctatggtgtgctggaggtgcctgggtagtgccttttatcctttccccaggctgagagctgttagggcagtagcactgcaattgcagtggcacaggggttgtggtttgactctaagatttcctccttggagaaatgctggtctgcctctgtggtgatcagacagaggcagagtggttgtgctggagtcccaggttggatagccctccccagtgagaagtgtggaccgggaccgggaccgggacctgtatggagaacaatctggtaacttttccatgaggtgggtgttctgtgctgggggtccagaccagtttctggtccctgcagactcaccagagcctggagacagcaagggcaagggctgtgaaacagcaaagaggacaacacacccctcccactgggagctctatcccagggagttgcagagctgctactagctcaatagccccagcaggggatggctggagacccaggctggggggacccacccagtgagaagctatgggatcagggacccacataatagtctgaccacttttctttagggcgtggcaatatggtgggagtctattccagtccctagtcaccttggattttccagtacctgaaggtatcaacagtgaaggctgtgaaacagcaaagatggtagcctgcctctccctctgggagctctgttccagggaattacagacttgttgctggcccaaacacaccagttggggaggctggggaccccgatgcagaggtcctgcccaacgaggaggaatgggatcagagacctgcataaaaaaatcagtctgccccctttttttgtagagtagctttattgctttgggggggtctgctccaacctccagtcactgtggactctccaaagcccaaagacaacaacagctaaggatgcaaaacagcgaagatggtggcccattctcccctttgggaacacagtcccaggaggtttggaactgctgctgactggaaaaccctggtggggatggttgtagacctaggccgggaaattcttcccagtgaagagaaataggatctgggacacacataaaaaaatagtctggccacgtcttcatagagctgctgcactgtgtcggaggactgctccagtccctagttgcctctgattctctagagcccaaaggcaataacggctaaggctgcaaaacagcaaagccggcagcctgcccctccctctgggagctccatctcaggcggaggtaaagctgctacctgtggctggccagagttctaagccagtggatcttatcctgtgagatgccatggaagtgcggcctaccgcctgtggctgctcagcccctggattcagcccctttcctaggagtatgtatgggggtccaacctcctgatttgccagagttgcagccacttttcctgggaagcccaggtatctaaagctcctgtggttccatgtgaacctaagaggcctctcttccaagactctacatatctctacatgtcagactgaaggtcctggtggagtggattcacgaggggatctcctgacctggggttgcaaagatctgtgggagaagcatgggtccccggatcgctcactcactcaccgcttccctgggtaggggacgctcctctagatccatgttgctcccaggtaggtggtcgtcctgccttgcttttctccattctctgtgggttgggttgttttcttgatgaatgccagtgcatgtacctggatgtttcagctgaaggtgttgtacttactcactccttccatttctctccatgagagcagtgcacactagctgcttctagtcagccatcttggccagcctccaacacatctgttttgatcttgctaaaatcaagtaggaaaaaagaaaggccagctctagaacatccaaataatagatgttaattttatataatttttgcctcctgtggaacaagacaggctttcatggtagagagaggaaatattatctctctttgagatttgaccagttggatctatactttgagagcagatttacacaaattatttcttgagtggtgagtctaattttgaggctgagatttcacatgaggcctgatatatgagccccagagatcaagtgtatcttgaaaaccatatcatttagatttcttggcttctgtttacgttcctattgttaatatctattcttatgtaaacattccattcttgttttagctgtactatagaaaagctgaagaggatcaagaatcttccccagtatcatcagggtttagaacaatgtctggcatatagtaggtgctcaataaatatttattaatgaattaattaatgtccacatttgggaccagaatgaactaatgtctgtctctaacttccaatcctcagactagcatgaggggaagagcggggagaaaggataaagctctgcacagaattcaggcaagagccagatatatatggtccagctgccatttccacatggaaaatataatcttcacagccacctttgaagtatctgagttgtattctatttaggaaggtggtcatttccttgcaacatcattctagggaagagcatagatgggaatatgtgtaggggcctgtgtgtcaaaaactcaaataacctcttgtaagtgtggctcaagacaaggctcatgcatataactgcaacaccagtgagtgtcttcttcagctgttccagatgctctgggagaaggttctcacgggcaggaacaaaaagaaaagcataataattttctcaaatagcttagtatttcctaggctttgggaactaagtggtacaagaaactaagaggcacaccaaaaagaggcaacagaggagcaaaggttagtgacctagaaatagatacatgaggctgagacaagactcagactgtgacgataaaaacaaaacctgtgaggggagaccccacagccagagtagtgtttatcaaaaaactcggttgggcacatccacttctcttgacaagggaactgtcagaggccagtggttaaggaagtgacacagcaaaggccactataacaagatcaggattctaccctttgctccttagtcagaaatccataataggcaaacacaaacacattagggcttggaggctgggggctcaaggtgagtcctgtgctatgcaatgaatctcgagcctcagggtcccaggagacgggggtgagcagccctgagcaggtgcactggaaatacgggccatgtggtccaataaatgaaacagtggagaatggggaggatgggctatttgagaacaccagcaatataaagaacaacagcaatatcaaggaccaaatctgggtccttggtgttgctggagaggagatgttcaaaggctgccattatgaacatattaggagatttttgatggacttgactctaacaaagagtttctctgagagggaggagcaacagtgtcatctggttttatgcatccagtgagctctgatgaaggaggacatgggagataagcagtgtgcaatttgcagggagcatggatctttctgggcagaaaatcctgccaatagaagttaaatcaactctggactctcactttccatgcatttgctcgactatattcaggttaaattggagggaaaaaaaattccaaagggaaagcagtaaaaacacaggtttaaaaaaaattaatgtagtgaacaagtcaggtttttaatactaatgagcattgtttgatgtctgtatgtctgagcaaaagcatatttgaaaaaattttggaaactattatgggctcatactgaatatttaataatcaaatacaatagcatagttagcattcaaatacactattgtaaattggaaacatatattaatacaataaaattttgccatttactagctgtaacagtgagatggtgaactgaatgagtagaaagaaaatttactttccattttgtactcttcatgctacttaagtattttgaacagcatgcttatgtaattaaaatgttagtcaaacaacgctattatagtctaggctagtcctagaaataatgaacaattgagaacatttctatttggaagcatcattctcttgactctctttcctctagatcttacatcccccatcaaaacctttatccttcatattagaatgtaagtactgataagagtttgcataatgaaatttttattcattaataattaaagccttaagctaaaataattcaaaacagaccttggggccagctgcagtggctcatgcctgtaatcccagcattttgggaggctgaggcaggaggattgcttgaacccaggagtttgagaccagcttgggcaacatagggagataatgtgtctacaaaaatatttttaaaaattagctgggcatagtggtgctctcctgtagtcccagctactctggaggctgaggtgggagtactgtttgagcccaggaggttgaggctgcagtgagctgtgatcatgtcactgcactccaggctaggtgacagagtgagaccctgtctcaaagcaaaacaaaacaaacagaacagaccttgagacttgccctgtcttttgcagaaaaactacagatgtaataacagaagcaatcctttcccaatctcctgtagctctcaaaaccctcaactgtacacacaacctcttaatatctttcataactagattcctgaaaagaagaattttttttctttttcaaaactgagcataatcaggctcatggtactttcattgttaaagccccttggttgtgatctaggggaatatgtcagaagctgaaggtgtagaaactgaactgaatgagttgcatagaaataatgagcctggggtcagagttggtgctacccagggaacagccagactactttcatggtcagcctccagcaatgaatgaggtcttgttacccagtggtgtctggggaactgtctcactctggagagttcactgaggtggtgggatatggtgaatgtttaataataagttctgtgaaagaaaaaaggagaggggtgggagaggggtgggagagggagggagggaaggaaaggaaaggaaaagaaggaaggaaaggaaggaaggaagaaaggaagaaaggaggggaattctgatttgtagtgtttcccaattgttatggccaatttcagcctcccaagctgacatcaggtcgttgaacctggagtggggaagagatgtacaccattggctctccctagccaggacaaatcaactaactctagcacaccactacacttgaagtacgctacttgaaaatttgttttaacaacatgattgtgtaattaaaatgttagttattcagctttcaggtacctgctgagaagctcaccagtttaacttggcaacactattttctttaagtgagttacaggcttctgtgggccatgagaaatgatgctttttgtaaatctcctgctccacggtgaaaagccaagatctgctgcctaatgaggtattatttttggaggcaagcaagcaagctctgaccattgggttattatttgcaatattgctctggaaacccattaccaaaggagcaataggtatatggaaaggaaaagaaattactttggctcagagctaacagtgtaacagcgacatcgaactagaggaaacggggtctgggatcctgtgcatcaattggtaggtaatgagagcctgaactcctaaaggagaaacccacagtagagccctgcattagcatatgccaatttatatcaggctctaatgtaggcagagaggcttctaaatgaataattgctgagggggcaatggtgggagtcatctttcgaagagttgttttatttttttctctggccactgcaaatatgagcttaataatcctttcagtgggtactgtgttatcataaaataatctaaatgctactaaatggtatttaaaatgatttccagacactggcagacttgactgaatggcaattcgctgctaatgcatctctagtacagcatgtgagaagcacggtaatgaggccacattgttgggatcgaaatccttcaccatggttatttttgcttccaactttgacccccagccagtttgtggcattctgcctcacctctcacttatttccaccttttttcaggtccctgttcagacctgggctatggcatgaaaagcatggtgtccactgtttcgtatccatttgctcatttggtcagttgtaaggtgcagcgcaactgctgggaaggtggaactggagatgcaggcagtcctccctggagccccaaagagcaagtagctaggctgagaggctaaaaagaatgaaaggtattggcaatgcacttttgttcatcatgtctctcccctgagtatatgtactccaatcacacaaggtacagtggaagttgaggtggaaacaaaagtttcagaagctctgaattcctcattgaatcatgtgctgcctgagtgagacatacaaggagatatgcttaatgaccccggcactgtagtatgacactgaatggtttatcagcaccctggaaatcagggcattcatgccaagaaaaggcacattgcctgtgtgtttctctattgagacacagaataattcagagaggagagagacactgtttatattaaaaatgctttatttgggtagcttttttgaaaggaagataatggagtgcttccaggtcttaatttttgttgttgtttgtttttctttttcctgtggtaaattgcacataatataaaattcttgtttttagaaataatttgaaatcaattccaagctacaatctctgcctctcttgctcccccaccatggggaatagaggtgggaagcacagagcatcttccactttcctttccagattacagcaaaatgtcaagaagtggtaaaggagggctggaggcacaagaacatttacatctcacgctgctgacaggcagccagctggtgatggtgcctcagagcagccatgcagagagaaaaccacctcagagcatgggaggctggtgggatcacaggccaccatgctcctggcaaggatgcgatgagaatagtggatttggagaacagcaaatccgccaccttgaatatcactgacagaactctgcaaatagacattgaataaacttggagaagagggtcatgtggatccttccaaaacactttctccatgtgattttcctgaagaggaattagccaaagaagataaggacctggatctcccacacaactgagacaatgcacaggcatacaaaattggggttaataagggtgagttatcccaaaaaaatacggtagcctgctcagacaagcactctggttgagggtatcaagtttgtattcttaattcctggaatgttgtcaattaatgtcaagtaatcaccaaataaaatctgagtcaactggaacagagacttaagctacctcatgctatagacaaatttatttggcataagattgatggagcgcatgaaattcactcacctcatcaagccaggatttcaaaagtcaaaatatttttcaggttagagtgagaatcccctgaaaggtgatgagggatggctggaattaacccagtagtacatatcagggctgagggaacaaagctacaatacaatccatctgaggaggaaattttcccttaggttagggaaataacattaattagaatatttatgttgggtttaggttataaattcaggcatagaaatttctctttccatccccacccaatgatatctgaggaatatgaaaaatataggccagtaatgattaaaattgtggatgtcatctgttgaggtcctctcaaaccctgtgacagtgacactgggaacaattcatttggaagagaattaggtaacacatgccctttgacctacaggttccatttcttttattattattattattatactttaaattttagggtacacgtgcacaacgtgcaggtttgttacatatgtatacatgtgccatgctggtgtgctgcacccattaactcatcatttaaccttaggtatatctcctaatgttgtccctccccccctccccccacccctcaacaagccccagtgtctgattttccccttcctgtgcccaagtgttctcattgttcaattcccacctatgagtgagaacatgcggtgtttggttttttgtctttgtgatagtttgctgagaatgatggtttccagcttcatccatgtccctacaaaggacatgaactcatcattttttatggctgcatagtattccatcgtgtatatgtgccacattttcttaatccagtctatcattgttggacatttgggttggttccaagtctttgctattgtgaatagtgccgcaataaacatacgtgtgcatgtgtctttatagcagcatgatttataatcctttgggtttatgcccagtaatgggatggctgggtcaaatggtatttccagttctagatccctgaggaatcgccacactgacttccacaatggttgaactagtttacagtcccaccaacattgtaaaagtgttcctatttctccatatcctctccagcagctgttgtttcctgactttttaatgattgccattctaactggtgtgagatgttatctcattgtggttttgatttgcatttctctgatggccagtgatggtgagcattttttcatgtgtcttttggctgcataaatgtcttcttttgagaagtgtctgttcatatccttcgcccactttttgatggggttgtttgtttttttcttgtaaatttgtttgagttcattgtagattctggatattagccctttgtcagatgagtagtttgcaaaaattttctcccattctgtagattgcctgttcactctgatggtagtttcttttgctgtgcagaagctcttttgtttaatgagatcccatttgtcaattttggcttttgttgccattgcttttggtgttttagacaagaagtccttgcccatgcctatgtcctgaatggtattgcctaggttttcttctagggtttttatggttttaggtctaacatgtaagtctttaatccatcttgaattaatttttgtataaggtgtaaggaagggatccagtttcagctttctacatatggctagccagttttcccagcaccatttattaaataaggaatcctttccccatttcttctttttgtcaggtttgtcaaagatcagatagttgcagatatgcggcattatttctgagcactctgttctgttccattggtctatatctctgttttggtaacagtaccatgctgtttttgttactgtagccttgtagtatagtttgaagtcaggtagcctgatgcctccagctttgttcttttggcttaggattgacttggcaatgcaggcttatttttggttccatatgaattttaaagtagttttttccaattctgtgaagaaagtcattggtagcttgatggggatggcattgaatctataaattaccttgggcagtatggccattttcacaatattgattcttcctacccatgagcatggaacgtttttccatttgtttatatcctcttttatttcattgagcagtggtttgtaattctccttgaagaggtccttcatgtcccttgtaagttgtgttcctaggtattttattctctttgtccctgtttgcagatgacatgattgtatatctagaaaaccccatcgtctcagcccaaaatctccttaagctgataggcaacttcagccaagtctcaggatacaaaatcaatgtgcaaaaatcacaagcattcttatacaccactaacagacaaacagagagccaaatcatgagtgaactcccattcacagttgctacaggttccatttctgagaatttatcccacagacatactgtgcttgccaagtacatgaagatatatgtatactgctgtcattgttccattattcaaaactgcaaaataacagaaacaaactaaatgtcctgttccagggaggagttaatatttttgtggccaatgtgcagtatgtccatgacatcttaaatggaaaaaataagtgggaaaacaaaatagtatttcatttgcattaaacaaaaggaaaagcaaggcatatgtatgtttatatttgcacagaaaattgcaagaaaagtaatgcaaaaaactgtgtatgtttacattcagagaggtagttgcatggctgtgcaactttaacaagagtattttttcctaggggtgtcataacaaattaccataaattttgtggcttaaagcaacataactttattttctcagagttctgaaggccggaagtccaaaaccaaagtattagcagggctctcatccctccttgcctcttccagcttctggtggctgcataactccaacctctgctgctgtgtctgtgttttcccttcttctggctgctgtaaggacaattatcattggatttagggcccacctggataatcaggatgatcttatctcaaggttcttaattatatctgcaaagactctttttctaagtaggtcacattcacatgttctaggggttagcatacgaacatttcttttagaggtcaccattcaatccactacaaaaagttactagtgttctaagacatgaatattccaggaagtataattatacaaagcttattagaaagcacatacaattcttcatttctatttatctatgtccctttttcttcctaagtattgattgagggctgccatagggaatgctttttgatgaggattgggatagggaggcattcttttggaggaaagattctttaggttacggcaacctggagagggggctctgaaaggtcagagctaaactggaaggcataagaaagaggatggttgcccagcttagagctgaaggagtagccagaagggagatggaggtgggtggaatggttctggaagcagcttctccacagtcatggcctgcctgggtgggattgttgtggctttcacacagctacagttattgaagcctatttctggtttgtggaagggtggaagggagacaagataaacctgaccatcttgttcttgtactgctcacagttcacttcagtcagtggggagatggtcaaaagccccagaaacctatgctgaccactgaatcaggctctgaagtgggtagggcagtctcagctgatgctgccattctagttaacttctctggcacctgctctggttgggggttggggagtgggggtggggaagtggggaggctggaagaattgggcagtcctttaatagcaacagaaacaagctcatgaggaggttctgctcagagttgctcccacttcctacagcaactatggagtgcacagtctggcactgaagcctctcagggaattctctgcgttggtgctcttccaagaaaaaggggcagcctataggttaatcaagcatttttttctcaagtgctactgaaagaccaagtgtaaaccagtaccagaaagtatcccccaaccccatcccagagctgtgccagccctgtgcccaccctgtgcccctcctcaccagcatctgcacattccctacatattctctttagtggagcctaacctctagttctaatatagttctaatttagtttgcatctatgatatattttcctgtcacttgggaagggatgttttacagataaaatgggtagaaaagtcaccctattttttttcactatcgcgggttatctgagaagaaataagcaatcaaaaaaccagaaaggattaccagggatgacttgggaatcagagttgtcaagcttgcaactatcacatgctcttgggagctttctcaagtaaatagaggtttcttcttctaaattcttaaggtgcaaagaatgattaactccttggtattaattctggtcaagtttagtatgagaccctagaggcacttctgagtttctccccatctaatagctccccagaaagctgggggcagccagtagcagcaggtgctcatctgaaagctggtcttctcttgggactaaagaaggggccccacactgtagagcgccgactgtgaggtagaacacaactgcctctggaattctagctactttgttttaaaacattttttttatttaagaaataaattgtattatgtatatttgaggtttatgaaggaatgttatatatgatacatgtagatagtaacatagttactatagtgaagcagattaacatagttatcatctcacatagttactttttgttttttggcaagagcagctgaaatctatttaacaaaaatccctaacacaatacaatttattaagtagtctgtgtgttctatattagatctctagactccttcaccctacatatctgctactttgtatcctctgacctacatctccccatttattcctcaccacacgctctgcccctgattaccacttttttattctctatttgaacctttttttaaaaagatttcacatataagtgagatcatgcaatttttttttctgtgtctggtttatttcattagctgaaggccttccatgtccattcatgttgtggcaaatggtagaaccccctttttaaggctgaataatatttcattatataatatatatacaaatatatataaatgtggtatatatatgatatatatatacacatatgatatgtatatatatatatatatatacatatgatatgtatatatatatcacattttcttatcagtgtgcctgtgtccccatgtgcattgcagcaatattcacaatagtcaagatacggaaacaatctaactacttttttttggcacttttctccatctgcccctttgtgtctccctatcccccagcccaggaacttgttcttccctttagctctctgtattcgtttcctagggctcccacaacaaagtgtcacaaagcagttggtttaacatttattttctcagtgttctggaggcttacatcaaggtgtcacaagaccatactctttctgaatcccgaaggagagtctttcttgcctcttcccagcttctggtgtttactggtgctccttggcatcccttggctggcagttgcaattggcctccttccatccctgcctccattgtcacaggggttctcccttcgtgtgtctgtcttctgtaatcagaacttcctggcagtaggaaaagcatcacaccaggagagtcaagaaactgggtgccaatctcattcctatcacattgagtagatgggtgacttttataaactaggtagctctctctagttttttatcatctaggaactaaaaatgatttctaatgctcatctaactgtgaaattctagggaactttttgctttgactcttttgctcagtcttgaatttttatgtgtcatgtagccggccctctgtatccataggttccgcatctgtgaatcccaccaaatgcagctcaaaaatattcagaaaaaaaaagaatgattgcatctgtacggaaagcattcagacttttttcttgttattattccctaaacaatagagtgtaacaactatttacatggcatttgcattgtattagctattataagtaatctagagatgatttaaagtatacaggaggatgtacataggttatatgcaaatacgacaccattttatatcagggacttgagtatccatgaattttggtatttgagagaggtcctggaaccaattcctcatggatgccgagggatgactgtattaattttacaacaatttctcttaaaatgggtggcaggtggtggtagaaagtaggccatttttttccagcagtgtttactagtaaaggggaatatttggggatgcagtagtgcaagtgtatccccccctgattgttcaagcaagccatgggagaatgctaacaaacagagatcctggggagtgtaaaatttaaaagcagaagggagtgaacccacacctacaagccatctgatctcctactcatagcctataaaaagggtgaaggagggaagtgtgaggtgtgaattgtagtccacattgcccctttgggtcaccctacagtctaacaatgttgggcttgattggccatccacaagttaggggtgatgtaaaagcctaatgcttaaaattacagtctttggagtccagtgacacagattcacatttgaactttgctgctaactagcttaggaatatgactttgcaaggttatccagttattctaagcctccattttctcatctgtaaaatggaggtaataatcctatcagagatttgtcccaaggattagataaaatatgtaaagcactcaacatggtgttaggcacatactaattgctcactggctgacagttttatcattattcctgttcccaatttcatttctactttgctgttaacagttaatatgagttatttccaggctgttaaaaagcaataaaagtagtaatgccaaagtagtgacatgaaaaaatattacataaaaaagatactgaatttcatttggatttagttcaacagaaaatcagaattttagagctgaatggagcttatacatttccattatttcttacatgcagaaaccaaggttcagagtaacttgacaaaaatcccataacatattagaggcagagttaggactacaagccatagcccctgtagctcatatcctagagttttgtctgttgcagtaggaaacctgatttccaagagaaggcaaatgataatagaaaaatagaagcattatttataatttagaatgttagaaaatattctaatattctaatcttactagatccttgacagcactataggggcagcatattaaatagcagcttgatctatattgacctgtgtcttctaccggaaagagacctgaataaagcaactacaaaataaaagctgttcccctccccctcacccccttcccgtccctccctccctccctccctcactcccttctttccttccttccttccttccttccttccttccttccttccttccttcctgccttcttctcttcctattatttccatgaggctactgggcatgacctaataagaactgccaaattatagctgcaaaatggttgccagcaataccattaattgtcctaaatgaaacagataataaattgttggactccatggttaagtggcaaggatgtgagccttataaacagtatgtgtgcattgagcaatgatgccatgtcaatttcttaggcacacacacaaagcaatgagaacagagtattagtgcttaattgataatgttagaaaatgaaagcttccctggaggtgtgaaggaaaaacgctatcatttgtgaggactcataccacagtctcctgctggaaattattggcattaatggcgtataaatcagaattctaatacagaggttataatgtgttttctgagaagcaaatactgattatatgatggaacagtgggtagagcttcaaatgagaattcttgagacctggattttgatgccaggcttctactgtcttgcttttttcataattctgggtagctcagtttctcaacttgtttttctctaagattcctaatcttcagaacaataattttctccacaaggatatgtgtgtgtatatatacatacatatatatatatatatatatatctccccacaaggatatatatatatgtgtgtatatatatatatacacgcacatatacacacacaaatatacacacatatatgaagtttgtattagtattatgcacatatacatacacaatgtatacatatatgcatatagaaaaataattttctccattagattttctgcaaactctagaaggatgagaattttagtttaagatcctaagactttatggaaaaaatggaaatggtgaatgagttttaacgagtcctgtggaagttaaatatacacatattaatatctctgaaaacattaaaatggtacattacatataataaatgacattttaggcaaaatgtcaaaacttaggcaaaactctaagatatggtcccctatatttccaccccctgatgtacacacccagtataattccctccccttaagtgttggtgggatctatgaatagaatgggatatctgtgattaggttatgttatatggcaaaggtgaaaagattttgaagatgaaattatggtcccaaaccagttgacttttgaattaattaaaagagacattattctgagtgggtctgacttaatcagatgagccctttaaacagatcatctagaggtcaaagataaagaagccagagaccctctccccaaaacaccataacttctacagcttgaagaagatgcaatctgctaataagtatggcttaaaagagaatcctaagccacagatgatactccagccccagacaacagcttgatcacagcttggtgagacctgaacagcagaccctgctaacttgtgcctgaattcctgacctacaaaaacggagataatacatatgtattgttttcagtcatagcatttgtgatcatttgtaatacaaccatagtaaaattaaatagtatcttaatctagtgagtggggctgtgtgtgatgtctctgtgttaccttcccgtaacctctataacaaatcagcacaaacttagtggcttaaaacaaaacatgtttattctcttacagttctggaggtctgaagtccaaaatcagattcagcgggttaaggttaatgtattagcgggtctgcttccttctgaaggctgtgaggggagaatctgtttccttgccttcttcagcttcttgtattccttggcttatggctcctttctctatcttcaaagggtgggactctactctctacttatatcattacattaccctctcctctgactctgactcctcctgcatctctcttaaaaagatcattgcgattacatcatgccaactagataatctaggataatcttcccatctcaagatatctgacttaatcatatctgcaaagtctcttttgatatgtgatattatgattatatgttatatacagatcacaatatattatatagatcgctatataaccatatacatatatatggttttgtccatagttcctagataagaactcccataacagggagttacagtcttttattataatcctcgggtactttaggcctcagaagcaggcttcaggaaacaaaatctgtctgaccttctcttgtcctcctttcacccactcaaggcaagactctaatctgcttgtgggtcataagaccctcattgcacagagggtcctgccccatactctggaggaaggaatgttgcacagagagaccaagaaggatctaaacagataggcgttgctgggtttacatcatacacttcttgtccaatcacattttgacaccattatccatgcttcaatcatagataacctatgaagtctccatgaaaggcttaaaggacagggtttgggaagcttccagagagcttagcacgtggaggctggcagaaaggtaaagaacaactcatccacctgccaggagggtggcacaccctaagcccacaaggacagaagttcctgtgcttgggacccttccagaccttgccgtctgtatctcttcatctgcttgtttatttgtatgcttttaaatatccttcatgataaatcagtcagccaaagtaagtgtttccttgagttctgtgagccgctccagcaaattaaacccaaagaggaggttgtaggaaccccaacttgaagactattggtcagaagttctggaggcccagacttgcgactgcagcagacaccagctgcgtgtccacagttcagttctgaaactgtctatccagagatagtgttggattccacaggttgggggcttggttccacaagaccacccagttttcccctctagtcgtcttctgtgttgataattgttctggtggtatgagcagaggaaaaacatggtttgagagagtttttcctgaaacaccatataatgtaacatttataaattctgaggattagaacatggacacattttggggggcattattcatcctaccacagtcaccctcaagtcttcaaagaggcacatccattgcacatgcaaaatacatttcctccatcccgagctcaaagtctcaccattgcactgttgttttgatcatgagacaattctttgagagaagagtaaggcattgttcatggtagtaatgatggaaatgaatggaaaccctgaatcccctacctcttctaatgaatggaactccaatatctcagttctgtctgctcaaggctttggcagacttgctggctccattattccatcccacactgttataaaaaaaactacctgagactgggtaatttataaagaaaagaagcttaactggcccacagttctgaaggctgtgcaggaagcatagcagcttctgcttctagagtggcctcaggaagcttccaatcatggtggaaggcaaggagggagtgagatacttcacatggccaaagaggaagaagagagagaatggggaggtgttacacacttttaaataacatctcacaagaactcactatcacaacaacagcatcaaggaggatggtgttaaactataataaaccacctctataacccaatcacctcccaccgggccccacctccaacaccggggattacagtttgacatgagatttgggcaggaacatagatccaaaccatatcactggccatgacaaatatttgtacagacaccctgggagtattctctctaccttttcttagaaagcataaggtttgggctaatcaatcttgttctgaaggtctatttgtaaatccttagagggtttttgagcattaatcctaccttgttctgagggtctattcttaggttatcctaatgatcttgcataaagtacaatctttaagtagcaggcctttataaactgattttcatgaaagactttgcctctgctgttattctgtgcaaagtcctagatgctttagcagttagcaggaatgctgtgctgtgccaaagcacaccgcctttctaacctgaatatgctgcctgcggtttctttggttcatttacaaactcaatcgtatgaacaatgatggctccctgaaaatataatcaaaacaacctgtttatgagacaaagctgagcttatttttacaatgataagagtaataaatggtgataaagcaaatacttgtacaattgccagccactaccttgacagaatcttagtgcatctcagaagacagagagcaaaatcgagacatttattgagttttagagtcctgtttaaggcaggtttttcagtgtggaggcttgattaggattgggtaacaatcatagtaagttaggaattgtacacccagcaaggcagatttagagccaagaggttcaaagaatctcggagactaagaagttgtttcaattgtttgatgccattgattaaagagttggacaatttaatgttcatttaaagggcttttaaaggaagtttctgaaataaataataaataataaaaataagtcaaagattttcctggaataataaagtcatactgatgaagacggtggcataataaggtcatgttaatgtagacagtaagttgtgtagatacagatggttttggtttttaaaacaaatattttctgaacacatactaggaagtggtggaaatacagtggtgaatagaagggacatgaatgatactgagagtccactgaggagacagataagtaaataatcatttataagaaaactttggttacataaaataatatggatgaatcttacaaatataatgttgagtaaaaagcaggagcaaaataatgcgaacagcatagtgccgtttctataaaatgtaaaaagaagatcataaggcaactgaactgtattacttacagatgtatacataggtgacgaaaataaaagaaactaattattaccatagatatcaggatagtggctaccttcggagggaaagagaattgtgatctttaaaggatgcctggatggttttggggtgccagcaatgttctgtttgttgacctgcattgtaattatacaagtatttgctttaggacaatttgttaaactgtacatataagtttatacactttctgtttgcatgtttatagtttataataaaaatattttttaaatagccaattatatatggtattatcttataagtgctgtcacgggaagattactgaaagaccaattgatactaaagcagtactttatggaaaatttaaatcaatataggaggcgaaaatttacatttgataaaaatgtcttaaaagctaataaaacgatgtaattctgtgcatatgaaagcatcccttactaagttcagcaaagtgtgtagagttgaatttacataattttaatgtaatgttttcaatcaaacattttggtggttgcttggataagggagaagaaaaagtcaaggataacaggcttatcaaagtaaacgtatgttgggatcattgctggagtaggaaaaacaagagtagttttgggaggtgaaaagaggatgagtatagtttggaacattttgagtttcttgcactcttgggatatccaatggagatgtctaatcagctgttatatttgtaggtttgatgcatcagtgaaagctgtgaactggaaataaagaactaggagtcatcagaataaacatgaaaaattgaaaccagaaaaatgagtagggccatgagaagatgaacaggctgacagcaggatcagttcattttcaaaacttgtccatattagtatgagaaagagcatggccattgctacctcctttcagccctaatttgggcagacagttgaaacaaatcccctatattttagggtcatgacacttccacggagacatcatccagcacccccaagcaagagcaactcccagggaataccactgaatcactttatttccaatttatggcaatataagcatccccaaaacatttattgagagacttagcttgaatgttaccagttgttcaggaggcaagagttttagagttttgtttaaggcggggttttcagtgtggaggcttgattaggattgggtaacaatcataatatgttaggatctgtgaacccaacaaggcagatttagagccaagaggttcaaagaggtacaataattgggtgaaaattgtagtcagaatggctattattaaaaagtcaagaaggctaggtgcggtggctcacacctgtaattccggcactttgggaggccaaggcaggtggattacgaggtcaggagttcacaaccagcctggccaagatggtgaaaccccgtctctactaaaaatacagaaaattatccaggcgtggtgttgggcgcctgtaatcccagctactcaggagatggaggcagataattgcttgaacccaggaggcggaggctgcagtgagccaagattgcaccactgcactccagcctgggtgacagagcgagactccgtctccaaaaaaaaaaaaaaaaaaaaaaagagtcaaaaaataacagatgttggtgaggttgcagagaaaaaggaatgcttatgcactgttggtgggaatgtaaattagttcagccactgtggaaagcagtttgaaaatttctcaaagaatttagagccaccatttgacccagaaatcccattactgggtatatacccaaaggaaaatagatagttacaccaaacagacacatatgctgatatattcattgccacactattcacaatagcaaagacatggaatcaacctaggtgcccatcagtggtggattggataaagaaaatgtggtacatatacactgtggagttctacgcagccataaaaaggaatgtaatgatgtcctttgcagcaacatggataaagctggaggccataaacctgaccgaattaatgcaggaacagaaaacaaaatactgcatgttctcacttacaagtgggagctaaacattgagtacacctggacacaaacatgggaacaatagatactgtggactactagatgggagaaggagagagagtgtgagtagaaaacctacctattgggtactgtgctccttacctgggagcatacccatgtaagaaacctgcacatgtacaccctgtatctaaaataaaagttgaaaaaaatttaaaaatcagacatagaattaaaataacacaggaggatatggtcaccacagaatatgaagaccaagtcttcttatcgtcctaagggccttactttattttagccccatcctgtcactagtgtttgatgcaagcatcctgggacatcatgaagagttcaaattatgtttaaaatatcatgtaatagttctctgaaacccttttttggaagtttaatggaatgcattataactaagtaaacactgtttaagaaggcaaagaaatgaataatatatttgacaaagattttaaaacctgttaaaatctaaaataacatctgtttaataaaaagaaacctttgatatataaaaaataccatctagaacaaattgtttcctgagacttcaaaactgtaaacattttcctgttatcacttttattattgatatgtttcaggtgagtgtgttaaatgggttggaattatgtgaatgatttccttaatgtcttcttttccttgcatgtggggacctagatcactccaaacaattagcctttgaggtcaattcaacagaaacaagtcattacctgttgcttttaataagagtttaacaagcttttagaaatctggggactcagaaacagtgcttaagtcattttgctgaggggaggtagtgagtgagtgtgggctatttttatttccaaaactatatttctttacaaaggattcactcctagtagccctttttaagctgggcaacttccctgaactaaaataccatttaattaatacccatgttccataaattttttatgcttccattgtgcaaagaaagataaatatgtcataaagctgggctgtgcagatggacagaattctcttaaagtaggtccttaaaaagtggaatatggatatagacacagagtgagacagtcaagtgtcaaaagaaatctgtcggctttttagcagttgaataattcagaagatgtgcattaagccaacttcttaatttcccgtttcccccctttctaattctttccttttcatcctgtgatctttcttctctctccctcaaagctatttgttgcagagatgccctggaaagcaggtggtcttccttatatgacagcatctgctgctcagaatgagagcctgaagatctaaaggcaaaggaaatgaaaccgcagtgctataaatgcctttttaaaaatagccttgttttttattattttttgttgaatcaactggaacatttttattgttcacaataaagcaaattgtctaaaggcaatgatcctcctccctttatatttctgatactagggtttgttttattcccagtcatttactggatcaggtttcttccctaagatcttacaaatgatgtgggtggctgcaaaccctctgaaggttttctaaagccatttgttaataatatcctctcagcattgactccagcctttatagttgtgattgttagtgaagcttcaagggcacagtggtgtgtttttatccttccagcccttggggagaaaagaattcccgggaggacttttggctggcttattatcatccagaaacaagaaatcagaaagcctaagctaaaaggctgaacatgtttttaaactatctaaacatgattggacagtgtggcatatgtaataaaaaggaacaggggttcagggttcatatggacctgaatttaaatcccatatctgctacttaccaaatgtgtaacactggtcacttaagattttaagccttagattcttacctgtatataggtataatgtataatattagctattttacaggcaaaaaagatttttgaaccccagtttcttgtaggtataacaatgtaggttataacaatgcccatgtcacagtgttgctggaagtattaaataaaagtacctaatagtgcttgtcatgtgggcccttgagaaacgttagcttcctgtgagggtcacctcccctttctctctccattcctctgtccagtccacatcaaaatccacaggcatttacaggatattgggactggcatttttactctgtcctctgccttttatggggaaagtctggatgagatgggaacctgtcccagcctgttgtgctgttgcagtgaactttgattcacaagtgagaccctttgtcttgtctgggagactgctggaagcagggtctatctcagaccccactcttacgcagagaggaagtggggccactcggtttggcagaagacatttcctctttgaacccctgcccaatctgtccttttctggttttccccagagctatgaaatgtgatagtgagctgtaggattcgttgttttaggaccatgaaacaaatgtttggggtttgagaatacaaacacatgtctccagcagctcatcggttggataccagttctggaatcacacagattgccagtaatgaaggttgtttgctcacattttgttctcactactcactttcacctgcctgtccctcctcttctcctctaggctggtatcacttccctgccccagggtgactggcaggcacatcaactgtcattccagtgggattctcacactgggctctttggatgcattgaacagttccatgaaacatgtcttcatggattcatatgcatattgtatgccttttattctctttaatctcctggctcttcctgatttctgctttcagcttcagcggtgggtgcttgagatgtcagttggccaagaaaggtagcccccatctaaatacctaatgcagtaaaggacaattatcaaatccatcagttgtgatcctgtttacatttccaatgggaaagtcagagaaataactgatttgaagagcataattaagtgctacaataaaagtaagcacagtagcctgtgtaaataacaacctcatctaaatttttttcttggcttttttttcccttaaaaatttaaacaaaaaatgtacagctttattgggcaataatttatttaccgtaaattataattcaataattttaagtaaatttataaagatgtgcaaaccccaagcacaatctgattttagaacatttccattttagaacttttccctgagttcctcacaaatctgtttgcaatgaatacccactcacacactcccagccccagcaaccattgatctactctctgtctttataaatatgcatttttgtgcatttcctataaatggaatcatacagtatgtatccttgtggatctcacttttttttcgtttaccatatttttgaggtccatccatattttaacatgtatcagtgtttgcattcctttcaattgctgacaaatattccactatatggatataccacatttattcatttatcagattgttagacacttgggttatttctagtttggggctattatggtaatgctgctatgaatacttatgttcaaatctttgtgcatatgtttttatttctcaggtagattcttaagagtagaatggctgggttatttggtaagtttacgtgtaactttttaagaaactgctaagctgttttgggtagtggatgtaccattttacatttccacaagtaattgataaggataccattttttcacataccattttagttgatatgcattggtaactccctgtagttttagtttccttaataactaatgatgtcaagcacttttaaatgtgcttgttagccattcacatgttattttgctcattttctaattgggttgtgtttctactattgagctttatgagttatttttatattctagatacaagtcttttatttttatttttttattattatactttaagttttagggtacatgtgcacaatgtgcaggttagttacatatgtatacatgtgccatgctgatgcgctgcacccactaactcgtcatcttggattaggtatatctcccaatgccatccctcccccctccccccaccccacaacagtccccagagtgtgatgttccccttcctgtgtccatgtgttctcattgttcaattcccacctatgagtgacaatatgcagtgtttggttttttgttcttgcaatagtttactgagaatgatgatttccgatttcatccacgtccctacaaaggacatgaactcatcatttttgatggctgcctagtattccatggtgtatatgtgccacattttcttaatccagtctatcattgttggacatttgggtgggttccaagtctttgctatcgtgaatagtgccacaataaacatacgtgtgcatgtgtctttatagcagcatgatttatagtcctttgggtatatacccagtaatgggatggctgtgtcaaatggtatttctagttctagatccctgaggaatcgccacactgacttccacaatggttgaactagtttacagtcccaccaacagtgtaaaagtgttcctatttctccatatcctctccagcagctgttgtttcctgactttttaatgatcgtcattctaactggtgtgagatggtatctcattgtggttttgatttgcatttctctgatggccagtgatggtgagcatattttcatgtgttttttggctgcataaatgtcttcttttgagaagtgtctgttcatgtccttcacccactttttgatggggttgtttgcttttttcttgtaaatttgtttgagttcattgtagattctggatattagccctttgtcagatgagtaggttgtgaaaattttctcccattttgtaggttgcctgttcactctgatggtagtttcttttgctgtgcagaagctctttagtttaatgagatcccatttgtcaattttggcttttgttgccattgcttttggtgttttagacaagaagtccttgcccatgcctatgtcctgaatggtaatgcctaggttttcttctagggtttttatggttttaggtctaacgtttaagtctttaatccatcttgaattgatttttgtataaggtgtaaggaaggaatccagtttcagctttctccatatggctagccagttttcccagcaccatttattaatagggaatcctttccccattgcttgtttttctcaggtttgtcaaagatcagatagttgtagatacgcggcattatttctgagggctctgttctgttccatttatctatatctctgttttggtacctttaccatgctgttttggttactaagtcttttatttttatttattgtttcgagagaaggtctttctctgtcacgcaggctaaggtgcagtggcacaatcatagctcactgctaccttggacttttgggctcaagtgatcctcccacttcagctcccatattagctaagactacaggcatgtgccaccacgcctgggtattttctttttctttttggagagatgctgtgtttcccaggctggtgttgaactcctggcctcaagcaatcctcctgccttagcctcccaaagcactgggattacaggtgtgagccagcatgctcaggctagatacaaggcttttatcagatatatgatttgcaaatattttcatccactccgtgggttgccctttcatttccttaatggtgtcttctgaagcactcttaatttttgtaaagtcccgtttaccaggtattttttttttaatggcttgtgctttggttttaacctaagaactccttgactaaccaaaggccgtacaaatcttctcctgtattttcttccaaatgttttatacttttaattcttgcattgatattgatgatccattttgaattaaagtttgtatgtggtgctagcacaaccatctattgaaaagactatcctttcctcattgaattgtcttggcacttttgttaaaaatcaattgactggctgagtgcagtgggtcatgcctgtaatcctagcactttgggaggctgaggcaggtggatcatttgaggtcaggagctcaagaccagcctggccaaaatggtgaaaccccatctctactaaaaatacaaaaattagctgggcatggtggcacatgcctgtaattccagctacttgggaggctgaggcaggacaatcacttgaaccaaggaggcggaggttgtggtgagccaagatcatgcaccactgccttccagcctgggcaacagagtgagactctgtctcaaaaaaaaaaaaaatcagttgaccataaacataagacatatttctagacttctgttccactgatccatataggtctatctttatatgaataccacactgtcttgatactgtagctttatagtaagtatactttgtttttcttcaaaattgctttattttaggtcttttgcattgccatttaaatattaaaattatcttgtcaatttttataatccttgaattttataatccataaacatggaatgtctttccatttatggatgtatttttaaattactttcagcaacgccttgtagttttcagtatacaaatcctgagtttcttttgttacatttacagttaagtatcttactctgtttcatttttgtaaatgaaattattttttttaatttactttctggttatttgctataagtttatagaaatacaattaagttttgcatattgatcttgcaacttgtgaccttactaaaatcgttatagtagctccacattgtgtgtgtgtgttccctaagaatttctacatatcacctgcaaatatagttttacttctttctttctaatatggttgtatttaatttcttaggcgcacagttttctttcacaattaagtatgttagccaaaaatttttcatggacaccctttaacaagttggaaaagttcccttctattcctggtttgttgagagattttcatcatgaatcagtgttgggttttgttgaatgttttttctgcctctactagatggccatttgggttttgtcttttactactttacaacggtgtataaaagtaattgactttcatatattaagacaatcttacattcctagggcaaatcccacttggtgttaataataatcctttttatatgtttctgaatttggtttgctaatattttaaggatttttgcatctatgtttatgaggaatattgaactatagttttcctgtgatatctctgtctgactttggtatgaggaataaagctggctttttggaatgggttagaaaatgttccgttctcttctattttttgggagagtttgaaaaggattgatgtttttcttctttaaatgtttggtaaaattcaccagcaaagccatctggtcctgagctcttttttgttaagtggatttttttttattactaattcagtttctgtacttgtcataagtgttctgattttgtatttcttcaagagcaaattttaattatttgtatgttttcaggaatttgtccatttcatctaggttatccaacttgttcatttacagttgttcatagtgttctcttatagtcctttttatttctgtaaggtcagtaatcatgtctccatctttatttctgcttttagtgatttgcatcttctctcccttttttcttcttgaacttacctaatcgtgtggcaaacttgttaatcttttcaaacaaccaacttttggtttcgttgattttctctattgtttttctcgtctccatttcacttatctctgctctaattttcattctttccttccctctgctagctttggttttagtttgaacttcttctagttctttaaggtgtaaaatagggttctcaatttgcgagagatctttcttctttttaatataggcatttacagcttgttataaatttaactctgagcactgtgtttactgcatctcctaagttttggtatgctatgttttcattttcattcatctcaaagtattttctaattgccttgtgatttattttctgcccagtttaaagagtatgttgtttaatttctacatatttgtggattttccagttttccttatgttattgatttctaattgttttattccattatggttggaaaagatattttgtaagatttcaatcttttaaaatttatggagacttgttttatggtttagtatatggtccatcctggaaaatattccatgtagacatgagaagaatgtacattctgctgttgttaaatggagttttctatgtatgtctgttaagtctagctggtttatactgttattcaagttatctctatccttgctgatcttctctctaaatgttctcttgtttccctcttatgaggacccttgtgaatacactcgccaagctggataatccaggataatcttctcatcttggaattcttaatcacatctgtaaagtccctttttaccttttaagggaagatatttacaaattccagggattaggaagtggacatctttaggatgccattattcagcctctcatattaactatatagtcttgccttaaatacttatctacagtcaatgcactcactaactgcacagtaggacaggattaactcagaaatagggagaagagtgtgcaactacaacagcatgggggcaaaacacagtatcaaagtagcattttgaagcattccaaaactgaatgatggatgttattctatcggaataaaagggggactcaacttacaagacaatggaaatcagggtggaaaactgtacacacatacgtatgcatgtatgcatgtgtatgtgttttgttagagacagggtttcaccctgttgcccagaagagagtatagtgactcaatcgtagttcactgcagccttgaactcctgggtcaagtgatcttccaaagtgctaagattacagacgtgagtctctacatgcagcctgtatttgatatatttgttgtatttaatgcgtcttggcaagaggttttacatgggggagtcattgttacttatgctccactgtagaaaaaatctgagtctttcccaaatatttgtgtgtgtgtgtgtgtgtgtgtgtgtgtatgaagggcatgggtttgtatcagaagcatactttgagcctccagatataagttttatgatatagttttcattcccaatagtaatagttatgggtttattcctctgtgtgtcacacaaaatatgcttcacagtagggagattttataaattagggttatgttttccactggggtctttgtaatgaatttttaaaaatttgttggttcatctttatttgtgtgacttacattatgtctagcttgaaagaccttgatctgacttctattcaattaagttttatgtttttgtactccacagccaaaccataactataaacctacaagaaaagttatggctgaaagaaagaacatcacaacatgttaactgccctctttccatcatttagaaatctctagttgtgagccaggaagtttctgaccagtgagttcaatgttaaatgttgacactcctttgttaggctttattttaaagttttttgtttgtttgtttgtttgtttaccaaagaaagggcttctgaaggatgaccacaaaatccaatggaaaataacatgggaatagttttgatagcctactgaactgcagtcagatgatgtagtttcatatcatggttctgatacttacaacttgaccttgtaaaagtcaaatattctctatgagcctcagttttctcacctgtaaaatgaagataatatctacctcacacagttttaagttactagaatgtgctttgaaaagtgtaatgtactaaacaaatgaaatggattactattacttacaagtagaagaggaacctctgcatcttgaatagtaataatagattgcacatatgtaaattttcattattaagaatgaatgtatttggtgagaacaagtactccatccaacggcttgataggtttcaaatatcccatagctcatgaggctgatgggacaaatgtgaacattttgtttctatttatctccatgtaagcaagtggagttttctctccattttttagccacagctccaactctgaccagccatctcacaaataactggtgtctggttaggaaggactaggtaaatatgataaatctacccctactacaggagaaaggagttgaagacacaagctcctttattgataggtcagaagtgcgtagtttacatcagtaaaacaaaatacttggccaggtacatcaaaagattagggaatgggttactaatatttagaaagaattatttaataacataatgagcatcacacgctcaaatttagcttttttaaaaaaagtgatagttatagggatagcatgagtagttcagagagaatttcactgagaatatgaatcttctggcccaatatttgtgaatatataggtgatgtatgcaaatgcacatgcacacacacacatatacccacttggggttcaatcaagtgaacaaaaaattacttgggatttaaaaaattatgtctgtactttccactctgggtttgaaataaaattaatgctttagggagacagaatttctcccagtattacccaagaagagttaaggaaaatatctctctccaaacaatttaaaatgattgagagaatgcaatggtgtaaagagaggggttttttaaatttttattttgtgaaaggagtttgttcattagtgtcattcaagaggatggagatgcatatatcactttccctcatgttacattgctggattgcagccctgtggccacatctgcctatctattggtcttgatgccatgcaatcaagcttcagagaccaaaagggggttgaagtggcagagatcaggtcatatgcccttgctttggttgccagcagatgcaatagtgaaaggtaagaatctgatttccactgagagttattcaacagggaattcacacaggttaggaaaactttttgatactgaggagctaaattaaaattctagtgcttattacgtaattaattcattaagaaaagctgtgtactcaagatgatcaacactgtaagaacttcagattattaatccaaacatttgttggtcattcacaggattagaaatagaaccttttgtggtagattgtattttgcagatggtcatgatatctcccatcccacatccttgtctaacaatgtgactttgatttcctctcctcaataggggagtttcttttcactccctttgaatctgaaaaatatagtcatttatagattttcttatttataatagtcttctatacagccatccaccaatttattcatgaatatatacatgtacacacacacagtgctcaatttgccttttgtttcttgggaaaaatggatactatcagcaaatgccaggctctttgctaaatatataagctcatttaaatcccacaacttctcatgtgataggtactattaccattttacatatgatctttttgaggcagatgtcttctagaacatgttaggttcttattagaatttgtatggtaaacttcaatttctaaatttttaaatactccacacatcttctatttctaccatagcatagctgtatagtggagcggtaagaacatgaactttggagctggtatgtctatttatttttttataatttttttatattttggagacagagtctcactctgtcacccaggctggagtgcagtggtgccgtctcggctcactgcatcctccgcatcctgggttcaagcgattctcctgcctcagcctccctaagtagctggggttacaggctcccaccaccacacctggctaatatttgtatttttagtagagattgtttttcaccatgttgcccagggtggtcttgaactcctgagctcaggcaatcctcccttcttggcctaccaaagtgctaggattataggcatgaaccaccgcgcctggcctggtatgtctaagttcaaatcctgattctaccccttaaaagtgtgtgaccatgtgcaaatcacttaatcttactgtggctcagttttctcatctaaaagttacagataatagctactgaagagttgttatgaaatttacaccccctactaaacagttgtcatgaaaattatacttacttaatatttataagatgatttggacagtgcctgtcaagtagttaagcactatatttatgattgctagataaaatgtttaaaataaaacataatttctcccttatatcatgtatttttcttcaattttgcctaaattttaattttgtgaattacctaatgaaaaattttgcagaagtaaagactttttttgtgctcccatgagagcactagatctgtagctatttatttaactggttcattctgggatggtaaaagtcttgacgcagcaaggggatgtgtaggtggatggaagggagctttatgagcactcgagcctgtctgaatgctcataactatacattcctgcccctcaaatatctcctttttttgcttgtcatattcactactgatagaattatattgtctttagcagaatgcttcaaaatgtggtgcaggtaaacagaatgacactaattcaccaaagtagttaaaggaaaactatttaaaggattatgtcatcacttgttttttatgattgagagcatcattactaagttaatgcaattatgaaggtggaggaggcaacattaatcagagtggctgactgttgtatctactgggtatctatttacttatgtaatttaacacttcatactaattcctcaccatgttagagttgtattagtcttggccacatattttgtgcagtgcaattggagatttcaatgcattcacacagctttaccctattaggaggtggctttgctctctcaaggcctcttctaaactgagggatctaagctatgagaatgcaaaggcataagaattatataatggactttgaaaactcaggagggaagcatgggaggggggtgaggtataaaaaactacactttgggtaccagtgtatgctgcttgggcgatgggtgcaccaaaatctcagaaatcaccactaaatgaccaggtgcagtggctcacgcctgtaattccagcactttgggagaccaaggcaggtggatcacttgaggtcgggagtttgagaccagcctggccaacatggtgaaaccctgtctctactaaaaatacaaaaattagctaggtgtggtggcgggtgcctgcaatcccagctacttgggaggctgagacaggagaatcacttgaacccaggaggcagaggttgcagtgagccaagatcacaccactgcattccagcctgggtgacagagtgagactccatctcaaaaataaaagcataaaaaataaaagaaaagaaaagaaaaagaaaaaagaaaagaaaactagaaatcaccattaaagaacttttccatgcaactaaacaccacctgtttccccaagactattgaaattaaaattaaaattaaataaagacccctatcaaactgacacagactaagagcagcaacaggctcagactctggggattccattcaggacaatggataaaagtcaagtagaggaaagcattaagctgctcatgcacatgcagtgccagatggacctaaacattgatacaatggggaattggaaagcagctaatgtggctgtagaaaacgcaggagtgtcttggtatgtttgggcagccattacaaaataccatacacggggtggcttctaagtgacagaaatttatttctcatatttctagaggctggaaagtccaagatctaggccctggcagatttgttatttggtgagggcctgcttcctggttcataaacagccatctttttcctgtaaacctccataatggaaggagtaagggaggtctctggggtctgttttataaggtcataatctcattcatcagggttccaccctcatgacctaatcatccccaaagactccacctccaaataccatcacattgggattttggtttcaacatatgaattttcagggttgggggaggacacaaacattcatggtagcaaggagaaaaaagactagaaacgaagatcagagcaaggaaataaagtaaaacagagagcatctttgtgaagagagtgaaaagaaaggcaaacaaaagggaggaaaatgcaaaatggacaaaaagttaccctctcctcaaagcttgttttatgcccctctattgtggcactttcccaatgtgttggaaatctctggttatatagccctccaaggaggtagcacaggcaaggcagagtagtggtcaacagataattatttataggatggctggatgaagcagaaggataaatagggatttagaataacgaaggaaaacttagaagcaagcagaggaaagtgaagttgacgagaaatcaacaaacacatcattactaactagaatattagagacaagatggctgtcaaattaggaaaacctctcttccctgatttgtcatatctcagtcagtttcaaatattttatattcaatgaaacccaaatactgagttcctgcttttaaaaaagtggagatagagaggatgaaatccatatgtttctgattcatttacagaaaactcattgaaattcagtttaacatagggcgattggatgtcatatatgccagtgcgcacatagtaattattttaagctgtttttgatgccccaggaagtctctaagaataaacaacatcaagtcctaaaggcctaacagtgcagtctgaaagaaaaaaacacaaatatctgaataagagtctacatttccaaatttaacagtctgctgtgaagaatccaaggatatcttatgatgcccaggatcccaggaaacagcagtcagggcatgacaattggagaataggtagagtcctcaccagcaatgtcgtgaggaaatggaaataaaatgaaatgaagcaaaatccaaatggaggagagaatgaggctctatctgaaaataactgaagatggattgaagcaagaaaaagaaaacccatggaaaaaacgggaacagaagaagatcaaggagttagagacaaattgaaccttcaaagaatacagttttacaactacagtgttaatttggtgcaattgttccttatttcagtgcctcattgtattctatacactggttcagttacagccagtgcagagacacactgatcataacgccaaaggagaagatgacagagaatgtctttgccacctagtagcttccatcttagttgggggagaaaggccatgaactcatagaaggggagttgggattctggtttcagcaagtgcaaacatgacaatgctgtttactgagatgagagaagagtggttatgttaagtttgagatggctgagctatatccaagtggaaatgttaatgaagcaattaaatatataaatttgggcatcatcaacatatctaatcagcaatattgaaaccatgagggtagttgaatgttctgaataataatagctaatacatattgaatgtttcactgttccgggaactattttaagcacttgatatggattatctcattaatgcttacagtgtcctgcgagctagaaacaattattatccagagtttacatatgagaaaacgggggattaaaggattcttctcagtaagactaaaccagcccagagaaaagaccattgacagtgacattaggggtccttgtaaacaatgaaagccctgcctcctatacttggagcttgaaaccagctctctagtgttcgagtcctaaaaattaacagctcaccaaggagcaccatacatttcagaaaatctttgaaatgatatacacagaccaagacaggcaaatggaaggttgggctgggagcaagcaccaaaaaaaaaaaaaaaaaaaaaagagaaagaaaaaacctcacagaaacacagtaacaaagatagagaatgcctttgtcttaatttatggctcactatgtggtaatttttagtaaatttcaatgtatgcttgactagaatatactcatattgcagttcttggcagtactgttctctgtatgtccatgatatgaagtttgctaatcatgttgttgacatcttatctatccatgctgatatttttgtctgttctatcaaatactgagatatataaaatgtcccagtttcatgattattatctgtttcttcttgtacttctgtcaattttcctttatatattctaaagattttatgttaggtctaccaaaagttagtctgaataaatatttaatatgatttaaagcattataattatgaagtgaccctctttgttttcagtaaacgttttgcttgatattaatattgttattattttgattagcgttagcatggtatatcttttcctactcttttatatttaaatgataccctgttttcattgtgttacttgttaacaaaatattgttgaatcttgtgtttttatctagtctgacaatctttgtcttttagctggtacgtttagttcacttaatataattagtgatatatttgggcttagatctaccatctcactatgtaccttctaatgtttcctcttttacgtattttttcttttattcccttattttgattatttaactttttttctagttttcttctgttaatttggaagtcatacaccctttaattattttttagttcaggttgttctctgcctttttccaatcgtgacatcattacaacaggcagtaaaacacaaaccaattgattaggctacagctttatattagttgcatcactgattgtgtgttgttagtgaaaattttaagtcaggcccaacattatgtaaaaccagactccaatatttgcttattgtactatgctgggtaatgtattcacgtcattgagtttcttcacctatcaaatagagttgatacatctttataaccttgaaccctgtaataaacttatggagttgatgtgaggataaagtcatatgatgttcaaaaagcattaaacactgattctcacatataataagcatgaggtctctattcctctgtcttttctaacctccaccatattgaaagacatcatagattcttagagtcaagtagacttggaaagttaaattgtcttgctaatggatggctttatttatttatttgaggcacagtcttcctctgtcatccaggctagagtgcagtggtgcgatctaggctcactgcaacctccacctcccaggttcaagcgattctcatgcttcagcctcccaggtagctaggattacaagcatgcaccaccatgaccggctaaatttttttttttttttttttttttttgtagagacggggtttcaccatgttggccaggctggttggtttcatttattttacactgattcaattagcttcaaattcagagagtgacaattctgatgttgaaaccaagttatctctgtgtgtgtatgtttggtggggcggtggggagcagttcttggcttgttgataacagatatatttcataccattttcctgctctgctccagtccatagggtgactaacacctgaaagctgtatttccctgtgtcctagtatcttgctaggtttaaccaatgtggcacaccagcaagattatgggcagaggggaggaagaagtgggttgttttccccttttttcttcgtatctgggcccatcttcctgagtggccatgtctgttccattgtgctaacttcctctgtaacagatgcagtgcgtttctagcttctacccagtgattgctgccaaaactaccttaatccctgtagtttatgggtgacaacagcttcctgatgttgctaaaccttttggtttcctctatgtcccctctatgtgatttcttaaatattttatcatacttaagataaaatttttattttatcttaatacttaacatatttgtcatctttgttaccagtcacctggattaaatgttttcttttgtaaatacttagtgtagctttttctagtttgaccatgactgaaacaatgtgagtgattagttgtgtgtgagtgtgtcagtgttcgtatttagaggtgaattaaagtagggtgtcacctactatagtgactgtggcttcctatccacatccaaaaatggtaactaaactatttagtttagtatactatttagtaaactatttagtttagctagctagatactccaagaaaaaaaaagttcattggagtcacgcaataacttaatgcgctcactcagtggagtgttacactatgaattatatggacattttcataggtgttcaaacatagagtcattgatggatcgatgtgatggttctggtacaataaccattacaaaatagaaaagaatccccttcctgtttgggctacttcctcattctctgagagaaaatagagtttgctgcccatcttaatatcttgtctgttgctagataagccaaggcaagccctttccatatatagttgctctttaatgatacttgtcctctaaagtcacccaacactttggattgctgataaaacgagttgatgggtgcagcacaccaacatggcacatgtatacatatgtaacaaacctgcacgttgtgcacatgtatcctaaaacttaataataataaaaaataaaaataaataaaaaatacataaataaataaaaaggaaaaaaagcggaaagaagaaaaaaaatactaatagttaaaaataggatgggggtggggaaaggcctggatctaaatttttctgggaagatttttaaactttggttttgctacttataaaatcttttcacactggaaatattgagatttttttttttaatgtactaaaaggaattacttgatggaattccatttttccctcttaggactgctgaatgaatcggtatttccccacccagctgaaggtatacttttattttatttgtctcagtgccggtttcagattttcacttccctgttttgaatgttgactcctttaattactttgttatacatttgccaagaagaatatttttcagactagctttgtgagcctgtaaaacatgaagcagtttttctaaataatatcccatttgacacatcattggcttgggctgatttctttcagtctagaccaatgtagaaaagtgttttcgccaatgtagaaatatcctagtaatagatttgatcacatacatatgttctactgtgcttcaggtggctaaaggtcaaatgccaataatattgccttctcatttgacttatcaagcaaattatgtatattgaaaagagataaactaggagtgctacaaaatgttttaatgtcaacaactatttactaaatacctactatgtgctaggcagtgtgctaagcattacagagatgtaacagtgacactcatagtactaaggggactgtatttaaacaagttgtttaaaacacttagcattgttcctggcatgtagtaatgctcaataagtggtagctgttattaacaatctggtgtcttgcatcccaatcctgggttttccctgctgtaaagaatcaagataggataggatatgtgtatatgccatgtgatcctgaccatgcttctattggcttcccatattaacttcaacctaactactaacctatctactttatctgcctacgactactattatctatctactactaactgttatttatctattacaaacaaacctacctgctttaaccttcatcctgctatggtctgaatgtttgtgtctccccaaaactcatgttaaaatcctaacccccaaggtgatggtattaggaggtggggctttggagaagtgatcaggtcatgagggaagggccctcgtggttgggattagtttctttattgaagagaccccagagggctagctccccatttcctctatgtacatttacaatgagaaggcggccctccatgaggtagtgggctgtcaccagacacagtgaagattcagtgtctggtgagggcccacttcctcatggagggccatcttccattgcagatcttggactttccagccttcagaaacataagaaataaatttcttttgtacagaagccacccagtctttggtattttgttatagcaccccaaactgactaagatactgcttttcatccccttatcttaataatgaaaatagctgacatttaacctgactctgacctttgtcaggtatggtgttaaatggtttataagtattatcttattgaatgttatgcagtagaccctataaccctcccttttttattattagtaactgaagtttagaaagattgagcaaacagtctgcatagctagaaagtggcagaactagaatttaggtccaggcaacttgactccaaagctggtgttctcaaatgctaggtcctgttgcccgttcccttgggccttcatgtcaacatcacctgttgtaactaacctgttgtaacctcaggctggacagatgctgttctgagtctctggtgctgataggctattgctgaacccggctccttcccaaactctagtgcaaagagctagatagttatataattagggaaaggaatagtagtcccgtaaaaataagggatccctaagtggtcttcctggttgttccatctggacactagaaagaagaatttagaaaagggaaaaaaaagaatcctgggtcttattagtaagtagatagaaagaagcagtacctggaggatcactaggaagaaaactgttttaagaggagagaaaaactttgcttaaaaaattgaaaggcaataagtaatatcaaatagctaatgagattctctggggataaaggaagatgagtaagggccactgtgaaaaagtgggcagtgtcccaccacagagtaggtttcctttccatctctgcttcttaggttgcaaactgtttttctctcattctgaagactatagaggttcacttgtaactctgagtgttcactttctccttttactgccccccgaacacattgtgcacactcaagctgtagtaaccaagtaaatcctggatagcattcttaacagaaaaaaatgttgtttttatcccagaggacatatggcttcaagacaaagatgaactcaatttgcatttcctttgataaccaattttaagggcccataaaaaagcccttggcattgccaatctggaggaaggttgggcattgtctgcctaagtgcttccttactctgtgagttacagtcaccagatgcaacagagaaaccttctgggtctgcctgtctgcctgtccctttctttttctttccttacttacttcagaagcaattagacagtatgaagatggatgctgacaagcctctgtgttgagatatttgctggccaccccacacagtgggcacttgtctttattttgggccattcagcctcagtgccttggcttccacaagcatgtgtgtgttagcaccatgaaagataacttacagatgaaacaagatgaggacaccacactcaccagaattcttcttctgaaaggagagctgtcagtgttgggacttttgatatgagagcagctaggagcctggccagcctgggggtgagtagacctgttctttgttgcctgctaaggcacaggtcctttgcactagttgttctctccatatgtggggagtgtggctctagaaccagcctaccaggttcaaacccatcactcactggctcttgggcaagacacttgaccgctcacaccttgattttctcaccgtatgattaggcacactcatagtagttccaaacaggatcattgtgagaatgatataagcatgcatggacggccagcagaacagtgtgtggcacatagtattaataacatgtggcccagtgcagtggctcacccctgtaattccagctctttgggaggccgaggcaggcagatcacgaggtcaggaattcaagagcagcctggccaacatagtgaaaccccgcctctactaaaaacacaaaaaattagcctggcgtggtagcgggcgcctgtaatcctagctactcaggaggctgaggcaggagagtcgcttgaacctgggaggcagagattgcagtaagccaagattgtgccaccgcactccagcccgggcgacagtgcgagactctgtcttgaaaaataatgataataataataataataaggtgttccttttttgtgttctacttaaccatattaattctcactcttctttcaagtcttagctgaagtatcatttccttagggagactccccacctagtagatcagctgctttgtacacgctctctgagaaatctgtgcttcttttgcaattctgtgtttattaatgcgatcatttggtgaggtctgtcttccccactaggctgcaagcatcctttttacatcgtatacacagtgcctggcacagggtctagcatatagtaagttctcaataaatttttgccaaatgcatagtatatctatacgatccatgtatagaaatgtttaaagcacctaaattgatacattttatttaatacaacaaaaatatactgagcactaactttataccagacactgtgctagaagctagtcaggcagcaagagaaaagatggttcctgctctcaaatggtccccagtattgttgacagccacataccagataaatcttaacacttgaagatgtaacctgtgtaagtcatgtgctcaccctgtgctgagtcactctaaaaacaaccaagtatgagtggttgggggtaatttttgcttcactgagtattatggaagcttaatgacttagtgatactgtgtgcatggtagcattagggcctatatacaaagaaacaaacaaaaaaataggataatcagaattctaacactgtagcagaaaataacaatttgcatttctttggagctttatagctccacatcagttttcttttatgatctgggtcattgtataatttttatccccaattgattagatgagataaaatatgcgttgtcccaaggacccagtgaggacccaagcccagaatcttccacctagatatcctggtttccttgacccagcaaaaggaatggaatgagcggtaactccacagccatgagcacaaccctgcctcccaatgttaagtgaaactaaacatcctccctgccctccccatgcgttcatggtggttcggggatcctgtgctcacaaatactgctcttttcagagcagaaatggtaggttctgtcttttgtgattgcagacctttaggctttaaggcttagcatatacaggaatacctcagagatatttcaggttcaggttccagaccatcacaataaagcaagtcaccaacattttttggtttcgtcgtgcatgtaaaagttacgtttacactatagtctattaagtgtggaataccattatgtataaaaagtttgcattgtgtttcaaaatatacacaataaaaaatactttactgctaaaaaaaaaagtgctagtgatcatctaagccttcagtgagttataatcttttgctggtagagggtcttgtcttgacgttgatggctgctgaccagggtagtggttgctgatggttgggatggctctggcaatttcttaaaatgagacaacaatgaaatttgctgcattgattgatttttccttttatgaaagatttttttctgtagcatgtgatactgtttgatagcattttacccacagtagaaattctttcaaaatcggtcagtcctctcaaaaccctgccactgctttatcaactaagtttattctaaatcctcttcatcatttcaacacagcaacttcatcagaagcatattgcatctcaataaactactttctttcctcctccataagaagcaattccttatctgttcaagttttgtcatgagattgtggccattcggtgccatcttcaggtttcacttctaattcaagttctcttactattcccaccacatctgcagtgactttctcactgaagtcttaaacctctcaaggtcatctatgagggctggaatcagcttcttccaaactcccattaatgttgatgttttgatctcctggtatgaatcacaaatgcccttaatggcatccagaatagtgaatcctttccagaagcttttcaatatactttgtccagatccatcagagagaatcactatctatggcagctatcaccttacaaaatgtactttctaaataatgagacttgaaagtcaaaattactgcttgacacatgggctgcagaatgggtgttgtgttagcaggcaagaaaacaacattcatcactctgtatatctccatataggtaataagtttgtttcactttcttttcgttcttttgctcactggagtagcacttttaatttccttcaagaacatttcctttacatttatacctttgctaactggtgcaagagccctagcttttggcgtgtctcagctttcgacatgccttcctcactaagcttaatcatttgtggcttttgaattaaagtgaaaggtgtgtgactctttctttcacctgaacacctacaggccattgtagggttattaattggtccaatttccatatcgtgtctaggaaatagggagacccaaggagaaggagagaaatggggaaaagccagtcattggagccattaaaatacacataacatttatcaattaagttttccatcttacatgggcatggcttgtggtgcctcaaagcaattaaaatagtgacatcaaagattactggtcacagaccaccacaacagataaaataataatgaaaaagtttgaaatattgcaagcattatcaaaacatgacacagagacatgaagtgagcacatgctgttggaaaaatggcacatagatattgttgccacaaaccttcaatttgtaaaaaacacactacctgcaaagtgcaataaagcaaagcacaataaaaggaggtatgcctgcattctctgctactgaaaaggagaatattggaaggataaatgaacatgtcccttagcaataaggcctaggacccagaaggaaggccatgtcctctcacccctaccttggtgggtgctttctcccatgactcagtcccctagggttagataactttggttttcattcttacttcagaaatcttagatctaggattgcagaatcaagctgtcagctctaaaagtcctctataacatttcttccagaaggctcagatgtccttatgcaaatgaaatccttgatgctttctcagatattccagagttcctcaggggtgtacactcagttcagatttctctcttgtgactgtatctttaagtgaagttgttcttttcctttccctagacaccacaaatgtccaccatttcttcctgcttattatttaaatatacttagaggctgccttctggaaagtgctggactcatggcaggttggagatctccagagctgtgccctcttgaccccagccaattcctgccacagtctgcccaccagggacagtgctcccctcagtggcacatttgccaggccaggaagtaccaggcaaatgtcccaccacaagatgacaggctccccaccacaggtgccagactcttctcctttgtctcatggtagcgcttgtagctgctgcggccacagtgcagagtctggcacctgaggggacagaaaggggggctctcggcagcaagcctacctgtcaagtgcttctgggattaggagtgcgcattgccaactccccactctggaagaacttgatgggtgggcatcctgccaagaggcagagctcaaagcccttctgtgcatgtgcttcttagacccccgactggctacttagccatttggccagataccaacttctccagcagtgtttttgagccctgcccatctttcctttggctgaattgagcagacctcctatcaaatactatcaattttccttcatatgtatgaggcagaccctgaagcagtttgttgggttgggtccatgtctttcctctatcgtaactgccctctctccctccccaccactgattttgatgatacaaggctggttttgttctttggaaacaaaacccctgtcctgggtggatgttccaagtcagaaagcctggctgtgtttatcccaggccattggctgggcatgcacatgctttttgtatttggtaagtgacagtatttgcaaaagctgattgccacagcaggcggaacagagacaagactagcaaaaacatgtgtcggtaacatatgctgtagccttttcttctttgcttggaggactgacacttcctacaggaagaagtaattattttgcatgtgcatagattacactggaatgaaaaagacagaggaggggctgctgctttgtatatgaaagaagaaatacctccctatctctctttctttttctcatgcatgcttctgcgcgcacacgtgcgcacgcgcgcacgcgtacacacacgcactctctctctttctctctcctcattctcatatgcaagcacacaggttaacctgctttatttttagacattgcttctttaaaagaaagtcgatgtcctaaaaaaaattcagagcctgtaattagcagagctgccctttttaggagagaataaaagcattacgttaggaattaaacagatctgtgcacaggtcctgtctccccttcatataggttgtgtgacccatagaaaattattaagcttctaacccttgtctgccacaggtagacaaacggctcaactcttaggcttgttgtgaggattaaaactacaaaatacatgtggaaagcagcttgtgtaggctctggggctgtgctgtcctttcccttccctgggttagctttccagaaggaaaaataattgtaaatagccatgatgcatcttcactgatgaatgactgtgggcaatcccagctagttctgcaaccacttagaacctcagaacttaattcatgtatttctatgtagccacaaagaataagtctagaagtggatcttggaaaagtagagccaatgggaactcagattcctgcccttgaaggcatttttgcctcggtcatttggtgggggttgaaaagaaatgggtgacgcacattgggatagagccagcaagaccctctggtatcttgctgtaagctcagaagtcctagcaacagcataaccaccatttgattcattattccatcttaaccagccctccttcccaccctaaagctggaatcattctgaaccatattagcattagcatgagtttctctggctgcttttcacattccttagagcaaaatgtctctcaaacttctcccatatacctatttttgttctatttattacaacaaaacatagcaccaagatttttaatagcaccaaaatctttaaacactaacaacaacaaaaaatcgttccatcgctcttgacttagattcaagatggtaagtgttggttacatgttgaatgaatgaatgatgatagcttccatttgttgagcacataccttgttcttggaactgtgccatgtacatgtttacatacttcacaacaatcaatttatgaaataatttcaaccttattttataatcaaaagttagtgtttagttactcacccaatgacacagagctgggaaacggaaaagatgagacttgaccatacaacttagcacatatttagaacccatcatttgacctctgcctaagctgagtgaatggatgaataaatgaaggaatattaaagctacagagaactttctcagcatcctcatatctggtatccttggtccttgctatctcttccctacagttccagctctgcctctttcctgatatgggagagactttttatccttgtttctgtgacttggttcctacctcattctccaattcttacaactgaatccccattttcttcccctgtgcccagtacctccaagtttccagcagtgggctccaagttgccctgacagtgagccacccctggggagtggaaacatgtcccgaaacctaagcccaggaactggggacttgctgcctatttccacaatgccaacctcctgccctcctgcttgtctcacctgctcctaaattcttcccaatatagttgggtcacccatgggaataacattgttatcacagcttctgctccctaatgtccaccattgttcttgcaccttccagaaatttcctcctgccctggactgggtttccctcccaacctttccctcagccttgctgccagctgccgcatcccagttggcatccccaattccagcttccaggtcgtcttcatctgccccactcccctgcagtacaccaggacaggcccagggtggctctagacatagcagaacacaggtagtccctttgggtcatttgaggcacaaagaagtttgagattttgtcaaggtcacagaagagacacaccagggctaaaactcagggccagcccgtctggctcagcgtctttccaccacaccatgccgcctcctttcccccttctgtctatattttcctcttgctttctttttctccttcacccacacctttttaatttaagttttaacatctgttctctcttagtccattacttctgtgacattttatattatgttgaatttccatttctatttaagacgcatccattttcttacttaaaaaacacattttaagcctgcttttaaaaaaattttacgaaacttaaaaaataaattcagtttgattttctctttctaagacttttctcgacttatctttcctgcctccttagcagcagaaattattctgtgcctccatgtggttttactccttctattatctgtgccactgtaatatcaggcctgtaatctaacaatctgtaacaatctgtttttgcttattatttgtgaaactagtacttttaaaatgcaaatgaggagactgtgacttttagtttaattcctgattttatcttgcaagaaaagcctttttttttttttttgtttgtttcttttactgactctgctgaaaaaaaatatcgtagaaagggagaggatgggagaagagaaagcactgcaaataaaagtgcctcacactcagcatttctgcagtgtgttgagtttttattcgtagggtcacctgcagagagcactgcgttgagtcaggcttccaggcttaggccttccacctctgacactggatatataattccagcctaggaggtaatcaaggtccttactggggtattgggccaaagaccccagtcacctgagaggaaacagttgaaacaatgacaagggcaatagctattattattagttagctcattcatctctcatctcttgtgagggctgtcttattatcttcacttaacagacaaagaaattgaagcttagaggttaacttgttcaagcttacacagctgggaaatggcagaggtggaattcaagtgcaagaaacttaactctggagtcaatgcctctaattatatgggaatatttttgggagattcaattttaaaacagtctgccatactttggaattaagatgaccccaaagagctgaaaacctgaaacatccaacatttatactctcagataatggagaataagctcattttctccaaaccctcccaattctgatgttttttgatcaaaacttttgaagtgataatattgtaatcatcctaaaataattttttgatattgcttttggtcaggattttcaaacctcagcatttttgacatttggggctggcccttagttgaagagctgggctcttccttgtggaatgttttgcagcatccctggcccccacctactagaggccatttacacaacccatcccttgtcttgtccttcttccgagtcataaactcaagacaatccaaagtgtctccagacattaccaaatatttcttgggaggcaaaaatgccccatagttgagaaccactgtgttagacattgcccaaatcataagcgcctgacttgtaaatagtctatttgggaccatgttttacatttgactcacttacccttgccctaggaccccaccagaatgttactgtcaattcagtaatctcacttctgagtatttaccctatggattaatgtgaaggagatatctgtacacccatatatattgcagcactattcacaatagctgagttatagaatcaacctaattgtgcatcaacagataaatagagcaaatgtcatatacagtcagccctcagtatctgtgagttctgcatctgtggaatcaaccaacttcaaatcgaaaacattcaggcaaaaaaagtggatggttgagtctgtacatgtacagacttttctctcctgtcattattccctaaaccataaagtgcaaacaatatttacatagtctttacattgtgttgggcgtgtaagtaatctatagatgatttaaaatataggccaggtgcagcggctcacgcctgtaatcccagcactttgggaggccgaggtgggtgggtaacctggggtcaggagttcaagaccagcctggccaacatggggaaactccatttctactaaaagtacaaaaaaattagctggatgtggtgatggtcacctgtaatcccagctacttgggaggctgaggcaggagaatctcttgaacctgggtggcagaggttgcagtgagctgagatcacgccattgcactccagcctgggtaacgagcaaaactccatgtatatacatacatacatatatatacgcacacacacacacacatatatacatatgtatatacacacacacatatatatacacatatatatgtgtgtgcataggttatatgcaaatactacaccatttgatataagggaatcaagcatcctgcattgtggtatcctccggcatcctataactgatcccccagggataccgaaagatgactgtatatacacaatggaattctattcagcctttaaaaaggaagaaattttgtcatttgtgacaacatgcatgaaactggaggatgttttgctaagtgaaataagacagacgcagaaaatcagatactgcatgttctcacttacatgtggaatctaaaacaattgaactcatagaagcagagaacagaatggtagttaccgaagactgggtagtgggggggaatgggaagataataatcagagggtacagagcttcaattagacgggaggaataagtttgattttttttctaagttctattgcacaatgtggtaattatagctaataattgagtactgtacatttcaatattgctaagagaataaatctcaaatgttcccattacaacaagtgtcaaatatttgaggtaacggataggttaattaggttgatttaattattctacattatattaaaaaatcatagcatcactttgtgcctcataaatatatacaactaaaatttgtcaatatataatgaaaatacaatctgaattaacaaataaaactaaaatgttattgccgcttgggaggtagtatggagagctctttgaatctacttcggtttcttttcaaaacttctgctcagagagaatcactcaattcttagacatttcattctctccccatatcctttctctttttctctctcctttccaattatcttataaatcacattcattctctctttctcttgccttttattcttccttaggactcctatccgagccaaattatacccctagccatttcaggcaaagaataactgttctgctattgataactttctttctagggaacagcaaggcagtggttttgacatgaaattggatgagaagaaaacctagcaccatcaacttttaaacctttcaaaggttcagagagatgtccatttcaatttatttatttatttattgagacaggttctcactctgtcacccaggttggagtgcagcgctatcctggctcactgcagcctggacgtcctgagctcaagtgatcctcccacttcagcctcagcctcccgaatagctgggactacacatgtgcaccaccacacccagctaacttttttattttttgtagagatgaggtctcactatgttgcccagattggtgttgaactcctgggctcaagcaatcctcctttcttggcctcccaaaatgctgggattataggtgtgagccaccatgcacagcctgtttcaaaatcttctgcagcttcatttttcattggaagtctccacttttttcaggaactggcatattcttggcaaacttatacatcttaattaagtttccaacagttcaaaatgattaatcctggtaatgatagctaatatttattgagcatttcctatataatggacactatagtgctttacaagtattgtcttatttaatcaccccacttaacttaccaaacttatttagaacttacttcattccgggtgtaaaatcaagagttttcatacctaactgttgtggatgttcagagaccttaaatggttttcctaatgtcagtaaaaattagaactaggactcagccctagtcttcaaaattctaccacattcattgctcttatttttttctcaatttctgtaagtataataatatggtacttttttctagtatatatatatttttcatttaattatacagcacattttaactatattttttcttgggaaaacctgggaagtgtcacaatttaccatttgtgacattcctatagaggaaatggagtatgaatttcaaacatgcacgttcaccaatgtaattttgtaatataagctcccttaaaatggaatctttttttcctattgaacattcaccaacaattgtggaatcagtgctagttccattttaaacagtatctactggttcttaaatcttaaaaggcaggccgggcgcggtggctcacgcctgtaatcccagcactttgggaggtcaaggcgggcggatcacgagttcaggagatcgagaccatcctggctaacacggtgaaaccccgtctctactaaaaatacaaaaaaaattagccgggcatagtggcgggccactgtaatcccagctcctcgggaagctgaggcagcagaatggagtgaacccggggtggggggtgcagagcttgcagtgagcagagatcgcgccactgcattccagcctgggcgacagagagagactccgtctcaaaaaaaaaaaaaaaaaaaaaaaaaacttaaaaggccagagtgtttaaaataagtacattttccccagcagctgaatccatttgtaaaacatctgaaagaaggaaatgaaggcaaaagtaatgcagtaccacagagaggtgtttcaaatcagtttaggcatcttttatttctacaaagacaatttgcatagagcaaatcttatgcttttacatcaacttctgctataaaacctgaagaatatttctataataaaaagaatattttatccaggttgaaactattttgtaaggaaggggtcgtgtagataatcaagcaggaaggatagccagtgagagctgacagtgcttttgaggcattttcaatcctttttagatctttggcaaaatttcctccatatctttaactttctctctttggtcaactttgtcctcactgttacagtccagtttggaaaaatatctacagtgctaatgtggtaattttgaggttcagcctagaaggccacatgagttcttggcttcttgcaggaaagaattcaagagtgagccaacagagtaaagtgaaaacaagtttattaaaggagtaaaagggtggctattccctaggcagagcagccctaagggctgctggtaggctatttttaaaggttatttcctgatcatatgctaaaaaaggggtggattattcatgagttttctaggaaaggggcagggaattctcacaagtaagggttcctcccctttttagaccacatagggtaacttctgtgagttgctgtggaatcttaaaccgtcagggcactggtgggagtgtcttttaccatgctaatgtattatcagatactgctgtctgggcatatcatcgtaaccttgatttagtaaattataatgcatttctttagcaattattcagttctccacactctgtaataagaatcctgtccattgtcacaaattatttctatcaactctctaccctccacctgtctactaaaaagtaaaagggagtcacaaacatttcttaagaccagtattttccaattcattttttcatttatttctcctagcagtcctgcatattaggtattacatccctattaggtaccatatcaagtatttcattgcaagtctccacttatctgtggtggaggaattgaggcttagaacaattaaatgacgtgctcagcaattaagtggagaagcttgaatttggacccaggtctgtctgaatctaatgctgttattctttcactattactacactgctcaaggtctttttgaaaacaccaggtatgagggatttttaacctagaaagccacacagtcatgtttctcagacacataaaacctcctttaactgcttatttaagatgcagatttctaaaccctgaaaatctaaatctgtgagttcgtgaatgaacttcaggggacgcatgaactctaaaattatattcaaccttttgtgcagtgttgaatatctgattcaccaaggtatttttgaccccaaaaggcaaagcataccagctgtaaaaagggaaatcggagttacgtcttgccattttctagttttcggtcagccgctgggaatgaggaatagttaagtcagcttgcaatacactgtgtttttccatccctgctcctgtccctaccctgcttcacctttaccccactcctccctgggttgggtccttcctgttccttactagaaccagctcccgccaccacctcattcatggcaagaaactctaagggcaaaatgctttctacgataaataatgcagaattgttcatctccttgtccacattaactgaaaaactgagcactcaatgacctaagttgtctaacattttactgtaaacaggatacaatttatgtgaaggaacatagttaccgtacttctctgtcatctacagtctgcagagaacaaaaaacaatggtaacccgacccttgggcaaaatgctaatggctacataattgatttagcagataattataaaacacagtcccatactaaaacacaaaagatgtaattattgcactttacaaactaattaatactaattcaattcaataattaataattcattatttaacctctaattaaatcatcatccttcttttccctgcaaactttgctggtggcttaattgctgtgggtcaaatatacaagagagctctcctctgttaattaaacagtgaaaagacgtgcaatcattgtaacagagagaattaaggaatttagattgaagtatctcccatttgaaagagacaagagcatttcctggcctcaattcccacccaaagctttaatcggttaaaaaggtccagggtaacaaaaactgaagaacctgataagatagaaggctgttcaaggtatagatcaggccttaggaaatacataggagcccatcagactagacgcatagtcagagtcccttggggcagtcacgagcttgaaacgcagacactgactcataagatctgaattgtgtccctctcaactctaggttctctgatatcatattgatattttgatatcggtgattatgggagtatttacacaattagaattggtgcacactacaaatctgggctttttctttctttctctcgtgctgttgttaaacatttaccagcccaccaacgcccctacagcaacagaggtgacttgtagctgagtcctaggttgtctggatacaagtgccaaaatcctagagtcaggattggggctgaccagcagcctggagttctatccctggggacctgggaatggaatgatgtatatggaggctgtgttctataacaagttttgtagtgacaccttttacagctcatctcagtgaaccctcacataactctgtgatagacattggtgttattcctagtgatcttttgatttttttaaaaaagtacatccttctctcacaattatggtccactaaatttaaacttatttataatccattcattggtggcttactctttaatttataaaaatttaattcttagcatttcaatgcaccatgagatttttctctacttttaaagtgtgtgtgtgcacatatgcgcacacacacactttataagtacagaaaaaaattatatatatatatatatatatataaagtgtgtgtacatatatatgggcacacacacactttaaaagagaaatatattttatatatgtgtatatatatatatgcgcacacacacattttataagtagagaaataacacacacacacagggtgtgtgtgtatgtgcaaagtaaagcaattctcttcacctacacatatatgtatgtgtatgtgaatatatatgtgtgtgtatacatatatatgtgtgtatgtgaatatatatgtgtgtgtatacatatatatctatatccatatctctctctatattctaaatattgaaagcagagtggcattatcacagcatacatgatgtctttggacgggccaaggaataaagaagcagtctagcaaatcttttcctcaccaaaagggtttctttcctccaataggaagtgccagtgaccatgtgaggtgagagtagggtgggggtgagcagcgggtggagtcatcacttagctacatagaatgacatattaagggatactacatttgcaacttcctcatctctctccactctcctggtagtttcctaagaggactcatttcactaaatagttactaatagttttcttatctgtaaaactgtgattatggttatacccacttcataactgccttatataagcaaattaaatgaggtagtatttacagaactcttacaacagcacctggcacatactgaaaagtctgtaagtgatgctgcagtagtggagaaagacatggagccagaaagggtggggtttgtccagaaagttgtgagtatagtcccagaagatcataggcatacaggaaatgtgatgagtgaccagatgactggctcaccgtattggtgcagccagtcagtccccttcctcctcatagtatggcacttggagcctttctgtgtggtgcaattgcactttcacactgcctttctgcatggttgtacaggaggagctcggttaccgtagcagctctctccagacctcagatatgacttccccttcagtataccctttaggtagcgatttatctaaaacacccaggtgatcacagaactgctctcctgaaacccttcaaggttccccataactttcagaaataatttcaaatgtgatagaacaatttaaaagtatcttcacatctggcctctgctccattgccaagtcactcaatgtcctgcctcctccctccagtcctggggaaccagtgcaggggctcagtcctgcctgtggtgctgtatgcctttgcatatgctgctctctaggtctaaaatgtgctctccagagagctcctattaaactttctaatgcggtaaacttttctactccatcaaagttcacctccaatgtcacctattttgtgatgccatttcaaaaaaccctcaagtttagtacaggcccattttctatgctgccacagcaccctttgtgcaacactaacatggggcttgtcacaccataatataactgcttgtttcacctggttcctccaccacacacacatacatgcatacacacacatacacacacacagacacacacacacttacccatatcccaggaactctagctagtatcagggttaaagctcatattgcctgagttcaaatgctgcttctaacatggaatcccatttccacctttgtaaaatggaactcataaacataaccatttcttgggttgttgtgagggttaaatgcaataatctatgtagtatctcaaaaactgcctgacatttcacaagtataggtgtgtttgactatggttgttttccattgagatcaggcagtatccaacctttggatcagtactgtggggtgagaatatcacagcccaacagagacccataagagcatggatgctgcagtcagatggactgaggttggaactgtggtgtttctaaaaattctttatgaagagttcttacctcacatggttgttgtgatagtaaatgaagtaaagcaattcaccttgcccatgaaaatccttttaaaacattaggtgtcattattagagagcacctactgaaagttggaaattaatgatgagcatgccaagggtgacacacagctctcctgccacttactgcctgggacgtggaaggctgctgtcccccagccaggcatggactcacgggctgtatcataaccacagtgctcagctgtgtagaccatgctggtttggcccctttgccttccaaatagctttggtgacgaagatgtagctgtggtcacagttgcacctcaagcccctacactaaatcacagtgagtgagaaattgctgggaagtgggaggaagggtgatggagggtgtgtgtagtctggcttgagaggttcacccaaactttcaagtagcctccacaataaatccaggactgtcgcttggtgattagttagaggaaacagaaacggctggacaaagccaggaaatgaccttagagactaaacacggtgtattttattttagggctttttctcacttagaagtactgccaggttgtttaaagagaatgagtgttatcagggaaggatttgggggatctgccaggcttttgacaacatgtggtaaaagatttacaaagcccggaatcaaaggaggaggacagacagggggatgtgtactcaagagatgccgcaggtgggcctgagattgacaaaaatttttattgccctttggggagctttctagtaagcctgatgggctctgcaaggcgggggcagaagcccgagcagaatggcacgtttctatggaaggcggaagaagtgagggcagggtggggagccatttgggtcctttggaacccatggatgtcaattagggaagggagtggcagggtgagagcaggcaggactgatgagactttgggcactttcctgcccccatttttagacagatggaaatttaggaggtgtttgagcaaaaaataaatagcctgaacaatgtaaaactattcacaggaaatgaggaggaaggaaggttaaaagtattgaacccctcttatgcagcagagtgctggctgaaccatcagtgctaatgcattaccatccttaatgtaacagaggagacaagcaaagcttaggctggtaaaatccccttgtgtgttgcaggtgggggaaatgagggctgtaccccaaagtctatcaaaccccaaagccttctatgatgttaccttggaagggatgggcaggtagaattgaataccagctggcaggaatcccttcttttctgcttccttaagcaactgctttgctactcatcattacaatggtatcagagtccaaaatgtattccaggggtctcccctgcacagcttccctgcacaccatggatggttctggcttcctaaacatgagatcattcacattctcttatttaacgacaaccaactgcaggcttctttacttattgtatcactgaattggcctaaagcccatttaaaaaaaaattgacattgtatgtttttatcatgtaaagcattatgttttgaagtatatatacattgagtagtggttatatcaaaccaatcaacaaatatattacctcacatagttatcatttctgtggtgagagcatattttcaagaataccatatattgtcattatctgtagtcactttgctatgaaatagatcttaaaatttatccctcctgtctaattgaattcatatatcccttgacaaacacctccccatccctccttcccttcaaaaacctcagcctctaataaccaccattctgctctctacttctatgagatcaacatttttagatttcacatgaggaagatcatgcagtatttatctttctggatttggcttattttacttaacgtaatgtcctctacgttcatcaatattgtcacaaacagcaggatttcattcctttttgtggttaaatagtatttcattgtgtatataggccacattttctttatccactcatctgttgattgacactaagattgatttcatattttggctattgtgaataatgctgcagtaaacatgggaatgtagatatctttttgacgtagtgattgcatttcctttaaatgtatacatagtagtgggattgctggatcatatggtagttctatttttaatattggggaaacttccctactgttttccataatagctgtactaatttacattcccaccaagagtgtacaagggttctcttttctccatgctatctttgtccttttgataatagtcattgtaactgggatgagataatagctcattgcggttctgatttgcatttctctgatgattagtgatctttgagcacttttttaatatacatgttggccatatgtatgtcttcttttgagaaatttgtattcagatattttgcatgtttttaacttatttttttctactatatagttgtttgaattccttatatattttggacatcaacccttggtcagatggatagtttgcaaatattttctctcattctgcaaattgtgtcctctgttgattgtttgtttgctgtgcagaagctttttaggttgacataatcccatttgtctgttttttgcttttgttgcctgtgcttttaaggtcttatccaaaaagtcattgcccagaccaatgtcacggagcttttcccctatgttttcttctaatagtttcatagtttcagatcttacatttaagtctttcattcattttgagattttttttaatatgttaagaataagataagtctgatttcattattcggcatgtggacatccagttttaccaacatcatttattgaagaggctgtcctgtccctattgtgtgttcttcaaggcctgtttatttttaatgatgccattaactggggcacgcaatggagtaattctgaggccatttatttcctctcttaaagagaatctgcaaatggtcctagggattttttaaatgtgataaaataatagctaataatagctccaatttatagagtgcttactatgtgctaggcactgtgggaagcattttatgatcattgtcttatttaattgcagactgatggcatgcagacaaatctggcctgtaggctggaactgtgttttcaaaagataaatttgaatgactttaaatggggcctgtgctatccagttttctacaatcagcaccattccctattttttttaccaccttaattcatttaattataatcaggcccctgtagacagttgcatttttaacttctgtcttaaaacagcctgatagaatagatcttaaagaatccccatcctattgctgaggtaaagaaaaaatatgcaatttgaccaatgccacctagttaggaagtagcagattaggatttgaaacaagttcttctgactagagaacaagcttttaatcaatacataatattccttactatcatggtgatgtttccacaggatggcacagtgtcttttattaggggcaagagaaattgtcctgaataattctttaatagcagtgatgcatcttctacctctcttctctctccctactcctctgttcactgagcagatgtctataaaaactgttggcaagcagatgttgtcactctcatctccacctctcttatagatgtcatttccacttttccataccagccaaaggttatgatctcacctggaattcaaattccaggtcacttggtcgttccaggtcattgggagatgacttggaagagttctatagcagaacctttttaagaactggaattagtggcattcatcttcatagctcctctcctagcacagagatagctggtacgtggtaactgattaataagtgtgggcaatcatcattcttatggtcataactattattattattactaccagggagcaggtaataatgttcacccaaatacctaaaaccaccacctgaagggtgatatttaccttttattttatatttttcctgattaatttgtagcttaaatattacttctaggccagtcaatattcttgttttgtatactgaatatagaatattagcttcaacttattcatttattgatttaccactcatttattcagtaaatacttactgagtgaccaagtgttaggagctgagatacagagtgattagaatacttgtccctaaggttaatacattctagcgtagtgttttcaaacagcaggacacaattcattagtgagacataaaattaatttagtgagtcatgacaagcattaaagaaaatagaatagaatagactagaaaataccaaagtgaactttggttaagtattgttcgtgaacatttatttccataatatctatggaagtattgtgaatatcctgggttgcattgtaaaatatatttcttacaataggctgagatcaaaaagctttgaacaccactggcctggtggtctagggaagagggtacagaagacagatgcttgaacaagaagatgaccagatggctgaattacaatggttttctttgcccctcaggtgtttctcagtaagtcaacagatgtccacaaactgaaaaacacttgaaaatcctagtccaaaatctctttaggctcagatgcttcatgctttgggactagtcctcttctatggccttgaaaggttctccccaccccacctcaccccgactttgtagtaactaaaatcagtgacgtgtgacctgatcttctttaaagctggacacgcacacacaagtgaacacacacacacgtattttcatactctttctaaatttgtaaactttaagtctttcttatcagagaacctactaatcctaatcacataactaatcacataatcttatcacgttcccaatgccacaggtagcttaaatatttacagggctgagtgcgaaccaattaatgtagaaaggctgtcaagcttggaagccttgtcaaaaattcggtagtaacctacttgctgaaggccaaagccaggaaggccaattcctgtgccaaatgtggtttccaataaagttcacatttctattccagtcccactgcctatgtgtgtgtgtgtatgtttgtggatgtgagttcactgattgtttattttttctaagccctttgtgaggtctcttgcaaatcactttccaggtctgtgcttggaattttctgccgcacattcccaagattttcaaccaaatccagacggcacagttccgttttgtttagatttgttttcctttaagtagtcctccaactaggctttgaagcaagcaccccaggatgataaatgagaaaaactcacacctctttgaaggactgtgattccactctgtctgcctggagcctaagcaaagcagctctaaattgatttacagagacaactgggaaaatgggaaagcgtttccgtggaaatgcagctaattaaaggctagattaaccagctctatcttcttttcactctttcttatgcctgagcaccatgttcctttatagcacagagcttcctcactctaggatgtccacagggccttaattcttcggaaaacatattcctaagtagagtggtagacaatccttaaaaccatcagttttggaaccatttgccttcttctagtggggggcaggaggagtgattgttttcctttccagtttgttttagaggaacagctgcttctctgggcatttggctaactcttctctaattctgaacaaaatcactaggagccaagagctgggtaaatgaaaaagttggtaccttaaggctaaacagattgtgccttttctcccacatatgagtgctctttctaagcaagatctgagaaaaggtactttgacatatcttgggattggtggttataggtgggggggctttctgaatgcaaatgaaatgaactaaatcctttggcttccagactaagtgaaatctgaggtcaccaatgagtgacagctacaaagattgtgcactttccaaaagcaataattgctacccaggtaattattaacagtaaccaagcctgctaattctctctcttttctctattacctcctgctcactgcactatggagttccctttgtgtttccatggaaatacagagcagtttacatgaaatattctttaaaatcaagcatgggaagcccatcctctgtgtattgatcttattaactacattctgttgtaacactgtaacaccaggtcaaatgaataatttcaaaccttgggaccatacattttatttccatgtactcactcacatctattatgaaaatatatattggatatgatttcagagtcagtctgtcgtggctttttatgactgagtggaccaatttttcagattgctcagtgtctaaatggcaatagatgcacagtgtcattttctcttatgttagtaactgaagcatttattcccacttaaatttaattccttttccatattatgtctgctattggctccagatccccaccttcttcatgaccatacctctctctgctcatcttctttagtcaaatacattaatgtggtgaacatgcatagaataatgcctcccacatagcagatattccaatacatgcttttttatcagatctgtaatgcgatattttttattagcaaatagatggttgttccagggaacatatgccattcaaggcaggataatagcaaaggattcagtttgtttgtttgactgttcttctttttaataacagtcaaccaacattctttgccctcatgttcttgcactaaggacccagaatggaattggtgagagagaagcagcagagatcttttctttagtcatataacttagtcatcatgattccattgtgggtgagacagtaagcacgtggacgagggacaacactgcatggacttcagcaacaggaattgcaacagggagggggtacacttactgagcacatggcctgtgaccctcattgacttggcttaaatcctgcctctactacttgctggatgtaaaagcttgggcaagttgcataattgttctgtgccttagtcctttaatttatcaactttggttagtaatgtacttacccccaaggattgttatatggtttaaataaatatctatgaattggctttaaaacacctattatatgataaggattgaataagtttttggtatttttatcattcataaattacctgtttgtggtatatggtggaaacagatttcgtgggtggtatagagaagaaaatttaaaagatacaagatgcatttcattttagacccagagggagagagaagacatttcagaaagacataagcagtagttagagtgttggatggttttgataagaaaagataccttaaatgtagttaacattgaagaaggaaaaatgtatctggtttaggcagtagacatagagtaaattaaatcaggattttaggggaggcattggaagaaacaggtaaggcaagagtgtagactgttaacattcgggtattcactagaataaggtgattctggatcatggcaggagtttaaccaacagaggcagagtcagcagaaactgaagagctgggcatgggctgctctgtccagcacctcaaggtgtaggaggaggtgatgacggctgcttggggaccagtggcttctcctgctaataatatactgaaaatactagatgtaaaataagtaaatgattattaggtgtagcccaacacatagagagaaatctgagctgaagtttgggggccaggggggagttggaaagcagacaaaggaagacagcacaaggcaaatgggcagaattgtccatagaggagattatactgaacctgtgtgcttgaaaacgtctttggtactgccatgatgattctgcttgaacctacgttgcctcatctgtttgacctaatgggctttttcccatggaaagtattccagggcaagaaaatccagaactcgttctcctggtgctgtggcttttgtggatctatttggattattattaataatccaatattaatagcaattggaacagctgccttagattatatacatgtatgtatgattatatacatgtatgtgtgtatatataaatatatatatataaatctgtcccacaattcttcataaaaaccttaatatataaagaaggaaaaattagcacaactcactacttttaagaacaaatggattgtacacatactacacgctaacatgcatgtatccacactcaccttccagttttaccttccttgccttttgtaactttaaaaaataaaaattattctattatttgtacaaaaacagttacttaatgtgaagatgttaatttttcatttactaatctttatatttggatatgtgtgtacacatgtataatttatatgaatatacatgtgcatttatatattatgtctatgtatacagtatgtgatctcaaaagcatatgagtgtatatgatgggtaaacttctgattcgtaattctccaattggacaaatgaaacataaagaccagtagaaaagagccacatgggaactctttcatatatccttatttaaatgatgttgaatataatgaaacctttgatttccaagttttcctttgactttcctaaatttcaaggagtaaaggtaaaagtgttcgtggctctacttagtgatgtagaggaaaagagcctgagctttgaaagccaatagatttaaatttatctttcttttttatgtttatttatttattatattttaagttctgggatacgtgtgcagaacacgcaggtttgttacaaaggtatataattgccatggtggtttgctacacccatcaacccatcatctacaataggtatttctccaaatgctatccctcccctagccccccacctgctgacaggccccagtgtgtgatgttcccctccctgtgtccatgtgttctcattgttccactcccacttatgagtaagaacatgcagtgtttggttttctgttcttgtgtcagtttgctgagaatgatagtttccagcttcatccatgtccttgcaaaggacatgaactcatccttttttagggctgcataatattccatggtgtagatgtgccacattttctttatccagtctatcattgatggacatttgggttggttccaagtctttgctattgtgaacagtgctgcaataaacatatttgtgcatgtgtctttatagtagaatgatttataatcctttgggtatatacccagtaattggatggctgggtcaaatggtatttctggttctagatccttgaggaatagccacactgtcttccacaatggttgaactaatttacactgccaccaacagtgtaagagcgttcctatttgtccacatcctctccagtatctgttgtttcctgactttttaatgattgccattctaactggtgtgagatggtatctcattgtggttttgatttgcatttctctaatgaccagtgatgatgagcctctttccatatgtttgttggccgcataaatgtcttctctttagaagtgtctgttcttatcctttacccactttttggtggtttttttttttttttctggtaaatttgtttgagttcattgtagattctggatattagtcctctgtcagatggatagattgcaacaattttctcccattctgtaggttgcctgttcactctgatgatagtttcttttgctgtgcagaagctctttagtttaattagatcccatttgtcaattttggcttttgttgccatttctttcggtgttttagtcgggaagtctttgcccatgcctatgtcctgaatagtattgcctaggttttcttctagagtttttatggttttaggccttacatttaaatcttttatccaccttgagttagtttttgtatggtaccaaaacagatatatagtccaatgggacagaacagaggcctcagaaataacgccacacatctacaaccatctaatctttgacaaacctgacaaaaacaagcaatggggaaaggattccctatttaataaatggggctgggaaaactggcaaaccatatgcagaaaactgaaactggaccccttccttatatctaaaatttatctttctagctgtatgaacttgaacaagtcactcactttctttctttctttctttctttctttctttctttctttctttctttctttctttctttctctttccttctttctttttctttctttctttctgtctttctttctttcttttccttctttctttcttttccttctttctttctttctgtctctctctctttctttctttctttctttctttctttctttctttctttctttctttctttctatctttctttctttctttctctctttctctgtttctttctttgacagagtctccctctgtgttccaggctaggagtgttgtggcataatctcagctcactcaacctctgtctctggggctcaaatgctcctcctacctcagcctcctgaggagctgagatgacaggtgcacaccaccatgcctggctaatttttgcatgttttgtagacacagggtttcgccatgttgcccaggcttgtctttaactcctcacctcaagcaatcctccagtcttggccttccaaagtgttgggattataggtataccaccctactttttaagatatgggttttttttcatgtataaaatagtaataataataatacctacctcaatcaggggatggtaagaactgactgaatttacatagtgcctggtgtgtagtgggttctcaaaaccctattatgattatggttactgttatctgaaatttactttttatgtttataatttttaagctataaaagtaacacatatttaaggtaggaaaatatagacaagtgagcatgaagaagaaggagaaaatggaggaaaaggaaaatgaagaggtggaggaggagaaggagaagaagcaacagcatgggaggtggagaaagatcacctgtaatctccacctagagatgatcactctaatgttttagtgtatagattatcctcgtggcaattcctctacacacatgcaaaaacagacacatacactcttgatagacagatagaggaagaaagattgagatagataacatttttataaaattgcaatcactctgtgatggttaatattgagtgtcaacttgattgaatttaaggatgcaaagtaggccgggcgcagtggctcatgcctgtaatcccagcactttaggaggccgagaccggcagatcacaaggtcaggagatcaaaatcatcctggctaacatggtgaaaccccatctctactaaaaatacaaaaaaattagccgggcctggtggcgggtgcctgtagtcccagctacttgggaggctgaggcaggagaatggcatgaacccgggaggtggagtttgcagtgagccgagatcgtgccactgcactccagcctgggtgacacagcgagactccgtgtaaaaaaagaaaaggatgcaaagtattgttcctggatatgtctgtgagggtgttgccaaaggagattaacatttgagtcagtggattgggagaggcagacccaccctcaacctggaaatctgggtgggcaccatctaatcagctgccaacatgaaatcagtcatggaaagagcagagttgctgagtcttctggcctccatctttctcccatgctggatgcttcctgccttcaaacatcagcagtgtccaatcagcacttggacatacaccagtgatttaccaggggctcttgggcatttggccacagactgaaggctgcattgttggttttcctacttttgaggttttggggctcgcactggcttccttgctcctcagcttgcagattacctgttgcaggactttatcttgtgatcatatgagtcaattctcctaataaacaccctttcatatgtacatctatcctattagttctgtccctttagagaaccctgactaatacacactctaaacatgctttctaatgtgcttgttttgttaaacttaataatatatgataaagatatttttgtgccaaaaaatagaaaaatttagaatcattattaatatgcatacagtgttatgtttagaataatttattttggggccaggcgtggtggctcacacctgcaatcccagcactttgggaggctgaggcaggtggatcacttgaggccaggagttcgagaccagtctgggcaacgtggtgaaaccctgtctctactaaaaatacaaaaattagctaggagtggtggtgcacacctgtaatcccagctactcaggaggctgaggcacacaaattgcttgaagtcaagagacagaggttgcagtgagccaagatcatgccactgcactccagcctgggccacagagtgagactctgtctcaaaaaaattaaaataaaataaaaagtaggattaatttatttttatttagcaactatgcccttttaaattaaaacttatgtgatcttttaattaaaatagtgtttgtttccttaaatgcatattcgtatagtttatattcattgtaaaaattacaagtggaagccctcttttatctctcctgatacccaagtatgcccctccttcctgccttctgtggtttcactctcctcttcagagaactgcttttcacagctgggagtgtatcctcccctatctttttctacatttgtgtgtatgtgtttgtgtgtgtgtgtagttgtaggttttcattatacttgctgtcaacaaatcagttgctgaatttaaatatattctccatgatttagaaacattcagtgctcagagaaaatatttacacagctttagttgaagagtaaaataaatcatacatagttcacagtttatttatcttgaattatgcatagaattaggttaaatctagaaaatcagtcacctcaaatcctttttggtagtgaatggatatgggtgaatggaacataaatcataagcaaaacatactcaggaaatcacttaggagtcaatatagaacattttaccaatgcagttaatttgacctcacaaacttttaaataagtttattatacatccacatttatatcctgagtagatgtcttcctaatctaagccttagaattggtattgtatgtataaatcaataaagtatctattacattttcatgtttttcctagtaataatatttcatgaaaggactctgagttctgtaataatacagtacaatcaagctaaaaaaataatattttggtcccatagaaatatgtttctttggaaggggaagtattatatagctaagataacaatgatctacttggtatcaatttatacattcctcttatagttcaaaaagcactggcctatattttccaatctgtggtatagatctgaattagtaaaattgtgatgtacactttaaaatttgttattacacttgtgaacatgttcatgcaataatagaaggaaatgcttaaatagctaaagctgtacatggataatctagtagtgatcccttctctttcagaagattcatttacatgcagtcttatgtaatgggatgttaagtgggacatttcctgttgccttggaattggtgacttgggtccaaagctgagaacaggaagaatcaagaagcccacatttaaaaaagatccttaataactgggctagatgccatccagaactattgagaggttagctctgctatcattatccaccacccatttcctgtctcctttgaatctgtatgagaagacagaaagtgggtggggaacgaggcaatcactggagttagaagtcaggccttgtagtatttttgtactaagtcaacctagctaagttagaactgtgttttccagtattttcttctctgtatggtcagggatggggttggccacagtgacatttgcatgagaattggaaagcggaagtgaagcagcagacatatttactctcagaaggtcagaggctgtagcagctcaagcatgttgagttgattttacacaactcaacaatccagctcacagctcttctaactctcatcatatttcctccttcaattaactcctgggtcagatgtatgtttagcatcttgacacagtgcacctgcatctacaaggctacccatctttgaagctggagattcagaagtgtgaggctgatgcaggttccagctcaaccttgctctcctccactttatgtacatctttcctttctgatgctctgacctgctgaggttaggcccagcaccagatatgtagaagcaacagctgtattatatacatgaagatgggacacaagagaatcatttagagattgagggttccccagtgaaggcgggagacaagaatctccctaccccaactacatattctttttatttctttttttgtttatttctttttaaaacatattatcaatattttgatagacaaactataattctatacatttatatgatacagtgtgatgtttttggtaaacgtatacaatgtagcatgattaaatcaaactaattaacatttctatcaccatacttacgtatcatttcttatggtgagacattcgaaataatctctgttattttgaaatatataatacatagctattgactataatcactctactgcacaatagatctcaaaagctattccttctgtctatctgaaactttgtaccctttggacaacaacttttcctccctctctacagcctctctccccagcctctggtaaccattattctcctctctacttctataaattcaactttatcagattccacatacaagtgagatcatgcagtacttgtccttttgtgccttgcttatttcacttaccataatatttgccaaattaatccatggtgttgcaagtgacagagtttttcctctttttaaggctaaatagtattccattgtgtgtgtgtgtatatatatatatatatatatatcacatttttctttatccattcatctgttccatatcttgactgtcgtaaataatgctgcagtaatcgtgggagtgcagacatcccttcaacatactgatctcatttcctctgggtatatacccagaagtggggttactgggtcatacggtagttctatttttagcttttgaggactgtctacactgcttttcacaatggctgtacttaaattcccaccaacagcatgtaagaattcccttttctctgcatctactccaacacttgttatctttctttttttcccccgctgagacatggtcttgctctgtcacccaggctggcatgcagtggcatgatcatagctcactgcagccttgacctcccagaatctagagatcttctggcctcagccttctgagtagctgagactataggcatgtaccaccacaccctgctaatttttaaattttttatagagacagagtctcactttgttactgaggctggtctcaactcctgagctcaagtgattctcccacctctgcctcccaaagtgctaggataacaggcatgaaccactgtgcccagccatcttttatctttttgataaacaccatttgaatagatttgaggtgatatttccttgtggttttaatttgcaattcccttatgattagcgatactgagcattttttcatctacctattggccatttgaatgttttcttttgaaaattttctattctgctcctttgcccatttttcaatcaggttattttcttactacacagttgtttgatttccttatatattttggatattaaccttttgtcagacacatgatattcaactgttttcttatggtattcaactattttcttccgttctgtgagttgtctgttcattttgttaattgtttcctttactgtgcaaaagctttttagtttgatgccatctcatttgtcaatttctgcgttgttgcctgtgcttttgaagtcttatcaaaatatcattgcccagaccaatgtcatgaagcatttccctcatgttttcttccagtagtttcatagcttcaggtcctatatttaagtttttaatctatcttaagttgatttttgtgtatagtgtaggctataaggctctaattttactctgatgaatgtatgtatttggtttttccaacactatttattgaagagaccatcctttctccattgtgtgtccttggaaactttttgtcaaaaattggttgactataattgcctgggtttttatcttattttttttttaagtcctgtttcattggtagatgtgcctgcttttatgccactaccatgcaggcttcattacaatcacattataatatgtttgaaatctgagagtgtaatgccttcagctttgttctttttgcttaacactgttttggctattcagagtcttttgtggtttcaaatggatttagaattgttttttccatttctgtgaaaaatggcattggaattttaatggaaattatattaaacttatagacaactttggatagtatgaacatattcacaataataatttttctaatccgtgagtatgggatatctatccatttatttgtggttttttttttcaagttctgtcatcagtgattatagttttcaacatacaagtcttttaccactttggttaaatttacacctaagtatttaattttttgttgctattgtaaatggaaataaagtataaagaataaatgtatgatttattgtttctttcctttttgagtagttcattattggtatgtaaaaatgctcttcattttgtatcctacaactttactgaatttgtttactgaatttgtttccaatagttttatggggggatctttggatcttttatatataagatcatgtcatcatccaatagagacaattttacttctttcttttctatgatgttgccttttattgtttctcttgtttaattcctctggctaggactttctgtactatgttgaaaagaagtggtgagagtgggtgatatgttttgactgtgtccccacccacatttcattttgaattcccacatgttgcgggagggacccagtgggaggtaactgaatcataggggcaggtctttcctgcgctgttctcatgatggtgaataagactcacgagatctgatggtttaaaaaggggagtttccctgcacaagctcttgtctcttgtctgctgccatgtgagatgtgtctttcaccttctgccatgattgtgaggcctccccagccacctggaactgtaaatccagtaaacctctttcttttgtaaattgcccagtctcaggtatgtctttatcagcagcatgaaaatggactaatacagtgggtatctctgccttgtccctaatcttagaggaaaacctttcaacttttcaccactgagaatgatgttagccataggtttgtcacatatggcttttattgtttatgttgagtaaattccctctatacctaatctgttaaaagtttttatcatgagaaggtgttgacttttgtcagtttttatgcatctattgaggtgatcatatgatttttatccttcattttgttaatatggtatatcacatttgctggtttgcatatgttgagccatctttgaattccagggataaatccctcttgatcatagtaaatgattcttttgacgtgttcttaaagtctcttgctgtttttgatattctttttctttgatttttcagtaatttgtttatgatgtgtcttggtaaaattatttttaggttaaatttgattggtgacctctgagcttcctgtacctaaatgttattatctttccccaaattgggaaattttcagccattacttccttaaatatgctttctaggcccttttctctctccttcaggaattcctgtaacacaaatgttagttttcttgatggtgtcccacaattcctgtaggccttatttgttctttttcattcttctttatctttctctttctaagggataatttcaagtgtcctgtgttcgaataccctcatcttttcttctcctagatcaagtctgctgttgaaaatgtcttttgagacacttctcaaaagaagacatttatgcagccaaaagacacatgaaaaaatgctcatcatcactggccatcagagaaatgcaaatcaaaaccacagtgagataccatctcacaccagttagaatggtgatcattaaaaaatcaggaaacaacagatgctggagaggatgtggagaaatgggaacacttttacactgttggtgggactgtaaactagtccaaccattgtggaagacagtgtggcaatttctcaaggatctagaactagaaataccatttcacccagccatcccattactggatatatacccaaaggattataaatcatgctgctataaagacacatgcacatgtatgtttattgtggcactattcaaaatagcaaagacctggaaccaacccaaatgtccaacaatgatagactggattaagaaaatgtggcacatatacaccatggaataccatgcagccataaaaaatgatgagttcttgtcctttgtagggacatggatgaagctggaaaccatcattctcagcaaactatcacaaggacaaaaaaccaaacaccacatgttctcactcataggtgggaattgaacaatgagaacacttgggcacaggaaggggaacatcacacaccagggcctgtcatggggtggggggaggggggagggatagcgttaggagatatacctaatgtaaatgacgagttaacgcgtgcagcacaccaacatggcacatgtatacatatgtaacaaacctgcatgttgtgcacatgtaccctagaacttaaagtataattaaaaaaaagaaaatgtctattgaatttttcagttcagtttttgtatttatctctataatttatttttttattgatgtagtgtctaacttctcattttgttcatgaattgttttccaaattttacttaattttgtatccatatttttttatggttccctgaacttcttcaagaggattattctgaattatatgtcagccattttatagatcttcatttcttctgcatccattagcagagctttattagtttcttttggtggtgcaataattccctaatttttcatattgtttgtattcttacactgatccttgcttatttgaggagaaggccacctctcctggcttttgcaggtgttctttggtggtgaaacacctttattatttagtctagcctgggattgtggatgagttggctggtggcaacgctgagcatgcagactttgctgtcagtttctcaagttgggctgggttgcttcttgtgttctgagggagaatggtattgctgattgtgctctgtgattcagcgagaccactggctggactctgaaatcaggtggagcgccgctggctgggcactgaaattatatctgattgggcagggttgcagtttgtcttccctggctagacagtattattgtttggaatttgtggttcagcatggccatgcaatggactccaaggttgagtgaggtctctgggcttgttgtttggccacacaaggtgggcagggccacaggctctgctccacagatatgtgtgggtatgggcttgcctgctggcctagaggaagcttaaccagaacactgaggtttggttgagtaatcatgctgcagctggagttgggcagggccagatgctccctccccaggtaattgccggttgcctcctgacttgggaaaggcttaatgtgagaaccagggcttagttgggttacctctccactactagcattggacagggacagatgttcctttctctggtcattactgacctacagttgcctctcgacctagggaagacttagggagagcacttgggctgtgtggagaagctggctagggattcaatgctaaaggacctgtggaccatgttttctgtagtgtgatgctattgggtagtttctctgatgtggcacctccattgctccattggccaaagttcagagcaactaccaagatttgtgtgatggttgctgtgaactctatcacccgcccgcttttttttttttttttttttttgagacagagttcagtctgtcacccaggctagaatgcagcaacccaatctcagctcactaaaacctctgccttctgggttcaagtgattctcatgcctcagcctccagagtagctaaacacccccattctttatttctaactgaccccaggtggtatagccctgctgttactctcagtgtttcccataggatgagactggagtgagcctctttcacagggtcccagaatggtggggaggctgaatgtccacctccaactcacttttcccactatagaaaccatgagtccagaattctttgtgcatggcactatgctagcttaaggaaggaggagtatgctcaatgagaaccatttctcttaccattgaatcatagcttttttcagttctgcagtctaagggggtgtctcagcctcactcctgagttcttggatattcaggatggtattcttgcctgtggacagttgccagttggatttctgtgggggagagtgaagccggagaactcctattcttcccgtcttgccaacatcactctctgcatgttcttctgaactgggaaactgaaggccctgagtgctgccagtggggtagagtagaggatggaagtggagtaagtgggagaactcaatgcaacctctggaatttggaatttggggcatgagtgaatatagagtctagaggctgcttctttcctagagtctctgaagatagcaggctggactacaaagatgtcatattcctgggaagaagatgggagcacactctaccttttagggaatataagaggatttctccagggcaccagtacaggaagcagaagtcatggagctgccaaggtggctatgtagtgagagttgcctcatctggaaagggggttggaagtatggaactgtggtgggagacaaatgtagatacagttatccttcagcaatgaagaagtagagtgaagttcaccaccatcctctaaaaccaatagagaatatccatgtacagaagtcaccagtggcagacagagccaggcgaagacagagtgagtccaaagacacctctgtagacagccagcgagacacctcatcctctcccttgttcccctcccagctcctcttcccaaaggatacagagacccacaagtggataggggtggggagaggacatagcccagagtcaggcttaagagagggaagaggggccaggcgcagtggcttaagcctgtaatctcagcactttgggaggctgaggtgggtggatcacttgaggtcaggagttcaagaccagcctggccaatgtggcaaaaccccgtctctattaaaaatagaaaaattacctgggcatggtggtgcgcacctgtagtctcagctactcgggggactgaggcaggagaatcgcttgaacccaggaggtgggtattgcagtgaaccgagatcatgccacttcactccagcctgggcaacagagtgaggctctgtcaaaaaaaaaaaaaaaaaaaaaaaaaaaaaaaaaaaagagaggagtaagaagaattaaaagagaagcccacttgccctcacctgtgcaagtctcttaaaatacacatcaagcttgtgctgcagaagaggacaggagatttataatagttttgggattagactttaaaactgtgctgaactaattctattttaaataactaaatttaacagaaactaatggaatatgcccaaagggacttctgatgtaactgttgagaagagtgattagtgaaacataaaatagtttcatgttgaaatccccattgcattcagatttttcaataaagtagttactttatatactcataaatggatttataaacacctatatggatttatgtatatgaatttatatacatatatattcacacatgtatacaccatttatataaaggtaactgatttggagagcctgagaacctagattagacttagaaaacatggggcgcatatgtcacacaaattaccccacccccttcccttgccaaggcagacattaccagttaatcaatgcaccttttcaccctaaagtaggactcaggtgcagaatccttttcaacccagcattaccagcagccacttccaagagatcactgttggcacagaagatgaaacctattacatctcttttcaagattctagaacagagcactgcagcagggagtctgattttcaacagtcaaaattgatcttgtgaaaactgttttttatttgctcagagcccatttattcttactgtgggcataattctagtaaactttatcagctgtcatctgatttaccagtccttagcatgatacagtcagctaattaagagttgggattttactagagaaagcaacacccacagtagaaagcaaggatgttgacacaaacagtgatgtagtaaaaataatttctacttactgagcactcacttttgttataggtccttgatatgtattttcttttatcctcacagtaatgcttttaggaaggcaagcactgtgtacccattttataaataaaaaaagttaggcttgcaaaacttaagcaacttacacaggaacacacagttgggagtcaattccagatctttgtagtaccaaggcatacacgatttttcttgatactgtatagactgcccctaaaatttcagactttagatttcaaagagcatggtagtctggtgtcatgtaatggagagacagagaattccctaggccttgatgaggtctaaagtcatgaattttgaacagaatatttttatttttattttttaatttttgtgggtacatagtagttttgtatatttatggggtatatgagatattttgatacaggcatgcaatgcttaataatcacagccagataaatggctattcatcccctcaagcatttatccttttttgtgttacaaacatccaattatactcttagttatttaaaaatgtacaataaattatttttgactgtagtcatcttgttgtgctatcaaatactagatcttattcattctatctagttatattttgtacccattaaccatcccccctcccctcacccactacccttcatgtttctgatgaatactctgagcaattaatatacatttaattgcatattaaattagtatttaataacatgaatatggaaatatagaaagtagataaatttagaatacatttttatttgcttaatttttaaatttaattacatattaatatataaatatgaaaagtaggtatatataaaatatattcttgattaattaacatactatgtgtatatattgtattctactatgtatatcatgtagtttcttattaagccagataaattgggtattttaatatgtgactatgtttgtgtgtacataagcatatatatgtggtatgacagaatatatatacaaatttcctaaaaggaggtactgatatgctggctatcagctgaccctatgccctaccctcactttgggttattttcatatgacaaataaacttgtttcttttctgtctttttttttttttaatggagtagggaatgggatctcggagttcttgattatttttgactattcatgattttcccatttacatgctctctttagcacctggttaaatcactggcctttggcttcagcataatttcatgttctacaaacaatgtaaaattatttttctccatttacatctaatagaacttcctgggagaaccctcccttgatgcacttaagaaataccctgtcccaccccaccccacctcatcctttagaaccttccctttggtttggcagtataatgaactaggtaaaaaatgaaattttagagtctcagaaacttgagttcaagtctttgctcagcaatgtagtaactttgtgatcttaagcaagatacttaatcttattgtgtatttcctcatctgtaaaatgggtacaatatcagcgtctattccttaggccactgtgaagattaaacaagctaacatatgtaaagtcctcagcacaatattagacacagagtaagccctcaaaatttgtttttttaattattttgattccttaaacacttttaggattgccaggaggttagtcatctttgccccagttcttgctatgggataatttcccaagtccaacaatttgttcaaatgaaaaagggctttccaatttgcttgactttgtgattaattatggataaagtgaatggtaattattaattaatttttgaggtgattatcaggtgcatgtagattacaattaaagacacttttctctagacaccctcctttctatggatttgatgttaagttttaatgcccatatttggacatagcataactatttcgctgacaaccagtaacaaaggtatggtttaggaaattatttcattgtgataaccaatagactggagcaataaagagaaaatctcttatttagtatcagatacttcaaggataaagaaaacagatgcttcttttttttcaaaaaaagtgatattgttttcaagttttcctcattcagaaatctcctctttacatcaactcaggttcaattatgaaatcccaaaggaagaaaaaaaaaaatcatcatcttcacagcacattgttgggcatgcttcataaaagcagtgcctactttgttttgttataatccttcattctttgaatttaatgagacaagatatatcatattgccatgaacacatatacaaaaccaaatcaatttcctcaaggaaaaaatcccttataaaactccagctcaacaaatttaaatatattaatgatttttactacatctgtatatggtgaaatccactaatggagatcatcccattgttcaataaaacaaaatgagagtctttaggcaggtagtctcatacacaaatttatggcagcctatattctgttattaactggatggattcatgataagatagttaggactatactttttcctcttaaagaatgtcacaatgtcacttctctttccccactcttcccactgcaggtgctcagctgctgttttatgaccagcttccctggaaaagcctgaccaacagagtggtcataggcccagctgaacaccggtcaacaaaaatgtcctgcccatgtctggtgttaggccaatggaaggaaacctccaaaggtaggaggctaagtatttgggaagcaaaggttatgaagcaaatggcgattgcatgagtgcagcccatgctcccttatcatctattaggtgcttgttagctggtactcattagaaggggtctgtgtctatacctgttttatacatagtcagtattctgtatgtgaaagaatatcaaggctgagaaaatctctctcagggcaaagaaaagaaaattacccagaatcctagcactctagcccaactaattacatatatgtaaggttttttccccagatttttctatacacatagacatatacatatatgcagttgtaatcattatggtcacacaagtttttatcctgttttttttttttttcgttaaacatcccacattcaggcagtcttcataatcaccatttaaatgatagtactaggcattggcaagctacttcttgccagtcaaatctggtccactacctgtttttataaataaagttttattggaatacagctacatccattcatttttgtattgcccatggctgctttcatgctacaacagcagagctagtagttgtgacagaaaccctatgacccacaagcataaagtatttactgcctggccctttaaatgccaacccctgacattcattctatcaagtggaatctataatttatttaatcataccccgtttttgaacatttggggggttttctcttgtcttcttactaatacctcaaggaatatgagggttcatactttaaaaaaaaaggatttcctgagtctaaattccccaaagtaggactactgtaccaaaatgtaggaacattttgatagcttgaaatttctaaatcaaatctcataagacgaagtagtttctcctacagtggtgcatttctctctgacaatagcatgctcaccatatcgacagagaaaacaagagtggattttggctgacttgtggatatgtggctatgtggctaattgctggattagagtcttacaagcatcattttgcctgtggtcatgggcatagttttgtataagtgtgttacgtgttcaagtgtttggttagttgccatatattatctgcagtgaccattctttatacattttgggggaatcctctcatatagatttgttacacaaaatccttccctcaccaccatatctaattcaacaaacaaaatgaatgccaaataggcaggcagaaccagatttatcatttatggggcctagtacaggtccccttttcgaaagctattaagaatttcaggatgctgacaacagaccattaaaccaagcacagagccatctaaacacggggccatttgtgaatgtattggttgtacatccgtagagtcagccctacaggtaggtggaggatgtgtgtggaggctacagctaagaaaaaccctgttatgtggaatacagccagccctgctgttgtcccctcctgaaaccaccagacatgggcagtgggcaaggagggaggaaaaatccagaagtgtttggctgttctatatatggaagaagacaaaccagaaacttctgtgacctccttggtgacagtcactgtgagtgcaccagtctggagtttccatcatttacctgtcccatctgtggttaagagagtgagctctcaactatgattgcctgagttcaagtcctaactctgtgatgtaccagcagtgggacattgaagtatgttatcttcagtttactcatctacaaaatgggtctaataagggtacctgagtttgttttaacagtaagtgcagtgacactccttttgtgcttatgcctgattataccctgagtagattttcctggtgttatgctattatcttttcaaaagggtaccaaactaataattgttactgaaaaaaaaaaaaaaaaaaggtttgtagcttgcagtaagccttttggtagaataaagtgctaatcatttttctaacatggcagccttttgtgcattgctcagagacacctttcaactactggtacatcagtgctggctcaacagcctacgtagacacagagttggggtgaaatggtagtgctattggtattactattactcttccgatgttgaaatcttgtggtgacaagcagaatgcttgtctctgcaccagaggtggtggtactaaaacaatccttgtggattcatcagcatttacctaagtatgttccactaaagcagggctttagtcctcagccctgaggactgcctcaaacttttgaaaatcaaaagaattctatcaataaataaattttagaaatgctgtattaaactcacataaacagtattcttacctttagtattcttatgtggacttacatattttccatgaagtacatttttctgggaatatatcacagaactgatgtttcaataaacacattttgggagatagcactctactaaatattttagtgctggatcaaagtaggtgttgctttgtgaagctttttttctttgggagaggcaacctttaaccagaggcatcataaataaaagacatgtctgtataatgcccaaatccatgtaacaaatcttaaagactcggtaggaagatgcttagcaacctctttggtgatgtggcaagcaggcctcaaagttggcggatgacatggaatagagatgaatatccaccaaactcagccattgccagtggagggtggactgagacgccttttttcacagtggttctatttttgattcccatgtgatttacccaaaaaaggcagggccttgacaccttggggacagttatgcttattctcagctcagcagattgggcgagaatgatttaagcagcaaaggaaaattaattggttgccttggcttcttccccttcctgctaggcttaacccccttccagatttcttccgcaggacagttcccttctctccatgcagacctgagccaaaatagagtgccaggagggtgagagggtgcgttgtgaggcatgcagagcactctccacaggtaaacctgcagctttgcaggaaggtggatgcacactccctcctatcctcagcccactcattgctggatctaagaggacaggatgtgtggcgcagcagggacaatgcaggctctgccatcagaaacgaagtgctgatcctccaggctttaactttctcctttgtggcccacaaaatgcaactgccacgtttgcatttgattgtttatttttaaagtgagggtgggcccattagagcaatggatggggagagaaagggcctcaaaacgtgatctttgctcttggataccaagataatattcatcttactatccattagggtcagatgacccttctaagcttaaaaagcaataattccaagttatgcttcctgcctccttccgtcctccacaccctctcatacataacttttctgtctcaacagtgatcctgtttttcccatgaaagttttctctgtgtatagaggaggaacagtctcacattttactgttaacttagtctctagggcatgtatatttcctgtctttatgcttaaggcaaaactggggtccattctttagttcaaaatcagagccttaaaattatataacactgacacataagaaactccagtgcaaaaaaatgtggcagatatggagactgcgggagaagagatccatgtgtcgtgagttcctgatcttcactgagctcctacagcagttattgtttgttgccaggtggtctattctcagggccgtttgtgttctgatgtttctcccttgtcctccaatgagactggataaactttttgaagatagagtttatacctatacaatgtttatcaagaactggcacaaaagtctctgaaactccagttgaaggtatgttttcaccctctgatgattatagggcagtctggatccaacctgcctaggtcaaattctgtctctgctactaactagctgcatactagctacttgggcaagattcctccaattccttatccataaaatagggaactgttatgagcaaagtccatgtaatatgcttagcacagtttctggcacctaatggtacttcaaaaggtgaaataataatgttcattaagtgccaaccatttccatacatactagtttaaaatcttttaaagtaggaattattacctccattttacagctagaaaaatagtaaatcagagaaatgtggttttttagttgcagatcgatcacaaagtgagcagcagcacaggtctgtgtaaccccaaagactgagactccagcacaggtctgtgtaaccccaaagactgcagtctctgaacctctccacactgtcttgaacattcaggccattaagaccctgaactggggaactcctagtctagctctttagtcacttggcaaaattgccaccagtgacccggatgaagaggttgaaaacaggccccttctagactttgattctcagccatgggtgttgactgctttgtgcctcctgggtccccctgatgaaactctgtgactctggctcaggatgactgtaaggcaggacacaggaggtcagccctgtaattccataactgctcactcactgactgcttagtgagaaaccatgatgacagctgggatcctttccgtgatgagtaattaccctgtcacacaaatctatttagaccacatccttctggggtacaaccaccagttgatttaaaatgcaaaccttttgtagctcattgccatgaggatgaaatatagagtttactcagacttttctttgttggagtatttattgtaaatcattagttactatgagttgctacccatacatcaagcaattcctacctagccctgagtgctgaaagaattctctgtgcttttctagaaaaggtaccatttgtccaagaatataattactgtatactttttaaaaatcccaagctcatatatttgtgtagagaaactcaggcccaaggacacccaattaactgggaacactcagtgtggttttcaatacaggaaccacaagtcttcagggatgttaatgaacatggataataaatgcctcacctactactcaggcttccagccagggaggcgaaggagtgacaggcaaagccgtggctccctgctccaagtcttgcactaaacactttatataggtctttaattctcccaatagccccagtgggtaggcattagcatcttcattttacagatgaacaaattggggatccccatcttacaccatgaagcagtggaaccaaaactcatactgaaaataattgactttcccaagtctctctgctatatcaccacacacaaagagacttgcagccccagctagcttatttctggcttctgctggtctgattcttctgtgggtggctttagaacaaataggatggctgaggtcccccatcatcagggctgccgttgaacatgaaggaggaaagctgctatgtatagcaagcatttttatcttgccaccaacaaagatcaagcacacaaaatctgaatccccccaggggtgggagaaggagtgagtttctatttctcccagaccattctgtccagagcacacagcaatatgggcagacaattagtatgaacggatttgagcaaaacagcaaatctgattgatgctgaaagcacacccatgtgggagcacacaaagggatggagaagaggggtggtcataggaagcggggcctgcttaaaaattctaatcctcataagcttctgaggaagctgctcttttcactgggcaggtttttaatatttattgctgggggctgttttaatcctaatgaaaatagcatgtccctaggaaaagaaatgctggagctacaatgaatgaatgtggctctggcatttaaaatgtctcacaaggctcacagagggtagaggtgacccggaagtgaatcattgacaggcttcaggaagtactgctgccagaaggaagttgagctcaaaacagggtatgtgtgggcgagttcaggctgagttaacccctgaatgggtctgaatggaagacccatttctgaagaggggcacactcagagttcatctgccagagtttgaatcctagccctgccatgtctaaatctcaatctcccatctctaaaatggagaaaatgataattacagattttgttgtttcattgtgaagaccaattgagacaatgaatgtaaattacttaccacagcttccggcacagagtaagtgctaaatagtgagagatgcattattattaatataatttttattattgtatggcttatccttaatagtattggcttttttcccaaaaatataaggatgccaggtatgaactaagagatagtaactaggagggcctattggaaagagccagagaaaattaatgctgaatcttctattgataaaattctgattcaaatctgattcaaactgagaaggaaataagagcttctcttttgcagtgagggacacaggcaaattaactatttatccaaatacagtttcattggcaaataaaatgtgttgcctgagtccaaccatgtcatcaagtaagatctcaacagagctgaatctgtgtgtaattctgaagactggagtttgtcttgctcactcctagctgctgttgtacgcctgttttttcatgagtggaatcatttctaaccactcagtaaattctctctgtttacctctccccttctataatagtggatctgtgactggggtttccctttctgttgttgggtgagtctgacacttgctgagagtgtgctgaatgatcctgaccacctcctctgatcttcttgggctcacaaatggggacctcagttcctcactccaaggaatagcttaagaatgtaaaaggtatcatgacctaaactaatatggtacgtccacttccatatgaaagtcaaaatcaaagttgtatcaaactgtaaagtaaacttactttttgaggtgacataaagcttaaatgggtactggaattatctttattctaatttctctctttctctttctctttctttctgtgcccctgctttgctggttccctaaactcacacctagtctgattattgcaaatctagcaccaagaccagattccaaaaattattaagaagaaacagtaaaattgtgatgactaagttctaaatctctcttcttgtcttgaggaaaatgctctgtgctctctctcgtaattattctcaagaagcatgcctagttgaagagctcagcaaattgtttgctttttttgccttttttttttcaccatcttttgcctgcaataatggacagtctcccaactcgttgtctccctctcttttgtcttgttctcctttacttcattctccatgcttttaccactgagcgctttctaaaattcaaatctaataatgttgctacttagtttaataccttctaatggctccttataactagagctacaattctcaaaccagggaaacgtaccacttggggtaaggtgttactcgttatggagggtgtgaaggcataggataatcatgatggatctccttttttttttttttttttttttgagacggagtctcactcttgtcacccaggctggagtggtgcagtggcaccatctcggctcactgcaacctccacctcccaggttcaagcgattctcctccctcaacctcctgagtagctgggattccaggcacctgccagcatgcctggcttagttttgtatttttttagtagagacaggatttcaccatgttggccaggctggtcttgaactcctgacctcaggtgatccacgcacctcagcctcccaaagtgtgggattacaggcataagccaccgcacctggcattgatggatcttctttaacgccaagagtgatgaatgtgatgtattcatatattaacaaatataaatatgttacggagtggaacacataatcgactcaaatattagagactaaatatggtatttcagaggaatttcacaggagtcactggcttctgaccatgccccaggacttatgaaaatattcaatcactctcctaaaacagaatagaaaagttggtgaagcattaccctgaacagtaaaatcaaaccctttgatgcaaagaaaattctctgaaatctgaagccagccttttcttcacagcaccatatttctttcccaactttaccctatctgacaccccatgctccttacatagttcatgcatgcacagttacaagcatctttgctaattttactcttctagctctatgtctctgaaacacctgtcttgaagcatgcatcttcttaaaaaggttgaaagtagtggttctcttccaaccttccctttactttacccaaagaatccagtctacctttctccccagatagcctctaagaagttagctcagcagtgtgtatgcatgttcatctctaaagaggagaggggcctaggccaggctgccttgactaagcacatgatgcctgccccatctgttgaacatcaggaaatggtgagtgattgagggctagatgctggggtgcactgcctagatttgcatatgggctccctcacttatcaactggatgatcttgaactaactagctaactgctctgtgcctcaaattcctcatgtctacagtaaagattatagcagaataatatttctgtaaagaaggtcaaagagtttaaatgtgttaaatgcttcaaagaatgtctggtacctaaatgaacattagttatgatcattcttaacctctccttgctagtaggagggagttggctcaaaatatctagtgttcttatgaaaaagaccctggtcctcaggtattctcacatggccccatcacagcctaagtcctgtggctcataggatgagtgtactctgggaataaagttctgtttttctttccttccccagagccaggacattctaaggcacccacacataacctccacgctctctttacctctgtggcatgtgtgttataaaagagactgaaggatgaacatatttctaaaatagaagtcatgagggaaaagtttaatgttgaattgattaatattttaatttttaaattgagatatgatttttaagtctaaaagatacgcgtgaaagaagaaagaggaaaaaaggagccaatatttgttgcaagtttatgtaccagatttcaatcctcaatccctatcatattcctacttaagggaaataattatccttctatggagaaaaaaaaaaaaggcctgagatattaactaccacaggggttaaatcccctcaccatccgccaaattaaatcgccatggcatttcctcctactgaaattcaatgtccatgacattttaaggtaaagggtgttgttttagtcatttttaattagtgatatctccattctctggaaaacagacttctcaaatcccacccgctcactctgtatattggtacattggaagagacctctcagtgaagtatgtctctgcagagtgtgcaaaggcttcaatagcataagctggttctagggcagactaaaggaaggagctcagggtgctgtagagagttgttgaggaccggtgcatgaagccacactatcttcagggaagtagatggcagcccatgtccgatcctcacatatgcagaggccctcagaggtccttgggaagccactctgcttgccaacttgggcattccctcatagcatgccaactcctggctctcaatctgagagtggtaagtgatgcttcaacagagtcaagagcctggtcctcaattcctcttaggcatgacttgttaaactactgtgaatgagcgaacgtgaaaaaccttgcagctgctagacccacaggtgcccaacacattgggacataaaccaattggcagtgttctagtcaggaatttgtatgactcagaaaggagggtgagagcttggtcaggactcttgcccacagaatttattgtgtgcatgggtaattaccctggttattcatgctaaggctgtctttccatagtttgttttttttgttttgtttttgttttttgccaatggtcacagtttgttattgccttaaaatttagcaattggcagcagaggacagctgagataatgagactttgcagtgtctttccctgacgaaggagattgtcatcactccatttaatgtgttcttttccactagaagcaggtgcagcagcctgttgcaatggaaacagcagctcacctggagccaggcagatcaccattctaatcccagctctgccacctgccagctatgtgaacttctgcaatctacttggtctatctttacctcagtttcctagtacacacggctgctgtgaagattaattacaaacgagtaagataatgatggaaggatgctcagcaatagtggggtctcaataactgggtgtttctccttctcttcctgtttttagatctgactgttttcaccatgggcattaatgattgtgttttcaatcactagcatgaagttcaaggctctgttactagtggtaatgggagatttaatggtaatattctcgagggactaacattttcctgggagagaagacatagttagggaatagaacaggaccacgaaatgctcaattatctcctgcacactctcagaccaagatggggtagaactctgtgtgggctctgcttatcaggtttagcttcacggaggaggagatgtggaatgaagaattaatgtggcacgctgccctgaacatagtagcaggtactctataaatgttaaccgtgttgaatgactgcacatatttaatgttcggaatgaataactttctagtttatggtgtaagctgctcagaggaaaagtgagcatccatagatggttataaaataaattttaggaaagacaaaaatttaaaatagccatgagcccattttcttgtggtttagaggaaagatttaactgccacatcaatgctgtgagtttatatattctattctttggacaaaagctaaagtttttaaagtgtattgattttttaaatacagtaaataaatactattaaagctagcatgtggatatgcagtatgtgaacgaagctcgggaaattctgctggaagtattataatatgatccattttcagatgccctgtggatggaaagaatcattctgctatgtgaggctctgtgatcttgggcaactgcattcatctttctgtacctcatctccctcatttactaaatagggtcaattatgatgctaccttatggggttgaaggttaatatctataaagcgtacagagcacttctctctatgggttaaggtttgagtagaataagaatgaaaaaaataaggctgacattagtttgttggctaccactgactgagccatggtggcactagatgttttggtaggactttgatagcaagagttaatctaccccacactgatgaaaaatgataggtcgacagattgtcctgcggttcccaggaagggattcccagctctgacattcacacccttgtgggttatttaaggtcacaagtacatttactgtatgatcagagaaaccacatacttgtgcagctgggagcatatttctgccaatgtgcagaggactgatgtgatgctactaacagtggcatgagtgattttttcctatgagatgagtaagtacccagtcaactgagatgaatttaatctgaacctatgctccagtgaagtccaagattccccagattcttgcagaagcacataaaataattaatcaaatcttatctcagatgtttttaatcagttaatgaacagtttatttcagtggttccaaagactagccaatttgaatggaacggtaaattgtttgtatataaaatgatttggtttcacccagaggtagatatattttagttctcatccacattgcattttcaactcatgatgcatagccatcagttttagaattgtaaaaatatcttcaataagcaacacatagcaagcaaacagacatggtggaaaatacagaaatgctgtcatcaaagatctgctgctgaagaaaataagccccaaacctctacctctaggtattcctcttgagcctcagacctatatgaccaagcctattggacatccccccggtatatacagagttgttctcttggagattctcaatacacaaagcttttaaagatgttgacaagtcctgtattaaacaatgctgtttaatccaatcatgtatgataacatgcccctttttaagtgataacattaatatttctatttcctagaggacagaataagacatgctgccccaacatagatggttgaagcataccattcactcattcagcagtctaaaaacttgggtgacttactttacttctccttttccctcatccatccagtccccaagtcctgttgcttttacctgggaaatgtctctagggtctctgccctcctctccatctccactgtcaagactcagtttaagtcttgctcatgtctattttgaatgtctagactgttctccctgctttcagtttctctcctctataatcaaccactgacttattttccgaaaaataaatctcatcatattgctttttcacttaaaacctctcctgtctccccattgcccatacaatgagtgaaaattattaccacagactaattcttaggacagtataggatggtagttataagcatagcatttggaaccaaatacagtagtcctgccttatatatggtagatatgtttcaaggcacccagagaattcctgaaaccatggatagtatttgtgatggttaatattgtcaacttgattggattgaaggatgcaaagtattgttcccgggtgtgtctgtgaggtgttgccaaaggagattaacatttgaatcagtggactgggagaggcagacccaccttcaatctgggtaggcaccatctaatcagcagctaggataaaagcaggcagaagaacatggaaggactagactggctgagtcttctggcctttgtctttctcccatgctggatgcttcctgccctcgaacatcagactccaagttcttcagcttttggactcttggacttacaccagtggcttgctaggggctcttgggccttcagccacagactgaaggctgcactgtcggcttccttacttttgaggttttgggtcttggactggcttccttgctcctcagcttgcagatggcctattgtgggacttcaccttgtgatcctgtgagtcaatactccttaataaactccttttcatatatgtatgtatgtatgtatgtatgtatgtatgtgtgtatatatgtgtgtgtgtatgtatatatgtatacacacatatataatacatacatatacatacatatatagtatatataatacatacatatacatacatatatatatatatcctattagtcctgtccctctagagaaccctaatacagcacggaaccctattgatactatttttttttttttgataaccaagacagctactaggtaacaataggcaggtagcatattcaacgtggatccactggataaagcgatgacttatgtcctgggcaggatggatggagagggccagcataagatttcattatgctactcagaatgacatgcaatttaaggtatatgaattgtttatggaatttttcatttgatattttctttttcttttccttttttttttttgttttgtttttttttttttgtttttttaggtggagtcttgctctgtcgccaggctggagtgcagtggtgtgatctcttctcactgcaacctctgcctcccaggttcaagtgattcccctgcctcatcctcccaagtagctgggactacaggtgcccgccaccatgcccggctaatttttttgtattttagtagagacggggtttcaccatgttggccaggatggtctcgaactcttgacctcgtgatccacccaccttggcctcccaaagtgcagggattagaggtacgagccaccgtgcccagcctcatttgatatcttctgaccgtaggtgaccatgggtaacctaaaccatggaaagcaaaaccatggataagggggagactactacagttttgtataggccctaagacactgatttaatcctcctaagccccagtttcctcatctataaaatgggcataattatgttacaaattttacaggattatggtgatgattaaatgagataatgcaggcacaacacttaacacaatacctaaaatattgaaaatgtttataattttagtcattcttttagtcttatacataactctaaagaactgagccctagctcaccagtctcatcatttcacagccttttcccagccacctatgttttagccacaggaaattctaacttttctctgacattctaggcacttacctgtctctatgattttgtgctgtccattccctctctgcatagtgctattacctgcttctatagtggaaatgtcctcactccaagagaccattatgcagcttgaaagaacttatcgttacaaagcccatgcacttttctgtacaagaacatcttgaagggttagcatgcttatttggaattgggtggaaatgtaaatctactgacttgacccatgtagttgtctaggttcctttgcaagagaagggagagagggaaagttcttcttagttgacagagggatcagattaaaagcagcaagggaagaactataagataccatggtaagaagcaaaggctaagaaacagggaggaccaggaatagtgacagatcacttagtataaagcataacctaagaacactatggaattcacatccactttaacaaactcttatctaaaaggactgactggactaggtgtcataactgacattctttatgatgatcatcaaaaattagtaatagtagtgcactcatgttttttagtaagtgcttatgatgtgtcagcattatgttaagtattttttatgttaagagcgactcattctcattgtagtattatcacctccctctcattttaaaaatgagaaaaatgaagcttatagagactaagagactcttccaaggtacttagtgagtgacagagttctaatgattctggagctcatgatcaaaaccatttataatattctctccttatataaagttattatggttaatgaactctacttaccaaacacacatggaataatgtaaatacatatttattattaacatctatgattaaaatatatttttataaaatttttcatgtagcattgtttacatttttacaatgttggtatgccagcaaaccacagaatttgtaagtaggacatcttttatttctctgctgctggataaatgacacttcacacacttaagaaagttagcttcctaaaagaaaatctaatgtctgtgagcatctttgcgtggcacaagcctatggtgaaaactaaagttttaaccaaaatgtttatgttttatgtcctcctaggaggttttccttagatctggagtgaaaggggagtgtgtgatttggactgagtggattcagtgttcttctgatcttggttttgtttcagagcctgatatgtgtgtgtcaacgtgtttctctcctgcctgcattggtacttccacaaaagcagaaccacctctgtgagagacattgcctattccctgtcccttcaagcttgtccttagggtgtcacctttaaaagccagccttgtctctcttcctattcaagccagatcctccctcccttgtctaattcttagccaagcatagcaaggccagctggtgagagccttgtaaaaaacaatggcaccagaccctgcttaatggaacgctgattgtgccagtcgaaacttcctggattggaacagttgattttgagttgtggcccatcctctgacccatattgaagtgttgtgttcagtggggattaaaagccttgtgaactggagtaagaagagctagaagaaagaggtcattgtgggtctagagggaatcaatattgtctctttgaaaaagcctgtgtctgttcccagactgaccatctggggctgtgtggctcaaaatcatctacaaaagaggagagggaattaaattggaatgggagaactttgcaagggcagatttgcaaggtagcttgtctgggaagactaaggaggagccaaaggggtggtaggagagaaggcagtttaagaaaaaaggaaaaaaaccctaaattcctatgcatacctgcagttcatccatccctccttgtgcccctagcaaatgttttccagatgtgaataaggaactatttccacagcagtcataatttcttcctcaattcttgaatgcctttagcatacttttacaaaagtgtttttgttttcaatgcaattgacatttctaataaattccaagttttaagcttatagggcacgaacacaagatgaggagtggtaacaatttagagatgggtgtcgctggttcagtgctcctacagcgaaggaaatgtttcctctatgtaaggattggtggcttcagttttctttggggaagcgtgataactggatgaaaacaggcaataaaagtggccaaaagaaacagagaatactgatgtgtgatgcaggattatcaggctaacagtttcctcagagcaatgacttcattctggctttaagataccaatatacctgttccagctaattatctggaattggagactttttggaaaatggatacatttcctcaggagaccaaggagccaaatgctgccgtcagtggtgaagtggaacctggtaagtggggcatttaagcaggaatggtgaaagtgtgagcattggacagattttggctctggaatagatttgctatatgttcctagatgaatccttaatattatataatactcaatcctcactaatcacttaaaatggcaaaaattaatttactaaaaggacttgtgtcacagtaataggaaggtaggaatttagtgacttcttgttttatcaatattttcattcagaagagaattttgctaataaggtctgtctgccaaggtatcgtatagctcttctctcccattatattccagtggcaaagaggtccacccgacagtgagacctctctacccgcacacctccacaggtacctccaaccctcatgacccaactaaactcgttgtcccccacactccaaaccccatcttccttccacattccaatctatatcaacagagcatcagctcttccacacgaggagtttcagcatcaccctttactcccccttccaccctccactgtctattaccattctcctgttctgcttctttgactcctttgtcatggcctctgcttgagttcaagctcattatttttcatcagcaccaacagtatcctttttatttcttaactgagttgaaattgacataatattaaccattttaaactgaacatttcaatggcatttagtacaatcacaatattgtgcaactaccacctctatctaattccaacacattattatcaccccaaaagtaaatctatacccattaagtagttacttcctgtttccccctcccccagcctcgggcaactaccaatctgctttctgtctctatagatttacaagataatttgtataaatggaatcatacaatatgtaatctttcatgtcttgcttctttcatataacgtagtgttttctaggctccttcatactgtaacatacgtcagtacctcattcctttttgtggctgaataatattacattggatatatatataccacaatttgtttatccatttatctgctgatggacatttgggttctttccatcttttggttattgtgaataatgctgttattaacatgagtgtacatgtatttgctaagtgcttgcttgcagttcttttaggattacatacctagagatggaattgctaggtcctatatagggtcatcctatacttaactttttgaggaacggccagttttgtacagcaaccaaacaatatattattggtttgtacattattcccaccagcaatgtacaagggttccaatttctccacattttcacttatacttattttctagtttttgattatagctagcctagtgggtgtgaagtggtatccctctgtagtttttacttgtatttccttaatgatgttgagcatcttttcatgcgcttattggtcatttgtatatcttttgggaagaaatttctatttaagtcctttgcctatttttaaattgagttttgttgttcttgttgttactgttgaattataatgattctttatctattctggatactaggcccttatcagatatatgatttacaaatattttctcccatcctataggttgtcttttcactttcttaataatatcatttgatgcaaaaaagtttttaattttgatgaaatccaatttattaaattttttcttgtgttgctcatgcttttggtgttaaattcaacaatctgttgccaaatccaaggctatgaagatttacccctattttcccaagagttttatagttttagctcttgtgtttaagtcattggttcactttttactttttaataatgcttttgtaaatcatctttatgaaagtatacttcatatataataacatttaccaaattttgtgtaagatttgacacattttgacaaatgcataacaatcatttagccaccaccacaaccataatttagaatattttcactactcattaaacattcccttgccttttataatagtcagtaacctctctgaccctggtccctggcaagaattaatttgctttaagtcaatatagctttgttttttctagaatttcatataaatgaaataatatagtacatagtgtttgtgtctggctgtttcatttgtaatacttttgagattcatataagtcatatgtatcagtaattcatttctttttatttccgaatagtatttccattgtaagtttatacaataatttgtttatccaatcccttgtcaatggacttttgtttctaatgtttggcttttgtgaatgaagttgctatgtacatttcataataggcctttttatggacatatgtctttatttctcttgtacaaattgccaagagtggaattgctgaatcatatggtaaatacatgtttaactgttttaaaaaactgccaaactgttttccaaagtgagcatatattttcacttcccatcaggtttagttgtttatgtacaagatttttagatgctctaaatcctcaatatttgttattgtcagtctttttaaaatttgaactatcctagtggtgtgcattgatgtcttttttttttgtattttcagtagagacgggatttcaccatgttgatgtcttatttttaaaattatacttattttttagagcagttttagttttacagaaaaatttcacagaaattacaagttcccatatactcctcttgccttgccccttaaatatttcggagggtgtgaggtaggggtccaactttactattttgcatgtagatatccagttgtcccaggaccatttgttaaaaagactattcttttgctattgaacgatgttggcacccttaacaaaaaatcaattggctataaatatttgggcttatttatttatttgttgagacagagcctcactccattgcccaggctggcatgtagtggcatgatctcagctcactgcaacttctgcctcctgggttccagagattctcctgcctcagcctactgagcagctgggattacaggcatgtaccaacacacctggttaatttttatatttttagtagagctggggtttcaccatgttggccaggctggtcttgaactcctgacctcagatgatctacataccttggcctcccaaagtgctgcaattacaggtgtgagccaccgtgcctggcctgggtttatttttggactttccaattctatttcactagtctgtgtgttctttttatgccagtaccgtgctgttttaattactgtagctttgaaatcaggaagtgtgagtcctccaatattcttctttttcaatattattctagctatttagagccccttgcaattctacgtgaatttgagaatgaacttttctgtttctgaaaaaaaaaagtcattggaattttgatagagattgtattgaatttgtagattgctttgggtagtattccatcttagcaatacagatgctctgcaacttacaacagggttacattctgataaacccatcataacctgaaaatgttgtaagtcagaagtacatttttgacttatgatattttcaacttattacagatttctctggacataaccacattgtaagttgaggagcatactgaatgcgtataactttcacaccatcataaagtcaaaaaacaataagtctaaccattgtaagttggggactatctgtattatcttccaattcatgaacatggaatgtctttccatttatgttgttctttaatttatttcagcaatgttttgttgttttcagtgtacaagtctttcacctccttagatttaaaattctagtgttatattcatttttatattctagattcatttctaggtgtttatattcaattgcatgcaattgtaaatgcaattattttcttaatttctttttcaggttgatcatttccagtggatgaaaaaataaaacatttttttcttttcttttgagatggagtctcaatctgttgccaggctggagtacagtggtgcgatcttggctcacttacaacctccacgtcctgggtacaagcaattctcctgcctcagcctcccgagcagctgggactacaggtgaatgccaccatgcccgggtaatttttgtgtttttagtagagacggggtttcaccatgttggccagtatggtctcgatctcttgacctcatgatccgcccaccttggcctcccaaagtgctgggattacaggtgtgagccaccgtgcccagccacagctgagttttttttagttgttattttatcctgcaacttagctgaagtctagtagctctagtaggattggggttttgtgtgtctgtatatgaatcctttgggattttctataaataggaacatgtcatctgtgaatagagatagttttatgtctttcattccagtttggatgtcttttatttcatttttcttcataattgtctggctagaacttccagtacaatgttgaatagcaatggtaaaagtcagcatccttgtcttgttcctaatcttagggggcaagcttttgatatttcaccattgaatatgatgttaacagtggctgttcataagtgtcctttatcatgttgaagaagttctcttctatttctagttttctgagtgttttttcatgaaagaatgttggattttgtcaaatcttttttccacatcatgaagttttattctcttattctattaatgtggtgtattaaattgattgattttcttatgttggatgattcttgcattcctggaataaatttcactttgtcatagtatataagccttttacatgttctcagatttcttctgtctgtattttgttcaggattttcacttctataatcataagggatattggtttcttcttttattgtctttgtctggcttttggtattagggtaatacagccttatagaataagttaggaagtgtttcctcttcttctatttttcagacgcatttgagaatgattggtattaatttttccttaaatgtctggtagaattcgccagtgaagccagtctaatcacatcttaactaattttcttctttcctgactcatcgccctccagtctattcttccttttatagccatagtgcttttccaaaatatcaatcatctcaagtcacattgctgctataaatcttttaattgtccccaagtctttgctggataaaatgtaaactcctgtttatgaggttcaaggccttttgtgaactgactgtgcttgcctttatgggttattctgctctgttttagaaacccaccaacctcctcatttctcctccgccaacaaacatgcacaccttgcacacactcacacttccattcataaggaattgcttttgatttccagtatgaatcaagctcttttgggcctctgtgtcattgtacactctgtttcttttacatgaaacccattgcccatcttgtatatctggaaaacatttcctcaagtatcacctcctccatgaagtcttcccagacacttctcctccccctagccagagtaacacacctttgcattattcactcattgcaatcttctcagatatttagctcaggtttttccactggtttggagagcataatagacattttaaagacacgcttactccttctgttctccctcctccactgatgttgggcttgaccatctgactggttaatctcatagtgggtagggagagtatactttccttccccatgacattgggcttgatcacataagtgaattgttgtaggcaaatgtatattaatagacaccatgcaagcagagacttaaaatgttctgttcagttggattgccatactgccttgtaaagaacttcccatgggtaactgctgtcctttcagcctgggcaccagaacaaacacacatagggcagacccaagccaaatttagtgagaagccaagtgtagccagtgacacagcttgaaacagagtcatcccttaaagccaagcctagatcaactacctatgattgcatgtgggaattgtttgttatgcagctttattgtataaatagttcactgatacaggggatttttaaaaatacaattactgttttgagagattccaaaaattaaaaaaaactaccaaaaatgctagagcaaatattccacataccaacacacagaattgaccattgttatgctttgccgtgtttgcttaggtctgtttgtttcttttacaaaataaattaaatactatagagagttcctgcaatattattagtagaaccttggagtcagagattctattttgttctgcttcgtatttcagtgactagaacaatgcttgacaatactaagtgctcaatgaaatgttctttgaaagaatgaatgatgaattaatgtaatcagggccagtgagctacatatatgtgaagttgtttggagaacactcatcatatttttctaaagcttttaaaggtatcttagcattttgaaacaatctgaagaaataagaaattctttatttgtaagttttacatctttcttattggtttgtcctatctccatactccatcagcatctttttattgctccaaggtgcattcattataaaggggagattgagagtaacaagtgttaccctcttggggagataaaagtcttaataaaactttcataatgtgaagtgattaggagtagtattttgggatgggaatacaagttatccgtcccatggattgaagtcgtaatatacagaggcttccttcactcaaagtaggagaaactagttaagcacttatgacatgctaggaatgtacatgttatcccatttaactctcaacaattttgtcctgatgggatatttggctctgtgaagtggtttctgcttaatcctgtttgagcctgggaatcaccttctttctctgaggcaggtaagatgaccatctagatgtctttttatctacttaattttcataaattaagtagactcaggcctcaaatggaagtgagaaatcaaatatcttaccacctcatattaaacattctctctattcctttctaattggtgggaatttgagtaaaatgggtgatggaaataagccatttctgagtgtccactatgtgccagaaagacttacttttgtcttttcatgtaattctcacttgctctaactctaccagctttccagtgtcacttccttccctgcacttgatggtgcaaccattttgagctgctgctgtccttcaaacctaccatgtggcttttcactgtcacctttgtgctggtatttctttaacctaaaatgccctgcttgcttcttcaagtgtggatccagagaccaacactatcagcgttaactggagcttgttagaaatgcagaatcacatgccccacctcaggtgctgagtcagaatctgcaatttcagtgatttagatgcagattaaatttgaaaagtatcacttgattctctccttttccaccatgtaactcttcccatccttcaaagcccaacttagctctcacttcctccaggaagcctttagtcccaccaaaaagtaagttagccatttcttcgtgctatttcctttacatgcgtcttctgtctttgctttctctgctaggcagtgagttccttcagttgagaaattgaatcaactctatttctgtgtcctttgcaggcaatcaacctacaatagatatttgttgaatttggtgagtagccattcccatgagggaaactttattatcaccatattgcaaatgcagaaactggagctcatggaggttaaagttgcgttgtgagtgacaaagtcaagatttaaacccaggcctcctgattccaatacccatgttttcatctctatgtcttatggcaattttaagaatttcaggcaatggagaggattaccttaggatattgggatcatctcccgtacataaataatgtcggacagcagctgcccatcctaaagtcagctagtaactaagagtaagagagcaaggccatttgtagagatcgatgctagagaatgatggaatgccttggggaagcaaagaaatcgtttgtgcttttaaaatccatttgcaaagatcactcctaaaaagcgtgtatgtctatatgtgtacagtacctgccctaaaacaatacactcaaaatttgtctaaacaaatgaacaaatgactttgtgcacccataagcgtatccaaatccatgtgtgtatgtacatactttgcatctctgaatatatatatgaacctgtgatgatgtgttccattcccttgctattcaaaatgtggtctgaggaggagtggcattggcatcacctggaaattagtggaaatgaagaaactcaggcaccacctcagacacactgaaccagaacctgcatttttaatcactccaagtgatgtatatgcacatgaaagtttaagaagcactattctaagcaatcccaggtaagccaggacaggctgtcatgtcaggttcaagctcaaaatgctgaaaagctgccagaaagagatgtcttcattacttgcattcactgggctcgttattttattcctctgctcttcacacacctacctgtagacaaagatctaatttaccacttaaaaaagacggagcacacacatgccaacacaagcacatcgagcatgtctgaacctttgttgacactttataaaccagatttttctttaagtcttcttccaccaggatataggcatttttcctaaacatgcagagaaatgtgccttttttgttcagtagagctctttatctgcccctttctgcctccatctaccctttctagctttgttcctttcttgtcctcccacccagctgctcatttagcaagaatataagttttctcttcaatcacctcaattctgccaatttatagaattaatttcttttttcttcactgccttacccctaagaattagatatggatatctgcctccttcagtttttgtttgtgtaaagaaagttgggagtcaattgatatttctaaaattgttaaatactctgaagaaaaaaaaaatacccttttctttccttgaatttttcttaggaaacatgacattggtcagttgcttgaacaccattcctttacctgttctgttgcctgtcccctaccctgggctttctaaagactgtagaagttatactaggttcacatttcctctatctactggagtgacacattctttaaaaaaaaaagaggggcgagggaagggcatttggagcaggctaaagataaccaggggttatttttgaacaatagttcataagaatttatcatttccaaggctctcttcttgaggaactgataaaagtggcccctctgtccttttgctaaagatggtattgaatgatcatatgatgcaggtgataacataatattatacagagtattacaaacagttatatggttgtaaaccagctttgtaaatggctattttgtaaatagaaccacatgtttgaggcacgttggacttttagttgacaaattcaagagtatagaaaatctcttgttctctgcaatcaaattaaatctaagtctgaacacccatctatttatcccggcaggaaatgtaagttaccaagacacccctcagggctctgaaagtgtcttacccagccacagaacatcagggagaaaatcctagccatcacttatctgtccaccctgactatctttaagatacccattatcccaggaacatggtcttttctggtccaattagggcatacgactattctgtggggctgggagctctgtgtccagagcccacctgccctagatttctccttccttctctgacctttttattctaggtgaagtctctccctcttctttctaaataccttcaaatgcacccctcagctgaagatcatttggtttaggcttttacaaaagacaggagatacaattgccttcaaattgttcctgctttctgccctatgaaaatccctgaagcaggaaatatcaagagtccagctacttgcctgacacacatgggaaagggaaagattcagcaagtcacgcccaagttaatatttcagaagagtgtccagactattctctatacaaggaacttgtacctatctcttcatcatccccttctgaccttgctgcagagagaaaaggccatcattctctctagctcatgctccacgaccatcatcaatcagctatctcaagaccccactctggttttatttcattatttttctcctttatctctatctcaactcccaccatcccaagccacccactctaatatattcaatacgcacttcagttgtgagtatttcattgaaatgtctgtgcattttaagcgctttttatttttatgtaatttcaaacatacaacatagcagctaaagcagtacaaggagctaacatgtaccctttatccagaatcaccaatttccattttgcctgatgcaatttataattctctctttctctgtctctcatacacacacacacacacacacacacacacacacacaaatatagaaatgttttgtttgaatctacgttcaaagatgtcacaaaaacttattttatgtgtaaaaaatacatattgcatatattttttcctgacatggccagcctttgttgtgactgtagttggactttgctgatctttattgcactttttaaaatatgttcactatgtttattttcttttttcattttcacaaacatttattgttgctgtatcttccagactagggctcagggatctgagcatctttcattcagagttgtattgaaatcaacagacaaatagcagaatactggaaccaatgagcatgtcctgaaagagtacagttgtcccttgatatccacagggaatttgttccaggacccctgcagataccaaaatctgtggacactcaaatttcttataccaaatggtggactatttgcatataatgtacatatatccttctctatacgttaagtcatttctagattacttataattattagtctgttttcacactgctataaagaactacctaagtctaggtaatttatgaagaaaagaggtttggttgactcatagttctgcagtcttgacaggaaacatgactgggaggcctcaggaaatttacagtcacagtagaaggtggaggggaagtaagcatgtcctaccatagtggagcagaagagagagagtgaagcaggaagtgctacactcagaaaatttctaacaaccagatctcatgagaactcattcactatcataagaatagcaaggggcatgtctgcccccatgattcagtcacctcccaccaggcccctcctccaacacatggggattacaattcaagatgagatttgggtggggatacagagacaaaccatatcaatacctaatacaatatgaaagctataacaataattgttttactgtatttttttttaacttgcactgggcttagtggctcatgcctgtaatcccaggactttgggaggctgaggcaggaagatggcttgaggccaaaagttcaagaccagcctgggcaacatggcaagactctgttaccgcaaaaagttaaaaatttaaaaattagctgggtgtggtgccacgggcctgtggttccagctgcttgggaggatcgcttgagcccaggaggtcatgttcacaccagtgcattccaatttgggtgatagaacaagatactgtctcaaaaaaacaaacaaacaaacaaaaacgtatgtttatggtcatattgttatttttttttctaaatattttcaatctgaagttggttgaatctgaggatgcaggcccacagatatggagggccacctatacagggttaaagccaggataagccacaaaacaaaacaaaagcagaacatggaaaaaaaaaagtctccaacccaaatgagtcaaatgaaaagttggaaccagatttagagataaagcaatcacagaaatggatatgtgtcataataataaagataaacataaatgaatcatctgttttggatgcctactatacgcctggcactttctatccttgtactaaaccctgtaagttgaatatttttgtcttccttttgcagatgaggaaatagaagtgcaaagaagttccacaacttaaccaaactaagaggcaatgtagccacaactcagacacaggtccatctgattccaaatctcattatttcccttcaattccatgttgcacgagatggacaagaagtatagggatgaacatggaagaattcatgtagcagagttcaggcacactggaggatttttttgagattgccatagtttctttggggaaataattatatttaagaggggacatcagaatatatagtcagtatgtctagggagtgttaaaatgaaattatttatatggaacaggaagtaagggagcccaaaaaagctaagctaggctcttagacctggagcctaaatatcacagacctttaaatcagaccattttgtgttcttttggcctaaaccaaccatggtgatcctgtttccacttggctgagattggttattccattaccctcccttagggatgaccatgtgacccagttttagccaacaaaaacttatgggaaacctgctggagttggggcttctgggaaagattttcctacctgataaaaaggagccttcctcccatccttcctgcttaggacactgccatatgagtttgtgacatttggccatggcatccatcttgtaaccctgacgggactgtgaggaagcaaaagcatcctacgaaataatatctgaccattttgcagcctttgcatattgttggtagtttggaaagtacttttacagacctagtttcatttagtgcttaaataactctgtgagctggttaatatgtgtgctctagaaggatccaaaaatctgtagattcaacctaagtgacagcatgatggtagaactaaagttaccaaatgtttccaagtggttttctaactaatcctatatggtgttctgaaattgtttccaatgttgcctaaaatgagctcttcaaagaggctttggtcttcagaccccctaggatgttgcaaggaaaaatcaattaatgttctaaagcgtaggttatgctttgctcaggaaagaatattgaaatggttaaaggcaaaagcaggcaaaactgtaaagagtacataagcacttgttgacacaatttagggaccaattactgaggaaatgccaaaggctccctgccactttagaaactgcttggagtacagaccttaaaaattgtctatcatagatattttattattgttcatttggagaaatttcactatagggtttcaggacaaattcatagcagtgttaaatcactgtacttctaccttccaagtagaaattatttcattctgttaagtcttaatgtaggaatctacaatagtagtaattgtatataattaaattctatagagtggcattctcctagaaattatagcacctataagtaaagtagaataagggagaaatacatttattcagtgcttatcatataccggaaaccatatattacataatctaatttgacttcctcttatgactctccaacatccttatgagataagattatcaataatctataaatgtgaatagatcacaaatttaatgaaacaagtttcagtgtatgataaaccagaatatcatcctaacttattacactttttctatagggaaacaaaacatgcaaacatttagctagtcaatttttaaaattgagtccaataaccttgttttatcccgtacttcaaaaaaacctactatctaaataactaaacaattttaaacaaccttttagttaattattttgaaattgtatagccacagcatttgaaagaatcttaaacaagcgggtaaaatgtatctggtttggaggtatctggtataattatccttctactttgtatttgatgaaagtaattgatgtgagttacctttattaaattatccccaaatcctgtgagttatggattattcacattttacaaatgaggacaaaattcagaaatattagcatgatgccaagattacatagcaagaaaatggtaaaggcaggacccaaatctaagtgtgtcttgctccaacgcccacgtctatctactactccttgctgtaatcacagcatgattttcttttaacagatgatagaaaaaaattcctttgaatttccaaccacaaaatgaactgcttcactggatgtagggtctgttaaataatttttcttaaatgagaattttatgtgtttcttatttttctcccttagggagttgcagaaggagcaagagaaaagatttcactgtgatttccaagtcatgctgcataaatcatgtcccggataaatgccatggcattgcacattgcagtgtctgctacacaagaacactggtagcatcattttgatttagtttttgtttgtttttagaaatggggttctcattgtgttgcccaggctggcctcaaacacctgggttcaggcaatcctcccacctcaggctcccgagtagctgggactacagtcgcacaccactgcacctggcttccctttggtttttaaagtcctatttctacactttgtgatggcctggctgatcaccagttgaaagatcccatcatcctcttcccaccccccaaaagatgagcttaacatcgttatttaaacaggcaagtgtgggcaggtagagtcaagttggacattaatttgggcattagattaagacttgagtttgagtcctgctgctcttctcgtaatgacagaaactttggcaaggttgctcactttctctgagcctcaattccatggtatagaatagtacttcccaaattgtatttcttaaatttccaatccatttgaggaaaaatacttttgtaaaatatatgaattaccaggaaaattaaatagaaaatgtagacatataagatatgcactcatttttttagattattagattcaacaagcagaaaatttctctctaaaagcttctaaacagccacttttaatttctgtatcatctcgctgtggactggaaagaaagagttcacagcctgccacacgtccaggaatcacacttcgaatagcactgatctttaaggataaaagtccctttcttctttgaaaggttgtagttagaattcaatgcataatgtatgtgaaaagcttacaaaactgcctggcacatacaaaacataaggaagtaccacctcttcagtaaaattaaacccagaacctctaaggaattagcacctgtagacagtctcctgggaaaactgggaacaaagtaaagccccctgactaacggcatttgacttcatgccccaactttaccttctcatcaagattttcttccttctttctctctctctcactctcattgccacagtagctctctctctctttctattcccttcctactgccaccaagatactggcctcatagtggtgaaaaattcctgaccatgcagtgtcagaaacatagtactaggaccatcagcaacccagctaacaaagtataaagtcctcgtccttactcaacttgtttgttgtttggttccctaagctctttagaatagagttcttgagccagatttgtggccatctagctctacttgttagttgttattttgtccttagtcaaaggacaaaggtcacttaatattctagctctgggtttcagtttcctgaagtataaaatgagggaaagaaaatgcctgccttatagggttgttatgaagattaaatgagttgacatacatcaagggctgagtatattacctgggacataataagcaacctgctcagttggtgtcagccatcgtcatcatcatcatcatcattaccaaagtgatcacatggaacctcgtgggtccttcactgctcagctcctggtcagtccccacacagcagaagtgtcattctgaatggcctctcagagaaacatcctgctagacaaatgctcctgcccaggagagaccctgccatatcatccaattgacaatggtccatactgtcagattcaatttctacttggggagacactgcttttccctgagtggttggtaccaggaataatctcttttaagtgagaatccttcccctgcctggaagtggcttggccatacaggcctaccagtctgtcttaacacatatccctactgtagctttcatataacatgtaacacaatatacaatatgttttgatatccagaaaccatttcatcactgtaggttttgtattagttatctagtaccataatcatgctgtataacagaccaccacaaatgacacaacaataaacattctttactcatgcatctggaaggcatgctaggagattttgctgatcttgggtcagctaagacattctttttgtcttgtgcagggattggctggttgttgactgacctaggatagtttcagctaggatgactgaggtgacttttgctctactctgtgcgagcagaaggataatgcaaatacatgcttatggctatggtagaggacaagaacaagtggaaacccataagtgcttttcagatctctgtttgccccacatttgttagtatcccattgaccaacccaggtcataaggctgagcccagaataggagtgggatagcactacaaagttaggtgacaatggacataggagtatgatcatgaaatgttagttctaccttccattatcttatatttctgtccaatcatatcagaaaaaccacttgttgattcatacttccaagtcaggactgtctatcaagccaaggtgttattgaatatatactctaggatttcatttttctgtttgtttaaacagactctgtagaatactttttttctcctactaactgaaaatggagcaacagaaaatagattcattttttataattgatatatgaacatttcatgtcataattcctaagatagtttataacttctatggggaccagtcttcatcccatggtattattgtattctcaacaaatgaacttaacatccaaggaataatactaaaattgctacttattagagcttaatgcttttctcataaaacttgcagaattcaaaataagctttcctactggaggcagactctcagggagattttctgtgttaggaatttgatattttcctttcaaataagaaaaagaaaaaacactcacacacctgtattttctctttctgaagttacttcacaactaaatggagtattactatttccatttcttgagggagacaattattttaatttacataaaacttggtgacatcttagacaaagggaaatatgtactccccctgctatcagttaactctccagttagtgactttgtggaaggattcctgaaaaatatcagtgatttcagaaagggttcccttccactttcaggggaaaatcagaacctcctcattcaccttgcaataaaggagctacctggtcatatctgtggttatgcgtggaggggtgatgggggcagtgagaagggaaggggccttgtccagactgcagcttgcttgctgttgctctcagcccattatttgtgctgaataaggtcaggtagaggattccttctgaagatgtgtgaagcaaggccacagaaatatgtaaaggtggtatcatgatgtcctgtagtctctcccactcttccccatatttatgtcactgactcacactcttgcacagacactttatattgcaatccctagtatagctcataactcctattgggaccagtcttcatcccttttgttatgatattctcaacaattggattttgtttgactcaggtcaaaaagccttgagttagtattttaaccaagtcacttacaagctctatgatctttaatatttgaagtaattatgtgaatttcctacaatcccctcttcatcactgctctctctctctgtcttccaactttctaccgccttgcttcttggttcttttcttactactgtagcctcaatcctcacaggcattgcctatccaggagagaaaaagaggcactggaagtagctaaatcttaaattagaaggtggaacttactgtggacatctctgcagaaaagcagtaatgtgtgaggagtgaagagacaccagaagaaaggaagagggagcatggactttcatattgaagagaaagggagtgtggaatttttttgtgctttattggcatgagactcagactttcagagagatagtgagactgaaatgactttggtttttatggaaattatcatttaactttgatcttgagggaatgtcactgagccaagttctgaagtttaggttttgggggagggagtggaggctgtgagacagaagagatgaaaaaggaaaagaatgaaggaaattcttcattctgggaggaagaagtgtgtgtgtgtgtgtgtgtgtgtgtgtgtgtgtgtgtgtgtggcaaaggaggtggcggacgcagaggttagggaattcccttttcctccctggcctcaggaattcaggtttaaaacacaagaagccttagagaagctgaaagaaagctgttcttaattgcctcagttccgtgctagttataaacactggaaagaaaatgggattgaagaatgtctggtagaacagccactgtaaaccttttattatcatatttgtggcttctggggtatgactttaatgccatcttttaagatgttacttaagcaattgtgtttaaatttcaaaaacctatcccaagtatttcttttctcccttcagttaattttccatttatataaatgatttccttgctgcagaaactcatgccttgagatgaatgcacagtttgaatattttcacatttggagcaatctgttaatgacgtaaaataatatatagagaaaaagcagagcattagagggccaaggacctctgtaaatgttctgatgccagctagtcacagctggctgtgtgaccttgggtgaagtccttaacttctctaagtcttaactcctacatgtgcactacatgaatgggaaaggctttccagctctaaatatttgtttcataattggtcttgaggtcaatataacacctaaaacaaagttagtatgaaatacaagtctatccacttcttagagtctgtggaccttatttctataagcaaattaacttctccaaattccaatttcctcatctataaaatggaaattgtaatacagttttgtatctatcttgttagccttgttgtgaggtttgcatgagaaaatgtttgcaaacagtttagcatagtgactggcacttagtaagtgctccaaggatgtaggttaaaaagaaaagaaaacaaaagctgctgtgtttcagagtcaaattactctctgtggcccatgtgggtccctgtgggctccctggtgtgctcagatgaacaatggaaagcagagttagcataacaaagatgatgatgaagattatgatgatgaaaacaaaccaggctctgttcaaagtgctttatttgtatcaactcatttaatctgaatacaaaccctataaggtagataaaattatcctccctattttataggtggggaaaccaagagagtaagcaacttacccaatgccatacctctgggaaagtaaccctctacttccattagtgaagttgaactctgacactgcccctgaagtatgtttttaaaaaagttatttcaaatccaacctttttggtttttcaaggatgctcagaaagttagctgaataaataatgtccaagcctgaatcaacccaaaatttccatgcctgtattttcccacctggtgctaatgaacatgcacaaggagatggcaacatttgtctaatgacattaactaatgctgccccctgcatggtgattatgagtggagctgtgctgtggcttcagcaagcaggtggtggaaattcttaatgaagattgcattcagattacagtgtttggatatatcttatgatgagatttgctaagggctcaaaaccttttccaattggctcacttatcctcagagctaacaggagggcttgatataaagaactggaagcatggaaagaactaaacgtaaattgcatcagagctacccctacattagagactgactctgaatgctaatgaataagcttctgtgatgctctttatgaaagcaaagtgatagggggcaaaatatagactcagaagaccaattctgactaaagagcactggcatagattaagagacacttcatctgttggggaatgagcagtttgctaagaattaaaaaccagtttgttcacttacacatacaagtatgtgtacaagtatgtgtaagtgaaaaactagttgaaggaatggatgaggttatgaaagttaaagaaaatagtgacttgctttctatatttagaagaggaatttattgatgctaatgctgggagctgaactattaaaaaatggtttaataacaatggaacaatttatgatttattccagagaaatagactggagaagaaatattctcattccattctgccttgtatacatcacaaggtcatggtaaatatatatgttaatttttacacatgggtgcagtaaacattttcaaattcaaataaatgtgtatgtgctaagtagaaaaaataagtcaagcagaaaagatcaaacacctaccttagaatttttcagaaattcttccaggcttaagaagaaaaattggtctcacagtaatatcaaaaggcttaaaatttttatttatttgtagtcatctctgttcagctttttcttagtaatttcttctactaattcaattgcttgagaggaaagagttcatattcaaaatttcatactctcagcaattgcattcgcattccactactctgttaattgtatatctactttttgtttgggtttagaagcttattttaaaaccatagtccaacactttcctgtattgatttttccctatagaatgttcaatttgtatttctcattttccaaaagaacagtgagttcaatagtgacatttttattagtgagaatgtggcagattaagcccaactgccctaactctccaaggacaagaatatttaagtgtctagagttgattgtattatttttctctgtttaagatttgaatttctccttaatgataaatattaatttttggtagctttagcttagctacaagaaattattggctctaagatgctaaaatgatctttgtgttcatacccgctaattgttaaacaggaatggctttttatttgaagcaaaatgagttaagttttacaccattattatatgcacacaaatactattatgggcatgcacacacggagttccaactctattattaattattcatgccagtggaagggaagtagagagaaataccacgctagacacaatccaaaacccttaaatacacaaaaatatcctgtttgatttttatttggaactggaacatttaccaaaatgctatatggacgcttaagtatttattaagcacctgctgtatgcggagctctaggtagcaggggacattacagagtataaaagggatgtccggtaaattatgcatctgttgagagatcaagccaatcaaaaggaggaataagctgcacacctgtgatgctacctaaagagaacagggaatataatatcaattcatgtaaaataattaccacaagctaaaaatttcatgccgagccaatgagatgtagggcaggtttcttgggtgaaatatgtctttactcatagttttaaggaatggaggatcattccagtctcaagaagattacacagaggaaagcccaagtaaggccattccttctggttgcaggatgggtcgtggtaaatgactttcccaggtcacaatgtgacagtagcagaacactggctaaaattcctgctttttgatccctcattcagtgaaagcataggttcttggtcatctgtgattggtataaaatagcattttgccatggaattgttttcatagctattttgactatggccacttaagacaaaacaggttaaatcaatttcactgaattgagtcaccgggtggttaaaactacagccataccacgagccagcaacattaaacaacttgctacgcatcacacacaccacgcatattttctcagagcttctatttagctggaatgcatcagtatgatagtgcaagttgttgaaatattaaaacatttctgtactagttggcaaatagttggttctctgatccccactcccatacttttaaccaccacaagacccactcagacttctcctcagtaagaccttataattcagtaactaaaagggacacagccgggccatccaggaccctgcttcagcactgtggcaagcatttgttctgattggccagtgctgcggtctgccttcattctgattggtcagtgctggggtaatgattcattctgattggtcactactggtgttatacaagtggttatggtattacttctaccttttctcttccactcctgtgttcctgttattccctctgcctccaacgctctttctcgtcatttccacctgtgtgtcacagggaactggcttacacgatctacacgatcgtgggagctggttacgcagtctccataaggctgttgtctctacatgtggctggagcttgaactccatggggaagacaggaagagaaaatcaggagtaggctggcacctcaagcaaaaaaaggaccgtgtcccgtctcgttgcttctcaccttactgatgagagtatccttcagaagctgaagccctttatcccagagctaaacacacacttgacctggaagtcagacatgctacagaagaccacaggggaaggtagagcaatggcaggccagctgctgcttcacgccaacaaagtgagttagcagccccacacacctgtgcactaagaaatggccactgcttcccttctccttgggtgggaatctcccttgtgccccacccagcctagaaacatagaagaaagggaattctggggaaggcagttcagtccaaccaagtggacatatggcaaagccatcataccttggtatcaaggcttaggtccagtgccatctcctctctgtatcctttcatttgcccaggcaggaagtccttgttcctcctctgagtcctgaaggccctctatcaaaaccacatagtggcacttagcatgcacctagcattttaaacagtaatggtctgcccactgtatatccaccacttgactgcaactcctttttttattattattattattattttactttaagttttagggtacatgtgcacaatgtgcaggttagttacatatgtatacatgtgccatgctggtgtgctgcacccattaactcgtcatttagcattaggtatatctcctcatgctatccctcccccctccccccaccccacaacagtccccagagtgtgatgttccccttcctgtgtccatgtggtctcattgttcaattctcatctatgaatgagaacatgcggtgtttggttttttgtccttgcgatagtttactgagtatgatgatttccaatttcatccatgtccctacaaaggacatgaactcatcattttttatggctgcatagtattccatggtgtatatgtgccacattttcttaatccagtctatcattgttggacatttgggtggattccaagtctttgctattgtgaatagtgccgctataaacatacgtgtgcatgtgtctttatagcagcatgattcatagtcctttgggtatatacccagtaatgggatggctgggtcaaatggtatttctagttctaggtccccgaggaatcgccacactgacttccacaatggttgaactagtttacagtcccaccaacagtgtaaaagtgttcctatttctccacatcctctccagcagctgttgtttcctgactttttaatgattgtcattctaactggtgtgagatggtatctcactgtggttttgatttgcatttctctgatggccagtgatggtgagcattttttcatgtgttttttggctgcataaatgtcttcttttgagaagtgtctgttcatgtccttcacccacttgttgatggggttgtttgtttttttcttgtaaatttgtttgagttcattgtagattctggatattagccctttgtcagatgagtaggttgcgaaaattttctcccattttgtaggttgcctgttcactctgatggtagtttcttttgctgtgcagaagctctttagtttaatgagatcccatttgtcaattttggcttttgttgccattgcttttggtgttttagacacgacgtccttacccatgcctatgtcctgaatggtattgcctaggttttcttctagggtttttatggttttaggtctaacatgtaagtctttaatccatcttgaattaatttgtatataaggtgtaaggaagggatccagtttcagctttctacatatggctagccagttttcccagcaccatttattaaatagggaatcctttccccatttcttgtttttgtcaggtttgtcaaagatcagatagttgtagatatgcggcgttatttctgagggcttaggtattgatgggacgtatctcaaaataataagagctatctatgaaaaacccacagccaatatcatactgaatgggcaaaaactggaagcattccctttgaaaactggcacaagacagggatgccctctatcaccactcctattcaacatagtgttggaagttctggccagggcagttaggcaggagaaggaaataaagggtattcaattaggaaaagaggaagtcaaattgtccctgtttgcagacaacatgattgtatatctagaaaaccccatagtctcagcccaaaatctccttaagctgataagcagcttcagcaaagtctcaggttcaaaatcaatgtacaaaaatcacaagcattcttatacaccaataacagacagagagccaaatcatgagtgaactcccattcacaattgcttcaaagagaataaaatacttaggaatccaacttacaagggacgggaaggacctcttcaaggagaactacaaaccactgctcaatgaaataaaagaggatacaaacaaatggaagaacattccatgctcatgggtaggaagaatcaatattgtgaaaatggccatattgcccaaggtaatttatagattcaatgccatccccatcaggctaccaatgactttcttcacagaattggaaaaaactactttaaagttcatatggaaccaaaaagagcccgcatcgccaagtcaatcctaagctaaaagaacaaagctggaggcatcacgctacctgacttcaaactatactacaaggctacagtaaccaaaacagcatggtactgctacaaaaacagagatatagatcaatggaacagaacagagcaactccttaaagtgaggatttgaagacagtcacactgcccaacacataatgagcagtccataaaagttcatggaatgaatgagagaataaatgaatcattaactgactgacctaacacagatggtgtgggaagcaagattcaagggtgatatattagctatctattactgtataacaattatccccaaacatagcagcttaaaacaacatatattatctcatagtttctgagagtcaagaatctaggagtggtttatctgggtggttctggttcagggtatctgttggctgggactacattcttttgaagagtctggaggatcagtttccaagttcacttccctgactgtaggtgggaggctttagtttttcatcacatgggcttcccatggcgctgctcacaacatggcagctaccttccctcagagtaagctccagaagagagaggcgaagccatattacctcttatgacatagtctctaagtcatacactgtcatttccactttatcctattagttagaaatgagttacttagtccaatccacacttgacaggaagagagtattacacagagcatgaataccaggaagtattgggggcatcttagaggttacctggcacaggtggcaagaaggaaggctttagggagtgtggggccatgccatagagttctttagctaacctccaaaggatgaaacttactttccactacttaatatgtagagttctttcctttattcatttttttgttaagtctacttattggaaagaaaaaaaaggcttttaaccccatgccaaagattgggttttgtggaaatactgtcaaaaacaaagagagggaatccagttttggatctaacctttctttactaaaaatattttcctttgctgcagccaagtttgatttggcctcttgaagataccagtgagtaaaatagagtaattctgatttctttttttttattattattatactttaagttttagggtacgtgtgcacaacgtgcaggtttgttacatatgtattatttctctctctctctctctctctctctcccctttcttctgtctctctctcctttcttctgtctctctctcctttcttctctttctcctttcttctctctttctcctttctctcactcacacacacacacacacacacacacacacccacccctctaatcctgaatttgtcccatcaaaatatatattgtcacctagtctagggcattccagagtagctctaagtagttgggcaataataatagatatatttgctgaatagatgatatagccaataatttattgagcacttactacacaccaggcattgtgctcagagctttacatatgttatcacacttaatgctcacgacaaccctgtgaagtaaatactactgtttcctcattttttacacaggagtaaaccacagcttggagattatgtgatttgcctaagatcacacagctagtttgtgacagggcccagcattctgcattcctaaccacctcattacactgctgtcaccatacatctgtgggacacactaagtactagagtaggtgtgtatgtttgtcgctcactcttctcagcatccctttgaggtatgtattattacccccattttatgggtgagaaactgaagttcaaagaaattattatttgctttagcccacacaatagcagcccaaggttccagtctcacaagggaatcaaaattccattctcttcctactaattttattgccttccacctcattggtttccaaactgcagctcattacacacgaatgcacagtgaagtcaattataagtgggtcccaaacagcatttaaagaaatagaatagaatagaatggaagggaagggaaggaaagaaaagtaaatggaagggaacagaatggaaaatatcatgcgtcacacatagtggcagtaagcattgctcagtaaaagttttatttcagttatgtacatacgtatgtgtggttatgtgtgagtgtgtgtgtgtatgtgtgtgttaggatataaaatgcatttcttactttggttggcatcaagaaacaatgaaatgctcctgctctagccactccttctgtcctcaaggtcactgccaatagcttatcctcaacggacacactttctgcaggcctttgcaatttagaaaagggtagttgtaattcttggtgtgcttccttgagccttttctatgaaaatataattattaaagaaaagcatatccaattggttacccttatcccaacttactaggtgtataaactttttccctttctaagggtagcctccctgaattttactttctccatttttaaagtgggataatcacgtgctcacttgttgttgcaaggattgagtgagatcgtgtaaacttcttaacacactacccagcacagtaatcattcagtgagtaccagcaattgttaagttatctgcatagactagaggaatcttaaataagagtcttgtgtttgaggaaataagagggtgaaagggggagtgttattttctagttttgaatccttcaacaccatgaaaagataaaataacataactaggtctgcattctttcagttcatttattcaccagacacttatcaaatgcctagtatgtgccaaggaatgggctaatttacagtgatacagtaagagttttcaaaaggtaggaaccaaatttatagacactgctaaaggttgggttatattagaagagtaaagtgataaatcaccgtggcaccttattttatgattgtagacaagagtgatcatcgcttgactcttatacataagctctgtcaaatgaacttcagtgataatagcctcattttttaaagccatgtccatctggcatctgattgattgaatctgattgaatccatttttgtagcttggttctttctctctgcatgccacaattgggaggattgattttatttgtacattgtcttttcttctttccaattcccaggtccctctttttctctcccaccttctccctcatcactgattcttctcctatgttctgccaattatctctagccttaatctacggtactcacatcttgttcctgtacacatttacagtgagagatgggttagcgaaaagcaaagtgtggatcttagggaaaaaaggccatagaacaccagaacactggttgctatagctttgctttttttggcaggggatgggggacttgctacacaaaaattgttcagacttagggtgcatgtggataatttaacactacatcccaaagaatcatgtattaaagcagggcctcaaaaatgatggttggatttaattgaatataaaaatgatattttaccttgcgtttattaaaaagtcacaaacagtaatttttgcatttgtgtgcccctttaaatctcacacagtatttttacatgccttgtcttttatttcacacatttatattatgcctccatgattcataaaaccaatgagaacaaagactatttgatgttccaagaaccccatgaaatagacagagcaggtatttgatcctcatttttcagacaaagaaacagcctcagagagattgtgtcttgttcagtgtcacttagctagtaaagaggaaagttaacactggaatcctagacttgcacagcacgtgctcgccgatctgcacccgaggttcagacctgcctggagtacagtacagtgccgtgcacaccgtggcttgggtcctgactgcaccataaagcctctgtctgtactgtggagcttgggttgcaggaatccccatggtggcaaagaaacagacctctgtgtggactttaccagggaagccttgctaatttgcaacagctgggtggtgttcctcgttagtatctgtcagcataattgtcacatcatttcactgtggtggcaggcactcagctctaaatcacctggatcctagtttttcagtggcttcaagacaacgaggagagccggctcttaagcctaggggttccctaggcaagatatccctccccacgagtctgtaactgccaggctatgaggatgccctcaaagaccctacacattgattcctcttccctagccatgagcagcattccctggaaacaagttatttcagtaccttggtggaataagaggggactgtgtgtcccccctaccatgatcctatggccactgacagtatggacaagatcctggtggtgaaggatagagctaccattgtcatcatgaattattacaaaacacacaggacagcattcagtattttgagcaacaaacaaggccgaatgatgctggctacacaccccacgaagttcctcccaccaaggagatcaagaacctttgagtgacagaagcattccacaaaccaaacgggaagaaataacgaagaaagagaggccgcttgaatgaccctgtccactccaagcagcaccccgactctttccctaagcaaaaaccgagactggttcacttctggttcttctacagccttatctggtccaaattccagcaaagtccagtttcagaaatggggataaagacagactcatcagataaatggagcagttttgaacaaagacccccatacttccacccccacctcaggagtctgcttcaggaggctttgtcacctgggctacaaaggagcacagtggcccttcccagtggaactgacctatgctcaggttatatccaggccaactgaatggctgtgaatccagcaaccttcaagccacccaagatgaacattccagagatagaaggacagaaacgattgccacagaccacaatctcaaacttgaatgtgcttgaacctgctggattctagagctctttctattacagggattctggatatagagtgttttgctcgctactcctttttcatcttagcgctgacctaggaaaggtatttttttttaaaaattgttaaactgaggctagatctagagacacaactggctttgagaagcatgagtacaaagtttgtctttattgtatggaagaagtcatttgtactgctttaatttaaagtcagactaaataacctcagcagtaatgtattatatttcgtatcatttactctagacaagaacgtttatcactgcttattaggtaaatgatgttgtcttagtcagttcaggctgttacaacaaaataccgtagactggatggcttataaacatcagaaatttatttctcacagtccggaggctgggaagtccaagaccaagcctccacagatgcagtgtctggtgagggcctacttcctggtgtatagacagctatctttttgctgtgtcctcacatgacaaaaggtacgagagaggtctattttataagggcaccaatcccattcatgagggctatgccttcatgactgatatggtttggctgtgtctccacccaaatctcatctctaattgtaattcctacaatttccatgtgtcatgggaggaatctggtgggaggtaattgaatcatggaggcgggtctttcccatgctgttctcgtgatagtgaataagtctgatgagatctgatggttttaaaaacgggagtttcccttcacaagctctctctcttgcctgctgccatacagtaagatgtcacttgctcctccttgccttccatcacaattgtgaggcctccccagccacgtggaactgtaagtccattaaacctctttttcttcccagtctcggatatgtctttatcagcgtgaaaacagactaatacaatgacctaatcacaaccaaaaagccaccgctgctaagtaccattacactggtgattaggtttcaacacaggaatgtcagggggacacaaatattttgctataacaaatgtgtaagttgttccaaaacccaggcttcttgatgcctgtagcgctatcattgtgagcattaacaaattatggagcagagatgttcactgactagtttagacaactttggccctcttgaccctgtgaaggtactatgttctggccttgtcagttagggggacctaggatctgtttgagatctggctacaactaaaagctaaacgtagagcgtagcagggaatcctcatctttgctgaaactggactctcctctccctgccttgttagtagacctaagggatcactttgtcctgcagccagttcttaatgtggtacctctagggctagtgctgttggagaaatgcttctgttttatgcattacacagagcaaacactgggcttacctattctttcttgtattttacagtgagattaatttaattccaacttggttgaaaattttgtaagggagaaaatttagtgtactggtttggtacagataaaaggaagctaaagttttttttaagaaaagaagatagtaactatagttatagtcttgaggttcatgtgaaactagtgttatcctgattgatttccttgctcatctgagggcttaaaacctttttttgggagaggatggaggaaattagaatttttctatagaaaagcatttttccccaaaagcagacccatacctttatatgctcacatagcttattgaggaaagaaaataggaatctacatttttatttttacatattacatatgtattcagtcattgtcttgaacactgcctcaaatacctgttgtttttattttggatagtatcttgtctacaaaagtagctgacctttccatagagagatcttagagtctaaaattatcaagacaacttatctgtgtcttcttttatgcttgtatctctcacttgttttggcaacaaaaacccttactaacatctcaataaaaaaggaaaacaaaaaaaaaaaaaacctgagaatttctactcatatcctagttttttattcactctaccatatttactacctgtaaacaaaatttttttgttgaatctttacatcactccaacatgaatagtatcacctttctcttatggaataataactttatctctttaaatctaagaccccattacttataaagatacatcattatgttatgtgccaccacacaggaaacaattacctaatccaattaaactatgatatatcattaattgtgggacacatcctaatttcagaaagagcataatataaagatatttgtatcttagaattgattaaagtggctaaatcaaaaatgtagagaaataaaataatttttaccagaattagaattgagtatatagttaaaaaactaaaaaaaaatggcagcctcctctttttcctgtaaaagaaaagatggcattaccatctacatacataattttaagttccttagatgtcagtttgctgatttaaatggtaattgttaacccacaggattgttggttgttactggttccagattctcttcttatagatgtgggcagaagaggataacttctccagtaaagaggcaacaacactgcacctctcagaagaatgtagggaaggcttcctcactgaaagatgttcctcagagttaggcattgtgtgaaaaataagacctggttatgctattttccctagagaaggggttgcaatcttgagggaaatgtttcagtattcttagaactagaggtggatataatatggactctctagatttaaaaaaaaaaaatctggcggaagatgttttattggctaatacatgcatagtcccactatatttgcaaaatcaatgatttccaatctttcctggggaaacatgcctccctgtttatctgggatagcctatgtttatgtctattttcccaattactattggtaccattccctttcagtctcagaaagatcctggttaagactgtaaattacttggttacattgtcttacttcctccttatccagcattagtgtttgagttgccttgggtttttggctaacctctcatctgcatacattatcttatttccatagctagatccttctctctcaagttgcagtagaggtatccccaggactctgctatgatatctcagggaatacaaggatccataaaataaatatagggaaatttataaagtgtaaaatcatgtttaaatacaaatgtatcatttaatagaggaaaaacttcagatgaatcttaaagatttaacatatttaaactttcaaggaaatttggatctcaggagctttcttcttttttaccctagacccatagttcccaaactgtgctgaggcacctcagggaactacggtgaactaatggggcatcatgggatacttttttttttttaggaaaaagtagagatattcaatatcaataggacagtgtgaaaactactagctcaggataatattttcagtattagattatactacatttcttttgataacatcatatctttgataagctgggtttttagcagttgccatgaaaaaaagcaactaatgcatgaaaataaatgtaaaacaaataggcagtatgtgagtccaaagttttaaaagttgttcagtgcctaacaggtgtatatcccattaataagtaattgtagttatttaagacttgaatataaatatttgtattgttatttaatggctacttgttattaggaaataaaaattaaatgattttggacctatctacttaataaatggaattttgtaggtttcttttgatctgaggtgccttgagaaaactgagacactaggttttccatgaacataaaaacgtctgagaatatctgccctatgtcatgaaaagtacttattcaatctttcctgccatttggtataactttatggaaacgtttgagaggcagagtactagataataatatccttaagcacagagaactacatgtgtgtttctcagatctgccatgatatctagctgaacacattgaaaactatagttgttaaatatttttccttgttttgtttcccatatgttttcatgtgcttctaagatcaattctcacttactaacttagagctgtgcaggagaaggaatatcaatacaatagagaatggacaaacaacagaaaaaatattctttgggaaaaatcaatgaaatcgttacgcttatagtcataccaatctaaaagaacagggaagacacaaattaccaatgtcaagaatgaaagaggggacaagatacagatgctaaatacattaaatgctaaaaacattaaagggataataaggcaatgttatgaataataaattggcaacttggatgaaatgacccaagtatttgatccagtatttgaaaaataaaactttcaaaaactgacccaagaagaaatagagaatgttaatagccttatactactttaaaaaataaatttgtaattataaaccttatcaaacatatatttttaaaaatccagacccagatggcttcatgagtaaaagtttaccaaacatttaaggaagaactaatactagtcttatacaaattctttcagaaaacagaggtgtagaaaatacttcccaactaatattataaagccagtattacccttgtactgaatatagacaaagaaacacaagaaaactacagacgattgcacctcatgaacactggcaaaaaaaaaaaaaaaaatgcttggcaaatattagccaaccaaacccaacaatgtatatgagataatatgtcacaagaaagaaacaaaaatatgtgattatcttgttagatataaaaaagccattaggcaaagttatatctcaggtatgataaaaactctgaggaaatcgggaatgaaatggaatttactagtctgattaagggcactttcaagataaaaccagacagacaatagtgacaaaaaactacagctaagatacacagtggtgaatgcctcgatgctttatatctaagatctagaaaaattgaaggatatccactctcaaaacttgaactataggtcataaccagtgcaataaggcaagagaaatgaataaaagccttgcatattggaaaagaaaatataaaactgttttatttgcagacaacatatttatgtatgaagagaatgcttaaggaatctaaagctactgaagacaaatgaatttggtaaggatacaggatacaacatcaatatacaaaaatcaattgtttctatataccatcaataaataatttagaaattaagatttaaaagcaactccatttataatagcatcaaaaataaaatacttgggaataaatttaacaaaattctgcaagacttgcacacttaactacaaaacattgccaaaggaaattaaatacctacataaatggagataaatcatgctcatggattagaaaactcaacattgtaaaaatgtcagttctccttaaattgatccatagattcattgtaaccccaattaaaatccttgtgaggttgtaagagatgaaattgatgagaaaattctaaaatttatatcaaatggtaaaggaacgagaataatcatgacaattttgtgaaagactaagtttggaggatttatactacctaatttcttgatttacaaagccacaataatccagattctgtgatattgttttaagtataaatataaaaatcagtggaacagaatagacttcagacataaatctttttatggccaattaacaaggcaattcaatggaaaaacgatagtgtcttttaacaaactgcaccagacaccggatatctatatagaaaaaaaaaataaatcttgaccttacctcaaacattacacaaaaattaattcaaaatgtgccatagacctaaatataagaactaaaactgtaaatattctagagaaaaaagggggaaaatatcctttgtgacattaggttaagcaaatatttcttagaacatatatacgtacgaacactaagccataaaagaaacaattggtaagttggactttgtaaaaataaaaaacttttcctcttctaaagacactgttaagaaaatgagaagctaagtcacaggtttgaaaaaaatatccagaatatgttaaaacacacacacacacacacacacacacacacacacacaacttaagaaaaacaacaatacaatcttaaagaaattggtggaagatttggacacttccccaaaagttctatgaagtaagttcccattatggccaaacctcttaatgatgaagtgatacttcctggcgggaactcatcaaaggcctgatggaggagccccttacctgctcttcagcaatgtgtaagatcatccagagaacttaactggagaacatcccagctctacagttggtagaacctttgatgtcagatgtgcttctgacttgctttggaatacagatttcctgtggtcacaaagtctctccattttgcaaaaacctttctggccctggacagattttatagtaaccacaatctcataggctccgggatgtttcaatctatttttcacttccttttgttatgatgtttacattttccaagctagtaattaggaaacatagtctgagccacaacctgataatgaaatctaaacttgatggatactccccatctccagaccacttcccacacttgcagtagaatatgaacttcatgaggggggtgatttttgtcagttttctttactgatacatcccaagtacctaggaaaatgcctgacacataagtatatgcttaataaatgttcatcgaatatgaatacatgttactgcaaaggttatcctgaaagtgccaagatacgtggttgttataagacttgacacaatttctacccttctccaaatcttcacccagacctattattttaacagtggatggatttattaaaatgttagtttgcagatttcctgtggttacaaagtctctctattatgcaaaaaccttgctggccctggacagattttataataaatctgtaagtctgacagctttatcagagaccaaatagcttaaacaagatagaagtttttttgtaataaaaataatagcaaactcttctatagctttataccaactgatagctttatatatttacttatattacctgatataattcttacaacaaccctataaggaagatattattaatatccttaatttacagataagaaagctgagccacatagaattttaataatttgcccaaagagacacaactaattaagtcacagatttggatttgaacccaggctctggcaccagaatctatccttttaaccactatacccatgctcgtcaacttccaatgtgcatatgaattgtcaggagatgttttttaaatgcgaattatacaattcagtggatgggtctgggattctgcatttctaataagttcccgggtgccgctgctggtctaaacaccacactcgattagcaaggcactccgtgaaaccacctctttcataaacatgcagactggtaggcagtccagggttgtgggatagtgtcattccacaaggtgatccatgatccaagtgtcttctttcttttcactatccactaggtgttgttctaatccacatggtcagtaatgaaccaccaccatgtctatgttccagtccttgggaaggggaaaagagaaagtgaagagcaagcagcttccttttgaggacatgacccttctgtacactactcattagccaaacttagtcatgagatcacacctagctgcaaggaaggctgggaaatgcagtctccactggacagccactcagataaaactcaggagattctattgcttaagtgattttttttcaaatggaagaatatagattggtgaggcaactaccagtctccaacacagtagacttgaaagcctttgactatttcatcacattttgttatgtatttcttgttagtatgatcacatacatttccctctatcttcttttgctggcctgcacatgagttccttcatatctaggaaaaatcgttgcaccactgtcatccccttaatttgattcctccaaagattggattaaatggaaggtgggggccaggcgcagtggctcatgcctgtaatcccagcactttgggaggccgaggcgtgcagatcacctgagatcgggagttcaagaccatcctggccaacatggtgaaaccgcgtctctactaaaaatataaaaattagccaggcatggtggcaggtgcatgtaatcccagcttctcaggaggctgaggcaggagaatcacttgaactcagggggcagaggttgcagtgagctgagatggcaccactgcactccagcctaggcaacagagtaagactccgtctcaaaaataaaattaattaaataaataaataaatggaaggtggggagccaatttttgcataccccaaagagagttagtagtttaggatgaataaacaataaacattttaaatctctgagaccccaccttttgttagctctgttttcattttttttttttttttttttttgagacggagtctcgttctgttgcccaggcgggagtgctgtggcgcgatctccgctcactgcaagctccgccttccgggttcacgccattctcctgcctcagcctcccgagtagctgggactacaggcgcccgccactgcgcccggctaattttttgtatttttagtagagacggggtttcaccgtggtctcgatctcctgacctcgtgatccgcccgcctcggcctcccaaagtgctgggattacaggcgtgagccaccgcgcccggcccgttagctctgttttcttaacagtcaatctattcttcaatctctaccagatccttaaagaaattcaatgaagttggaaatactgttctcacatatatttattttacttaaaattttcgtttttctctaactggaaatgttgataagcagcttttgtttgttatctttattacaaccagagaagtccccaaagaaaatattgtgaagataattcattctaagtagatgtgatttgaatcagctttaggcaaagactgggagcctgccttcatttttattggaacatcttggcctaaacctagcaactcagagacatttggattaggcaactcacacaatacacttatccttccagcagtcacagatgagttggctggaagtaaagaatattgcaaggaactgtggtagtttaatacatccagtcacttgtgcaggttataagaaagggcttaagagtcccgcattccacttctggaacttggatttctttttaagaattttatcttgacagctgggaaatatgtttgagatgattgctctgttacaggcttttgaattaagcacaaaagcaaaagataaccaaagaagaaacaaagaggcaattagggtgagacagaaattattattgctgtggcctggcaccaaagcctataaactttggctttctacaatgggttgctctgtaaaatctatccaacaaagtgtattgaaatacattgaactaatttctttctttctttctttctttctttctttctttctttctttttttttttttttttttttgagacagagtctcgctgtgaccctcaagctggagtgcagtggcatgatctcagctcactgcaagctctgcctcccaggttcacgccattctcctgcctcagcctcccgagtagctgagactacaggtgcccgccaccatgcccggctaattcttttttatttttagtacagacagggtttcaccgtgttagccaggatggtctcaatctcttgacctcatgatgtgcccacctcggcctcccaaagtgctggggttacaggtgtgagccaccacacccggccgaactaatttcttttcttgttttctttccttccttcctgccttcctgcctttctttctttcccttccttccttctttctttccttccttccttcctccttccttccttcccttctttcttcttccttccttccttccttctttccttccttccttccttccggcagccacagtgcagcctacttttggataaacctgagagttgtttctaataattttggctttcaaaagatggcacctgtctgtatccagacagaggttgtagctattgaatgggccttggcagacagcacagccaatccatttgttttagctttctcaataatcagtgagtatcactgcaggctcagttggtctggctgattgattgtaaagacagccaaaatgaacagctcgaccatctcacagtctgatttccctgccatgtattgacccagtccaagttacttatgttacagtatttgcaaagctgtcactgttataaaacacttactgggagcttgctattgacaggggttttatgacaacctagaaaccaaactagccctggcttgtttgagttttgaattttttttacattagaagaaagctatttattagacatccacacattcacacaaacatagcagtaacaacaatgagaaaacagctctttctgagaattctctttgatgtgattaactgggcagaaactgagaatgaaagcagatagagaacaatctttgtgttttgtgtgtgtgttgttttctttcttttaatctgcctttattttaaaaatctcagaatgtgtggagtggggaccaaatccctgggccctttcttatctgagaagaggaagtgctggcatctgctggtataggcaggcactgtgcttaagcacaggttgtctcattaactcaggagatgacctggtctgtctggaaactgtctgcatttcagactccttagctgatttacggttaaggcaaaatgggtcgtttgaaattgtggagccagcggtttgctttcattcgtctttaaagccttcagttgaattcaggacagatcagagatctctccttgcactaaataaacttctaatgatactgattgagctcctcagatgggacactatgggaatgtgggaaactcaaggcccattaagtcactgagcacacttagttgaaattatgatactctggtcacccatggctaaatgaagaccagaggtttaatgagtttaccaggttaaaaatgtgcccgtgtcaggcaggaatcagactcattaattagggctccacttaattattgagcagttttacttaccagcagtccttgggggtgagctgggggatggacttagtgatagggatggccgcctttgctcatggccaattatgaaccattcaatgagggttaaaaaggggcagggagtagcgagcaaagaaattttaccagtttttgccattgaccacaataaacttgaacatttctaaagtcctagcagttttacttttgaaactgattgggaccttgggtgacaatcttctctactgtatttgagatgattcccagaccacagacaatccctaaactgccagtctacttctaaagctacagctgatgtggaataggaacttggcagcctcctttggaaaagatggagtttccttggtgcccaagtccctgagggatatatggataaaaccagtttattcacactgtaatgggaagaaacctccattttaattatcagcagctagttgagaattgggaactcaaagtgtgggctttggggagatcttggctctgcctcttgctgtgagatccttgagtctccaattcttcatctgtaaattaggggtggtcactcctaattcaaaggagtatcgtgaggattccatgtgatgatatagtaaggtacttagtgtctggcatttactaagcatgccacaagcaaaggtaattgctgtggtctaccctgaatagcaaagggagaattaccccttttcacttctggtttcaactgtggaaattaatgaacatggaaaaggggaaaggaaagataaatgcaaaatgcattggggcattaagtctagtgaacagctgcaggaactgggtaattgtttttacacgaaaggagtccatttccacaggcgtgctgtgcccttccctgctcaatcttttatgttctctctctcccctccctccctccttccttttcccctccccttccctgctaaggagggagtgtatattcctccacctgcttttgtgctagaagagcctggtcctgctcatattttctttataaaacaaaggcatcttgtccctgattcaggaaaatcacaaataaaattgtcccagccgagtctggattttaatgtcttttatgctcgtataggacacctcaatgctgtggtgaccatgctagtgttctgattttgctgtccggattctttaattcaaagaaaagcagatgagatgtgtatgatgtgactgatcaagaccactctgtatgcacaaaagagatgtgtgaagaccagttcatccaaattagagagagattactgataagatacatacagggtgaatcaaacagaagttaggcacctttttcttcaaatagaaatctgactcttttaagtccagcaatttagaatggtcctttttttcctgtaactatcaaataaatacagtctcacacaaacacacatcatgaacagattaacgaagacaaatctaagtgacaaaaggcttcttaagttccaattcacctccagcctcttggcacctgcatgcgcattatactggaatgaacatcatgcctcatggtttaatagaaacaaagggatactgaagcttcagaaaggcaccgtcccatatgggatgttgcaaaggggtaagactggtggaaaatggcgtttacgtcttgaaataccttcctgacaatgagaagaggatcctattattaactaaaatttctttcaaacctatattaaaccattatttcttagttgtacttgttttgataagtcaaattcatttcttttcacatcctgcatccttccttttttttttttttttttactactacttttattctagattcagggggtatatgtgcaggtttgttacctgggtatattgcatgatgttgaggtttgggctataaattgatactacctctcagaattcttctgaatcatttgctgacattgtaagtggcttttaaactttgattttgccgtttttgagactgtttctactaagactttttgctggaaaaatttgagctgctttgattacttaaagaaggtctttcacttacctttgctttttaaagttgagttggacctaggtgctgagcattgtacccaaacgttagtttttcaaccattcctcccctccctcccctgcctagtagtcctcagcatctgttgttgccatctttatgtccatgattacccaatgtttagcttccacttataagtgagaacatacagtatttggttttctgttcttgcattaatttgcttatattcctcctttgaatcatctaatgtttaaattggtagaaaaatgtggtgttcaaattatgctccttgagagcagggatattttaaaaatcatttttctattcccaacttctaactcagtgtcttacattgagtagaatattaaccacatttttgatgaatgaatgaagagataagttggagtagctttcaagtattagtgaagagaaaaggctaaatagctttaactttttaaaaataaaaggtagcatctttcttatttgagacactgatgaaacttagaatgttgaaaataataccattctgtgtcttgggtcagaaatacagatagattagcagaacattagctgcaaagtgctctcctaattattttagagaagagacacaaatgcactcttgagttttcttttagtatgattcttgctagcaactaatagtgcattttgggcagttgcagggctcaaaagcagtatatatactgtaaaacaattttaaaaagccttgaattatagtaaaaagagaactaatgaaaagggacctaagaaatataatgaaaataaatagttcttcctcttccaacttccctccagggagcaggttatgaaagatcgctagaatagtagaatagtggaataaaattattccagggtagaaagtaattaggggtgagtacatgaaagcccaggtttaattgttctttttaatacagtgaaaaaagtcattcatcatacaactttaaatgagtgtcccattaatggagtattcccccaatggaatattataaattaatatttttatatgtcctgtaattattctctgagtagcacatttgtagggcactgcacttagaggtatgcattaaaagcattatcaggtaaatgtcatcatttaaaatataccaaaattgttaatattgcatttaagcacttattttttaatattctaagaccctcatgcagatcaacaataatttcttcagcttctgaaaggatctatttcttgctctaatcacttcactccctgatagagatttctaggtttctctagaatgttcattcggggtcattctttggatctaaccagtggaggagatagtgaattttgtttacaacttcaagtctttgttggctcatcggcgcctgtaggctacacaataaacatccacgacttccctgccttcattatggcagcaaaatgtgctttactttctcttacactaaattcttctagagtaagtagggactttgtgaggcacatgacatcttcctgggcacagtgccacgtagacataaatggtggccttaggatacttttgaagatctgattataaatatcttcttgctgctaaatactcatctgagatggcaattgtgttcgctaggttaaattaagaatgcgatgcgctgtttcaccatgttaagctgtctttttctttccctaagaaattcccatattcttctgcagttagtataaatgtacccaccacctggattgtgacttgaaatgaagtttcctttcaaattcatcctagaggaaatgtgacctcgatatcacctggacataagtcctgaatcagacactgattctccatgtgaccttggacaagttattcaccctctctaaacttcagtttcctcatctgtaaaatggcaatgataatagtacttgaatctttagtacttgaatctttgagacttattgggagaatcataagttaatgttcacaacgtgtttagcatggatgcagtcacttataaatgcattctcggggtttagaattatttcttccccagctctgctgttgaaaattactaaacaagatatttactcttactgagtttcagtttctcagagggttgacaaaatgagataaaatatgcataaggcttggaaaattattcagggctatgtgaaggcttgcaaaatgccaaccaaagtgaagagtcagagtagtaaataaaacataatgtaagattttttaagtccctaaagtaattattcattgtctaaaatccctacattttcatattttatcttttgagggaaatccttattgtatacataaatatgcatatgtatacatgcacatacacaggccacaaagtatcccttgtgggattaaacttcctagtactgattccttatagtattttcttgtgtttatcatgcatttaatggaatggaaacagaacggtctggcagacacattcatctaataatccagtatcgtgttatttacaatatctctagtaattttattaaaaagttatttgtcatgtgcttctagtaaatgtggaattacaaatactacattgatgggcattttagcccacatgtgtttagaagaggtaaagccaccctcgtttctacaactctctctttctctctctctctctctctcacacacacacacacacacacacacacacacacactcccagtcctctacaaaaactggtaaataaatctggtggctttcaaaagcaggtgctttttggtagtgggtggaggtggagtttgaatatgtgatgtttttatattaactcaattactaaagtaggctttgagaaagacagagaaaaaagttaagaccagacaaaatggaaccccataaagggttgtgtcatcaagcttggagtcagctcatcaacactaaacatgctgatgaattggaaaatcagagaagaaggcttcaagtttcagtctcaagggatgggttggccttggagatttattttcagattttttttatttgtctctactccatagtaaaacttgggtgggcaaaattctccccattccagggaccccatatagactgttgtagaattttatgggactgatactctgttcttttttagagggccatttatgaccagtgtctttcctcctctcagccagtgtacatcagtctctaaatcttcctcccccaacctttgaagatttatggcagctttcagccaggcttggcttaaagccattgacctctgtggcctgcgttattgaccagaacacagcatcttctgcccacataatatatgtctctttatctccctgaaaggaaaggaaatgactcttggaatggccaggaatacaataaaaatgagagagcctttcccattttgttgtcagtggcgtttggctttacaaaaagccacactgaaatcagcatgtgcattcagcagtgctttgaactgtgcattgagagggcacccttgggagcaggcattgtaggccagaagcccatcccatataaaatcacctttttgtaacttctcaccttgagtgtgagtgcaacaaatggccctttgtcagcaatcctcagagctgaatctataaactcactgacatagtaagcccacagagacacgtgtggaaagcacagtaggaaaacagattccacaagccttttggggttgggggtaggggtgagggttacagtgtcagaaaaggttgaatttgggagagacatgagcactcatgtagtccaacccctaaaattctacacgaggaagttgacactcaataagaacatacaatttacctaaggtcacagagtaaataggtgctaggaagggagcccacctctaggccaatgtatgaagtacagtaaggcttcaaatgttcacctagccttgtttataaaagtaccccctgactattctgtacaaaagtcatgtggcaaggcttatatggaacagttggcaaaagcctcttctgttcccctgtttggattattagttccacaatcccatattcaagagctaccagatgcctcttaactactatgttcagacaggagctgggagtgtcccagagaaaaaccctaaaggaaaacaatgcaagcggtgccacttacagctttgcagcctttgatgagttttttactctgcactttcacttccccatgggtgcgatgggaatgggagcatcccctcaaacccccaagggtgtcgtgagaagtgagatagctggtacagagaagtgttcaatcagttgaagtgctattgttaaagcctggggtggagaaaaacttggaagcatgtgctactgcaaaacacactgtgtgagttggagcattttatctgagtgtgccagggatttctggagaagggatttggcagaagtcatgattttagcatagccgtaattcactaggggctggcagtttatttctacctacagcattatagtcacgtgctgcatgatgacattttggtcaacaacagaccacttgtaggacagtgggcccctaagattataacgaagctgaaaaattcccatcccctagtgatagtatagctgtggaaatgtcatagtgcaattactttattttttacaaatttagtgtagcctaagttgacagtatttataaagtctaccgttgtttacagtaatgtcctaggccttcacattcactcactactcactcactgactcacccagagcaccttccagtcctgcaagctccaggcgtggtaagcgccctgtacagctgtgccattttttaatcttctctgccatatttctactgtaccttttctatgtttaaatatgtttagaatccaaatactcatcattgtgttacaattgcctacagtattcctacagtaacatgctgtacagattcatagcctaggagcaataggctatataccatatagcctaggcgtgtaagtagctataccatctaggtttgtataagtatactccatgatgttcacacaatgatgaaatcacctaaggacacatttctcaaaacctaactgctttgttctcaggtttagagggccaaacacttaggtggcactatactcattccagaacaccaggatatgcttatatcctccattctgttatgtacactagaatccagaaacaagactactagaagaagacagatatcacctacatatttatctgtgtgatctgccataatagttacggacatgaaaataaagttagtgggactaaacaacagataccttatgagtttttccattctccattaccatttgtttattgcctatttgtaagatatttttagttttgggttttgttgatttctttgttttttgtttgtttgtttgttttgttttgtacatagtctcaaaaagacaagctgtagcggatgccaaagttttaagtaaaatgtgcggagcaaaatgttaaaatgagaaaattctatctagcaactttttttctggaaacttggaaaatatatacattattaaattgtagcaataaaacatctcagtcatctcagtttacaaaacaccaaggatccatggagcaattaaagaatcactagagggttaacaacagaggaagtcatatttcctagtcattgaagtgttaaaataggaaaagagacctggagacttataggtctaggtgagtgttagtgtcttacctaactaataacattagaaatgtgaagcagaaggagactattccagagtccatagtcaactttttaatttaaacattttaataaaccatacctctattaatcaccatgaaatttctctttcaaactgaaaggaagtgtcacagtattgggaagacaaatggtagttaaaactattgtccatgtaagttaaatggggctgtaaaaaatgtctatccagtttagaatatctttcagttttctcagacttttcttttgggaaatagtatattaaagaacctatcaattcaacctttaatattgagtttctatatcatgttttttgaaatgaatgtccaacagtgggcaactggctagataacctaaatatacaccaaaatgatgggttatacagacttttaaaaagattttctgcaagaatatctaatggtatgggaagacagacactggtattaaaggaaatcacagtctataagagtactataaaatattatttcatttttaatctatacagtatagaaaagactcactaatagttaatgctattaataaatgcaatattgttatttctattctgtactgtttttatactgttctgttttcttcttttcatgtattttcatttttaataaacatattgcttttgtaataagcaaaccacaattgttagtgtaaaagttatatttgactttctgtgcaatattatctaattgctgaagtaccagaaatacaacatttcacctataaggctgtccccaaccatatacatcctgaagacagcattagaacacagctttgctatccagagagaagcacaggaaatgtgtatatgtaaatatagttgtgttcataatagcacttcgtttgcatagacacaaatatcataaacaaaatatctgtctctcaattattaggatacatagatatatttcaacagacaacattgattagctgtaatccgggtgttcattagaaagtatagttttaaactcattttcagctgataattttcaatagctcagttgagagaaattctatttgaaatttttaaagttaaaagtaacaattctgctagtacaaaactgcatgtatctttcaagatattccaaaatctatccctatatcaagcaaggagctgagttctcatggaattatttatctaagttgcacttgagtgtgacaccagcaatctgggttgagaattctaagggaaaaaacaaaacgtgaaaaccattattctgtacatttcaaagacattgttgaggatgttaatcatctctccatgccttctttaggaagacccctggaagaaatttcattctgatattttaatagcaaggagcagccaaaattctcccagttggtctgttttcatcttgtggatattatacatggactgaccaggggtccctctataattgctctggcacagctcagagccaaatgtgtggcccagctgcagcaaatgtgtgaatcaatgcggtatgtgtttttaggcctaattcttgactcaattttatgttcctaccatattttcctttctcctgactttttggtttttgcttaaaaaaaatccactaaagtaatacatatgtgtgggaacatacgagtgaggacagaagaatttaaggtctgaaaagcagcagcctctacctctctgctctctgcctccaccccatcccactccccagattcaacctcttttaactgtttgtttttggttcttttagcaattacctccataaatctagataagaggcttaacctctttttccccatttatcatcttgagataatatctctagacaccttaatatgaaaaggggaggatttagctcatttaatgtaagtttcctcctccacctccaaatgttttatatttgcattattacttttagttcttctacagttcataccattgcaactttaaataatatataaacctgttaatcagaggctcccactccagctttctaattgtttgtactattgtaagttgtctcattttacaaagtgaagaggctgagcgcctgtaatcctagcactttgggaggctgaggcaggtggatcgcttgagcacgcgagtttgagaacagcctgggcaacatgatgaatcctcgtttctgcaaaaaatacaaaaattagccaagcatggtggtgtacacttgtagtcacagctactctggaggctgaagaaggaggatggcttgagcctgggaggtcaaggctgcagtgagccctgatcatgtcaccctactccagcctgggaacagaaggagactgtgtctcaaataataataatagtaataaatcgaagataactaacaacacaaattcaagaagaatgaggtcagcaagtcttcatgatgaatacgaaagtaaatagttaaggagtcccgaaaaatataaaggatggtaatacaggctaagtaggcctctggtatcacggtgggctctaaggtttattatggtggcagcctcgtttatggttaaatttaacatttgagcttaagctgatgcttgaacaagttgcagacatgtaccctcatactcaagtgaatttctttcaaaactctttgtgattaaagccttaagtttcaaaatttgtccttcctaaatattttaaggcacttattaaatcttccttctttcctttagagaagctttttctcctcgtctcctgttgcttctcatgtggagattgcttcgagggctcagggtaatggattgggttgacttcagtcagtgggatgaggtttacaggtctatctcagtgaacacctcaccatgttttaacttggtggttcccttccctatgagttcctcacactaggacacacatcagacacgtgggggacctggcagaagagcattcctgacagctctggtaaaggcaacgtcagtggcagccaaggaacctaccctcctatgccattcagcaccagccacgctttggacagacaagaagcctcgtcctgaggacacacacaagggctgctaatcaggcagccactcagcttgcaccccaggacaggtgaatgagtagggtggtgattgaatgaggaatcaggtggcagctttgttttgtttatttttctcaaacaagacattagtttatattatctacccactccctttcaaccctgctgctcttaagtgctgggttttttttgttttgtttgtttatttgttttgttttttggtttcagttctttcagatcctcttcagcagcaaggactttgtgcctaccagaggctcttaaactttagtatgcttaacaatcatccagcaaagttgttaaaaaatatacatttttatgctagaacccccctgtctttaacacacacaccccaccccccaatcccgatttccaatatagtaggtcaggctggaagctgggggatctatttttcacaagcaacccaagtgatgcaaacgcaggcacaatattgagaaatattttccacccatcctgccccgtgactaaagggagaaccaacaacagcaccaaaatataaaataaaataaaataaaataaataaataaaataaaaataagtggtagtgggcccccacagaaagaaatcgattcctcctttcccacgaggaaaacaaagttccagaggcgccaagacgcccatatctcaaggccatgagacccctgccagctctcccgcctccaaaactccaatttaaaatctttctcttccaccactcaccgctcctcctttccctggaggagaagacagaaacggactcgccacgcttgccctccccgccacgccccgctcggttcgttactctgtagaggctggcgaccagcaaaagagaaagttcccgagctttacaactctccgggaagcgtagggaacgtttcctctcggaaagctcttcgccgcgattttcccagggctgcacttgaatgaaacccccaaaggaaattaccacttaaatgaggcaggaggtgctggctgcctgtttggcctctgctgtgcacgctgcctggcaggcagcgcaggaggctccggagccccgccatgggcgcgcacggtgcacgggggccggaacgggggtgcgcggggacctgggagctgcaatgggggccaggatttgcttggggtccttgtggtgcgcgggagcccgggggtgcgcgggggtccgggatacactctcacaccggtgcagggcatgtgtctcggcccatggaggccgctttggaaaaccgacgctgagacatgaagccacctgtttgcttcctgccaaatccttcactggcctgttgggaaggggacggataaaatgatgggcctgctttgaggcccggccaccccgtcttggaaactgccctaataagtgcagagacctctcagagagccaggctgtaggcgtcataaaagcaagaacaagatctgttttagtttgctctgaaaatctgttttaaaattaaggtataattcagatactataaaattcgcccttttaaagtgtactattcagtggttttcagtatacttaggaggttgagtagccatcacaactaagtccagaacattttcatcaccccaaaaaagaaagccctctgctcattagcagtcacgcccccattattcctttcctgcatacccctagcataccattaatctactttctgcctctatggatttgcctgtttggggaatctcacataaatggaatcatactacatgtggcttttgtgcctggcatctttcacttaggataaagttttcaggttattcccatggtcgcatgcaccaggactttattcctttgtattgtgaaacaatattgcattgtatggatataccacatttcgtttatccattcatcagttgatgaacatttgggttgtttctactttttggctattataagtaatgctgctacgaagatgcatgtacaagtgtttaaacagacatgtgttttatttctttttaatatgtatgtaggagtagtattgctgggtcctgtggtaactgtggaatcttttgaaaggatctgtttttacctgtacagttgatagcccacccccggcgcgttctttgacaagtagatgaatgaattgaatggatgaatgaatgaatgaatgaatgaatggaactaagaatcaaataaatgagattatgagcttttgagtgtgaaagcattttatactttattaagagcaatacaagtgggatttactgctattcttaagtgatgatatcagaagttcttaacttgtgatctaaggaagagctacaggacacctgtgaatcccagaagttgtatatagaattgtttgagtatgtgtgcaagtaccgttgcttttagatcaggcaagaggggtaccttagcatgccttactctggctgtgcccctctctacaggacatgatgttccagaggtccaagcaaagtgcccactataagcctgcttcctccttttttggcccatggttctgctcctagaacctgggaattttctacctaaagagctcaagcctcttccccaagtccatcctccccgcagcccccacctcctgccccagggctgggaaggccaaggatgagaaggccaccactttccagagaaaaattccaaggagtccaacaattctatatttgaacttggccttccagccttaggttcctttgaaggacttaaaagggtgaaaccagtgatgacgggggaatctgagagtattatggacagagtaggacggggtgagatgaggaaaaacctgtggcataaggtgtatggctctccctttgtacgcttgtcccaggccttataactgataggaaaggacctatgcacatgtatattttttcaaagagagggtattgtaggtgtcagactcacagtggcctgcaaagtctgaaacacagtggcaagagttgaaaactaaagacagcaccagactagaagtcagaagttctgagttctagccctcttcttccacatacccacgaagtgaacttaggtaaattctcataaccgtgagtcacccatacaataaaatggaaataatcatagcatacattgaaaacttccataaaccataaaggaatgcaagatgtcattttaatagatatttccccaccttggtttttttggctacagctgcttcattagcaggcccctaaaattattaattcaggctcataatattgctaccagctaaatttcactatgatattgaagaagctccacgtaagacaacattgggctacataatttgtataacattattcggcagtgaattagtggcagttaaaaaatatctaccggaattttaacgatccttcccaagctttcatctctacccaacacactctcacctaagaaaaagaaaccaagaccatttcagaacaaaaatatttttcttacaactttgactatttaaatggtttcctttttctcctatggttcggtactattttttagagttttactgcatgaatttattctagtatttgtttgtttcaatacgctcatgtttaatgggaccgtattgtggtatgcgaatacatgagaaatttcagctgttgaccatgatggctgatgcataatggatgattttttaaattaacaaaactaattctctttctacatgggaggaaaaagtaagactcaaaactaaaaataataataataataaataaaattaaattaaaaacccagttcagtctataatgtaaaatagccaactcaatattttatttctttattcaatgaattcattgttattatttataaattgtatataaggtgagagtttaaagaacataattattctggttgtttgtgctgttgtttgaggtagggtgaccagctgtcttgtttggcctggaactgaggggtgttgtggacatgggacttcccatgccaaatatgggacagtcctgggcaaaccaaaatgtttagtcaccctaatttgaagataacatgtaccattttgcctgtgatttaaatataaaagccttggtagatttttcagtcaatttagatgttctattgtctacatctcctttttggtaagtgaataagtaatctatgtcagtatgatgtttgtatactttaagtagaacaacaaaggcatagagaaaaaataataattttaacattctaaatagatttttgtgtgatcagaaagaattgtgggttttctcttgttggttttatgtgttaaatacattattttgtatatggttattgtgaaaaaaatctatttttaaattacagtattgaatgtggaagttacatgattttttacttcctcaattataataactctttctgtgaacttccactttgataattatcagtccagtttgaatgcctgactgatcaggactgcaacctgaccttccacaccttttgattgtcttacttggctggaaggatggtcttgtatctgttggtgttgattttagctattgatattgtcattcttaagtgtttttaatttttgtttaatgaggttttgcttcctacccttttaagtaacattctatggttatcatgattatttaatgtcttttcttggaggtttcaatcactattggtcattgctagtgtcaatgaattctgctaatgccaatcctatatggaagcacaaaggtttagtaatctatgcttgaccaattgtgggatgcagtaaaattaatagtttcccccattattaatctttaaaataaacacaggctaaaagaaccagaacacttggatataaatcccagcttgatcactctctagctatctgaatgtggacaattacagcaagtctctggcaccctgtttcctagctacaaatgagaaagttggacttcatcagggattcttaacagaattcctgagtggtctgcaggggatctgtgaaccttcctgaaattataatacctttagtaaatatgtctgtatgtgcagccccctccccaacagcatccattgcttcccacaaattcgaaagcagtccttgtcctaagaaagattgaaaacttctgagccagatggccactgagaagactctaggggcagtatatgatgtacaatcatgggtcacttcatgatggggacacaatctgagaaatgcatggttaggtggttttgtcattgtgttacacgaacttagatggtgtagccacctacacacctaggctgtatggtatagcctattgctgctaggctacagatctgtacaccatgttactattctcaatactacaggcaattgtaacacaatgataaatatttgtgtatttaaatacatctcaatgtggaaacactagagtaaatatatgctatagaagattttttaaatggtatacctgtatggggcatgaatggagcttgcaggactggaagttgctctgggtgagttggtgagtgagtgataagtaaatgtgaagacctaggacattactgtatactactgtagactttataaacactgtaaaattaggctacactaaatgtataaacaatttttcttcaataataaattaacctttgttactataaagttttttactttataaacgctgtaatttttaaaattttgactttttgtaataacacttagcttaaaacacaaatatattgtatagctatacgaaaatatttttatatcgttattctataaccttttttctgtttaaaatttttaatattttttgctttttagacttttttgttagaaaccaagacacaaacatgtacattagcctacacagggtcaggagcatcagtataattgtcttccacctctacatctgtcccactggaagttcttcagggaaaataacatgcatggagctgtcacctcctatgataacaatgccttcttctggaacacctcctgaagaacctgcctgaggctttttatagttaacattttttttaataaataggagtacaccctaaaataactgtgaaaaatatagtacagtaaatatacaaaccagtaacatcgtcatttattattatcaagtattacgtactgtatgtaattgtatgtgctattcttttttacaactggcaaacaagtgagtaatgtgttgctctaccacatgctgatggctataatgtcaccaggcaataggatattttcaggtcctgggatcaccatcatatatttgatctgttgttgactgaaaagttgttatgcagtgcatgattgtatacattttaaaaaatcattgtagtcagcctatttaagacaaattcagcagactctactaaaattccctaaatgaagactgtgaatggcttgctaagagtccatgggcatcttggacttccggctgccagagagctgcacgggtgagagtccagggtaaaaggagtgaaaggagttcccttcagtcttgggctgaggaatttggagttaaccttgttagaagcagactcagaaactaccagatcatctagaaagggtgtttatccccatctttgggggcatacaggttattctccagacaaagcgatacccaaccatgtcttgaaggatagtcagagttagccagatccagaaggatatgaaggaagaagaaaagattgtgtgcagattcttggaggtgcaagaacacctcagtcagctagggaagggtgaaagctcagtgtggtcagagggagacttgcaggtcaggaagttagaaagatgatactggttaaccactgaatcctgaaggctcacagcatggaagggtccttttttctgtgttaaagaattttattttatcctgaagataaatccatggtaagattttaaaccaaagactaatagaaccagacatattttagaaaggtcattctaagtttttggcaaccttcctaaacttctatttcctcactggtaaaatgtgaatcagtgcaatgcctaccttataaaagggttctcaggattacatgaaattgatataaattgctgagcactgtactcagttaattttgatgattgtaattattataaatcccagttctcactggtcttttcttctgactggaacatgaactaccaaaaacgttgggctagacagggtaagatgaagagtgagcagggagcaaaagaacaaagagaacctcagagggattgagtgactttctcaaggtcactcagctatgaagagtatgagctgggacttgctcccaggtctgcctgcctccagagcttacacttttaaccccctacccagaaacctctccttccacctttttagactctagctgtatacatcatttcagaatctcctagaaaccctgcagtcttttcagagagacagtaacaattcccttttaaaagataaggtttttagcatctccatggcctagcccaaattctgagtgggcagccgcttttcagtttagaaggtatcaagggtttggaaagaactagaacctgcttcttggctgtgagaggaaaacctggccaggcctctgagagtcttccaacaaagcctcactctctctgtgtaaccaacccctaggagaccccaggatgaaagcctgcctggtttctgaggtcgctggtgtggggccagctccaggagtgagccgaagacctgcctccttgctgctgccaggaaaacaatggcccaggggcccccagccaggtgcagcagacccttccaggcacacaggctcacaagtggcaggctttttgtgagctccaggagtgccaggcaagagggagggagctttggtttggtttggtttggtcccttactgagcttagtgcatggggctttcaggagatcttgggtttcagttcacaccccattggatttcacatcaacctgaaaactcacggggacaatcagctgaaacaactgagtttggttggctctcccgtcagagccataaatcacacggttgccactgaggaaaagaggaggcgagacgagaaacttggcccatcctggttctaatttatcccaagtacgtggggggtgggggaattgttgtaaatgacagggattttcattgcacaactgcttaggttttcatgatgaaatgtttctatcatggcactgaggtgtgtttccttagaactaggttctgcctcatatgactaagatgtcaattctaggcccaaattcatcatcatcatcactcagaggtactttatatggtcaaacattgtgctaagctcttgactttcattagatccgcaagtgaagtaggtgccatttattatctccattttttggaggaggaaactaggcttagctggaaactcagcagagctgggatgtaaacctaggcaggcgagcttaagcactggatagagtgcgagagaactttctagcccaaggcacaggcagcttctcttcacaaggttcgtagaaggggctaggcgaccacaggttggggacttacgatgccggctggagtgtggaattgctgatgaaggtaacatgctaaggtccaggcttccaggactctctgccaggtccggctggaagcagcagaactctgtcctcttctgctgctgtggaagccccgactggaaatgcagctctggagtctccctttctcttcgttaaatctcattaacacttgtgggagttacgcccctgcctcaaggagaacacagacctctaattgctgtgaaaagaggcctgggaaaccccgttcctctaccacccctgactctgggtctcctcctcctctgctcaccgctggcgggggctcttccagactctgcagccctggcttggtcccccagattattaagtcatttgtaaaaatcaaactcatgtgctctccagaatgtctttaggtcagctatcacaacagcatggtcctctgaatttttttcccgggtgcatacagcaaatggccaatccaagtgcagtgtagagagatggcaggtctgcagtctgtttggtcttcatcctctctggggaatcttctttttctctcccagtaccacagactaatattctgattcacattctgtgatgctgccgttccttctttcttttgtttttctttttttttttttatacctgcataaacagcaatgtcccaagctatgtagaccagagcagtaagccagtgatgagccgtgaacacctggacactgattggatgacatttgcaaagaactgggcgaagcatctgggagcgaatgcttgcgcttggcagcagagcggctggcgcgggagagccagggtcatcccaagaactctgtgtgatcccagtccaaggacaggagacagggctttccttgaagggaggtactgaatgaaaggtgagtcacgtaactacagcggagcgaaaaggaaacagagaatggtgaagtcaaacaaaggggcaggaagaaaaagagacaacagcgttcctcccaccctgcagggagaaaggagccgccgccataacctcaactcagtcctctcccgccatctagtggtcatgcttagtgactgcagcacagactactaaggggaatcgtgacacagggaggtgtcggtgagatcgctaccttatggcctgaagagtagacatactcaacacaaagggtaactcgagccaaaaccatcaccaggaaaacaggcccttttctgtggaagggcttgtttgttttgattcgaaatactgtgcaattaaagaacagatgtgtgtcttgctcaatctgcaggttaatggaggttggcttggaaattccccagcccctagcaatttctttaaaaaggattcacgtgtgtagcacacgattaaaatctctgtcaggaaaagccagttttttatgaataaagactatttgttacttctattttctgacacaatccagaagccaaacattccttacattttgaagaggatagagaaggaaccctgtcacatcagatcccttgtctagactccactccctagtcagggaacctcaggtttttatcctcctctaataattagctttcctgtgaaaaatacatgacgcaggttctggtcaatttttttttctgcagattttctttccccattctcaaatacgaaatatttgaagttcccagtgaccaaatcttggtacaggtgttggctgattgaattataaaatgtagagctttttggcagcaagaactaatgtgtaaagaataaaacatatatacacaaggagttacagcttcacaaatatatatgtctaccacaagtaattgtgcttacctatgccaaaattttcacatgtattagattctaagagatgacaaaaagatcaagtaaatacagcctgtcaacattcctttttgtctgtgcctatatatatgagatgaacaaaatttgtagatctaagcagcagggtgctttctccaggttcctctgcattcttttctgggtcactataaatctatatatctttgactggatatagataaaggtgcagcctagacctgtccttatagagaacgtctgatgtttgtttgttctacagcacatctgtgcaggtctgtggggtcaccagttattctgggagtgataatgtaggctcccttatgtaaggcaagctgtgttttactttggtgctggatgccaagggtccaagcatgctatagaaaattccactttgatgcattgactgctctggggccaaagaccccttagaattgactctacttgaagcctgactttcaagagtactgagcctagaacagtcagaagagctgggttcattctgtctgtgctgcattcaaaggcatgattaagagccaaatgagctgaaggatagtaattatggggcaaacaatagactctcccagagacaggagagcaggaagatgctaggcagtttggtggttactttggtgaagaagtcatttcactttgtcctgtgttttaccctcagagattcagtcttcttttctcctcctttattcaccctgggcctaaccttaggaaattaacatctgcaggcaatgaaaagtatttattttgagccataagacatgggatccttatttgctcttaaggaggagtcacaccctcatggggtccttactggctcttgaggaggagccacaccctcagtggcttctgctgggtagatatctggaagcactgatcccactgatggacacagctgactagatcagtgatggaaacctgaccaagatgacattctagaagccacaaggggtgtaagtcaagaaaaggggaaaagcagggaataaggtaactggtaactgcaggagaaatggggtggtggactcccccaaaagcagccataatggtagagctctagcaaagagaaacactgatatctgaggctggggatgacacatctgaaattgcacaaccaccctaaacaagctgtcacatctcagctgactgagaaggacatcctggctactctcatttttgttttccttactcctctgcaaacagtttgatagtaacacccattgcctgaaccaactgggtatatatccatgttccttaaagaaattgtacagccagctgctctgctccctcacaggcatgacggtggcataacggagtgaacacagtgtaatttctgtttgttcatcacccttgctacccacttccctttagaaatgatccaactctctgtaatctcagccgtttgggaggccgaggcaggtgtaccacctgaagtaaggagttcgagaccagcctggtgaaaccctgtctctactaaaaatacaaaaattagccagacatggtggtgcacacctgtaatcccagctactcgggaggctgaggcaggagaatcacttgaacctgggaggcggagattgcaatgagccaagattgtgccatcgcactccagcctgggcaacaagaacaactctgtctcaaaacagaaaaaaagtaaaaagaaagaaatgatccaactatctatttatttgtctttgttgggggatgtttggcagatcacattctccaaaggtgacaacaactatatccccatttcatatgttcttcaacaatgtgaacttgtcattcctccatgagtggggtgggcttgtgactgcttcaaccaagagcacagcagaactgcggcaatgtggcttccaaggtgggctaataaatgacaaaggactgcttcttgatgtgtggctgggtaggtagggagtggaaagagccaggtcaggaaaggtcccagggcgcaggggtggctgcttttcctcatcatggctggataccatgcctcctccattctaagatactgtatattttaaaagtattatcaattcaatgaagactttaaaggaacagagtcccaccacctcaatgttaaacgtgtcatctattatgtgatgcattaaaggaaacattaaaatatgaaagaaattcatgaaatgcaggaaagtatggtaagtccttgggtgtccttggacatctttcagaacattctaacagtctaaaggatggaaggcttctaggccttataaatccctgacctccctagtgtgtgccagccatgccaatttatccactaggcacagtgtggagggcccacaatacttttaaggtcccagaaaaatgtctaaatgtctttatttcttttaacattttttttaaaaaactggtaggttaaattaaatgttttatatatataaatatataatatttaatatataacaggaatatattcatctttaggccaacacactcataaaaatataatttttaatatttaagatatttcatgtaaatatttataaatatttaaaagttaatatctaatgtgttttatggagaaaaatcctcatgcattcaagttgtctctgatcacctgagactcagacatgtacaagctcctcttttaccctctcaatatccagatctcaaggagcctctaggaatgaatcccagaagggatttttttcctttcagcgcttccatatttggagtctaggtggccccattgctctagagttagctgtgtgatgggctgtgatttacagtgactgttaggatgctcgccaatccctcctgtgaagcaggcagaggttactgctttcagtagagacagttcaatgtgcacagctgggaggaggcctgggatttttcatagctgtcattcttttaaaccctcagtccccaaggataatcccatggaaggtaaaacctggccattttcaactctgcttgaattattgagcatgctgggcatgaaaaaatttaaatgtctaggaaaataaatagggtgcataaaaagattttattgcatgtctgcaaatcagagaagaacactaaatggctgcttttaaaaaacatcataggaattccctgcaatttggtatgagatctcttggctcccctgaaaatcatggactcaaatacttagtgacaaactatcagaaaaaatagaattccctgaagctatttcatacttaggaagatggcttatggaatttttgagtgaaacaataaattttccactttcagaatctttaggcttttagaatctaaaagactggatggttgctcctgaaacaatgggaacaggctgatgcatccaactttattttctctagctgcttggagaaggacgtacatgcaaacatgcatgaacagaagtagatgaatcaaggtacattttaagaccacaaaaacccactcataggattcttgggaaggagcgtcatttcttatatttctgcttttaatttgtcttacatcaatagagacttcttaaccctttccccctctcttggccactttgaaaagtgatttgctcctatcacattaaattcaactttcatatcaataagatatcctttttgtattgtgaattgccagcagggcttggagtctctttttacaaggtgaaaagaggccttgtaccgtagagttccctgaggaaatgcatggttagacattgtgttctctctaggcaaatataagaccccctcagctaaactttaccgaaatgcattcaggtgagggatttaaatgatcccccaaaatgatgatgaatacatttttctctgtatgcatgaaaaatgaggtttatttttcaattgaagtgagattattcaatattgcatattgcacatggcatggtaagttctaaatttttttttttttttttttttacacggagtctcgctctgtcgcccaggctggagacagtgcagtggtgcaatcttggctcactgcaagctccacctcccgggttcacgccattctgtccctcccgagtagctgggactacaggcgcccgccaccatgcctgggtaattttttgtatttttagtagagacggggttttaccatgctagccaggatggtctcgatctcctgacctcatgatccgcccacctcggcctcccaaagtgctgggatttcaggtgtgagccaccatgcccggccatgtaagttctaaattcttagtgaagatagtaaaactatagaaaggtcattaaatgaaattttatcaaataaaggtgaggagaagacaggtaaatggtaaccatttactacaggtgcactgttggtggcaggttgatgatttactttggaacaccccccccccataataattatgaataaatagtatatgccatgagtcaacattattctaaacttgttacttatatcgactcaatcctcacaacaaccctatgagggtaggtaatatgattatctttattttatagatgagggaactgagtgccaagagattaaataacttgctcagggtcacatacaaacaggagcagatctggtttgaacccaggttggctttagactgtatgattttacactcagtcttctgtctctcacatccggctcccgatcgatacacgtcatgtaggttgtataggtcagtcattcctagaactcactgttgtgtcgtcccttactgcccaggactctctagttgtagatatgtgtcacacacaggctagtgggaagcgtggagagttaacactcaaccctgccctaacagctctcaaccaatgcccagggagacggcagataaataccagctcactgcaggtgggctcctttcaggctcccagaggttcccagcaggtagcccatagcggtacgttggccctcagcgtacccaatgctggtttgcttccctcccctgtttcacttcctcacttccatggcagtacttcctgggatctcctcccaaataaactgcttgaactcaaatccttgtctcagggtctacatctgggggactcagtctaagacatggactttgtatttaatagtttgaaaaatcacgactgatgaattaatcattggcaactatgaaaattgtccaaaaactaactccgtttcattctgccatactgcattgaccaaaaacaaacaaataaacaaagtcaatctgcaagaaatattgagagtctaccaaatgattttaaacaattctgggtaatggaggagatcatttatttctatgcccctgcacttaaatgaatcaatttgataaattttcttagcagaaacttcaaaaaaaggaaatatatcaaatgttgcatgactatatcaaggaccccaaattatttttagattctgatctaaaaggtaataacacaaataaataggatattgaaaatactcagatcaaagtaaaaagtgtcacattccattccattccattataatttttccaatatattgaatatattgggctctgatatagtttggctgtgtccccacccacatctcatcttgaattgtagttcccataatcccagcatgtcacggcagggacccggtgggaggtaattgaatcatgggggcggttacctgcatgctgttctagtgagttttcatgagatacgatggttttataaggggctttccgcccccctttgccctgcacttctccctgctgccatcatgtgaagaaggacatatttgcttccccttctgccatgattgtaagtttcctgaggcctccccagccctgcagaactgtgagtcaattaaacctcttttctttataaattacccagtctcaggtatttcttcatagcactgtgagaataaattaatacagacttttttggaaaaaaagaggttttttccacaaactgtatgttttgatgtgtaattgtatttttaatttgtcctaagtatatgttggtatctagatattttttcttttgccacaagcccatgtgagctatttttcttgctctctttaaatgctttccttgttcttccattttatttcaattagagactgtagcaataaaagcacatcacaatgtccaagattgagcttaactggtacattgccatcacctccgaaagcataataaagtcgaatattctaaaaataactgtgtgtgaaagaaggcatggaatcactcgtggtgattgttctctaagtgcatctctgggcctgtttgcttactaagctgaaccccccgggagcaagccacagccagcactattctttcccaccacaacctcttctaactctcctcggaagtcatttccccgaagcaagctcggataggttccatagctttctaggtactttctggtaataaaagttctcctgaaattgttaaataattaaaatcccattcagtgtgatatcaaaactccaaccttcatttaatttaaattttctcacctcctatcttcagatcctggggaagagaggaagaaaccttatgacccaaattatctttcttgcccagaacattgtaatctggcagcagtaccttctatgtggtggttgcacagtggttggcccccttttttataggcgtttggtggtttcctagaagttcttcctgttagacatggtaagggcagttcctctgaggcagacaaggcagcatctggctggtcatgtggactctctgcctcccaggctttgggcttttcttggaccacatgtgggtgggtcttggattcatatgattctcttggtgaatacatttaagatgactctcactgggacccttttatggcatacactcctggagtctggggaaacacacgcaagactcttcagtggcagcagacagacaacctcagcctgcatctcacctttagagcttccacgctccaacacagtgacatgggggagaagtggtggaaatcagagatgtggaaaggagagtggaggatgtgagctagggagcaagagggggaacctgcacggaatgaatctaaaaaccacacacattctcaaagcatagaagacaaaagaatactttcctttttttttttttttgataaaggcagaatagccacattattaaaagatgacacaaatagcacaaaacaacaacaaaaatgccaggccagtctttcataatataacaatgagaagtgctaaatactagcaaataaaattcagcaccaacttaaataaacgctatactacaaccaaataaaatagttcccaggaatgtaaagatggtttatattaggaaatacatatatgtgtatgtatacacacacacacacacacacacacacacacataatgtcagttgttagaagaagaaaaatatgattatttcgaaggataatgacaagattgtaataaagttcaactcaaattttgtatttaaaaaaacaatttagtaaaccaggaatagaaggatgcttccttaatacaaggaagaatatttatcttaagccaatagatagttattctcttaatagcaaaacaagcactacaggcattgccattaccaaaggaacaaaataagtattccctttgtccacacttatataatactgttgttaaagttctaaatattctactaatatttgaaaaagaaaagccacatttgtagttactggaaatgaagagacaacgtaataactataagcaaataatatcacataatcttaaaactccaaagcatctactgaaaaactatcaagatatagatatgagacaaaaatacaaattgaaacgtttgttaagtatttgttagaatacgttttaagtagaaaagcaacaaaaacaacaaaaggtttctattcatgattttaataagacacacagaaaacccgagggataagcttatatgcatgatccatatgaaaaaaaatcacaagacctggctgtgattcataaaaatagagagattgatgatgttcctggatgggtaaatgaatactgtaaagatgtcatattaatttagaggtctaatgtcatctcaatccaaatctcagtgagatttttcaaaaatttgacaatgtgctaataaaatttatctggaggcaaaagtgcagactaaatgccaaaaaaaaaaaaaccacacaaaaagaaaactcaagatcagttctaccaaatataaactttaagaccataacaaagaaaatattatggctaaaaattcaggaaagaatcaaattagatatttcctaaagaaataacattaaaataaatttcagatggctatgtgagatcaaaacaaaacaaaacctgaaagtagagggagataaatgtctgtggtccctttgtgaataaggacattccaatctaaaagcagttaaagaaaatacaaaattaaaataagaataaaaacttagaagatataatttcaaggaaaatctgaagcttccataagtcaaaatatttaattaccaaaattaaatgtaggcacaaaaaaaaaaaaaaaaaaaaaacaggtaagttatttgcacctatacataaagaacttggaattcatataactcattaggaatggtacagaatttaaccataaaaatcaagattcttaaaattcttaaaatttttgacccagtgattctacttatagcatctatcctaagaaggatgttaaacatgcacaaaaagacatataagcaagtttattacatcaacatttacgccagaaaaacactagaaatagcctacgtgtccagctctagagaagtgactattatacatccatataatagaatgcagctgtaaaaatgacattttccaggaatatttaataatctggaaaattgctcccaatataatgctaagtggaaaaaagcagatataaaactatgcatttcagtttccataaatatgaaaatgtgtattatttatttacttagatgtacatacagacacatttgtaaaagtggaaggaaatgcttcaaaatgttgacagtgagttgacaatatctgccttctgccttcatttttatcttaaattcttaggtaaatttttaacttgtgtaaaataagcacatagtactttaaaaaaatttttagaagaagatgtacacatgcttttaaattattgaagtaaataagaacaaagttggaggactcgcacttctcagtttcaaaacttcctacaaagctgtagtaatcaaaacgacatggtactggcataagtatagacatatataccaatggaatagagttgagtgtccagaaataaaccatacatgtatggtcaataaatgttttgcaaggattccaagaccactaaatgaggaaagaatagtcttttcaatatatgatcccaggttacctgaatattcacatgcaaagagtgatttggacctctacctcacaccatttatagaaattatctctaacggatctaaggcttaccaaaatataagtgctaaacctgtaaaactcttagaagaaaatatagctgtgatatagctttatgacctttggttaggcaacagtttttaaaatatgacatcaaaagcacaataaataaataattggacttaaaaccttctatgtataaaaggaaactatcaaaaaagggaaaagatgacccagagaatataagaaaatttgtgcaaataatatatcatatatatccagaatatataaagaacctcacaaaactcaagaataaggtaaataacccaattaaaagatggacaaagaatgtgaatagatagttctccaaagaagatatgcaaatggctgataagtatgtgaacagatgctcattaggaattagaaaaaggcaaataagaaaccacaatgagatgctacttcatacctactagaactactatcatcatcataataataagccaagaaaataactgttggtaaggatatggataaattggaacctttaatatattgctggtgggaatatattattaaatggtgcagtgctctggaaaaagtttggcaatccctcaaaagttaaagatttgccgtatgaccctacaattctatacctaggtatatgcccaagagaattgaaaatatatgttcacacaaaagcttgtaccggaatgttcatagggacattattcacaagagccaaaaagtggaaacaacccaaatgtctatcaattgatgaatggataaacaaaatgtggtatattcatgcaatgaaatattattaggcaataaaaaagaacgaagcgctgatacatgctacaccatatatgagacttgaaaacattatgctaaggaaagaagccagacaaaaaagggtcacatattatataacttcattcatgtgaaatatccaaaataggtaaattcatagtgacaaaagtagttgccaagggcaggtagaggatgggattgggaggtatagggtttcttttgggagtgatgggaatattctggagttacttaatggtaacagttgtacgacattgtgaatatactaaaaactattagattgcacactttaaaatggctaaaatggtgacttttatatcaatcttttttttaaattattaaaatacatgttttaaaataaaatacaaatcaaatgtgtgcagaactcctgaagcacctcagctcagatcttttatgtggccagattctggctacaaaatctggatcccatcctgtccacatgacactggggaggatacttgctgtcttgagcccattttctcatctatgaaatgggatgccttcttgcctcatctgagtcattatatggttcaaacgagataactttgttaacaacaaggcaaggtcataagggattattatcgtaatctcttgtcactctcggctagattatgccagaggggtgaacagaatgccttaagagaacatgtcctctgcctggctcagaatagatgatatttgagctggtcttaaaagatgactttgccaggccaagacctgaggatagcctttttagacagaaggaaatgtatattattaaaaatgagcaaactcagaaaatgctacatgtttagtgactggaaatcactggaatacaagttgtgggagagagcaattgagaggaatttggaccagatcaagtagggtcttttgtataaggtgtatgggttttattttcgtgataatggaaagccagtggacatgtttaggaggcatgtgtcaagatccagtatggatcctaggaagaggtctgatgacatcatggaggatgagctgtgtagggagatattcaacaggtagatctgacaggaggtggttgaaacactcaagtggcaggtgtcaagaatctaaccctggacaagataaaagtaaggacaaaaagtaagatctgaaaggaagcgcattttgaggtagaacccaaagtatttggtaacggactagatatgtagtgaagcagaggaggaacaaagggcaactgtgaggtttctggttttgaaaactgggcatactacccagttaatcaagattgggcataccaccgctgatcaagattgtaggttttttggagaaggagctggcatagtgaggaagatgaggttggtttgggatacagtaagaattaagtgcttacccaggaaaacaaaaattaaaaaaagaaaaaaaagaattaagtatggattgatggaatgcaagaaacacactcaagtaaatgcaaggaaacaagaatttactgtgagaaggcattcaaatgtagatttgtggagtcatagaccatggtttccttattcaacaaaatttctcttatacctagcaaagttcctggcataaagtaggttttcaaattgtatttgataaaggatggttaatctcatgaaatacaatgaaagcaataaagcataggcttgctggcactggaaaattctcaggcagccacctactccatctctatctttctgaaatcacgatgtcctttgctttgcttccctttgcatgtctgccctaatctctggattctccctgtatactggctttctctgcttatttatcctcaggacacaattccaagccctaaatcaccttacagatggaggtgattgattcccacacaagggaatctgactggactagcttggatgagatatccactctggccaagtcagctatggcctgagggatgaagtcagagtgatttatgtgactactctttatgggatgtgggcacgtctctaagaagggaatgttggcaaacaaaaaaatgactggtatctctggtataagcctgcagccaaacattcaggtgtagatgagaatatggggcctatattttggaaaaactggtcatagatcttggagtcattagcaaatagatagtggttgaattcttcaatttagatgagacgacctgggaagagtatgtaaaatgatgtgagaatgtagaagtgatagaaactgggctaagaaaaatagagaaatagccaatgaattagagaggtaattgtcagagagatataaagaaaaccaggagacctgagtcataggctttgaagaaggagagaatattaataaatggagatcaggttcatttaaatttttacaaatgatttgttgatagtttcacaagcctgtaagttgagggaaaagttggatataatgtttctgtatgtcaaccaggcatttgacatctttcataacatcattttgggacaaaatagagaaataagggttggattgagttcaaaaggaaaaattatcaattaggcaaatgaagaatcccaaagggatgcaggttgatgggatagtatccaccactggaggttctaatgtgagctgggaggttccagtgttgttttgtctttgtgaacattttataaacgatgtgaaaactaagatgatttatttatccaatttgtgaataggacaaatctgggaggaatagcaagaaatgtgtgaccaagtgagggtcccacgtgcattcagtagaaaaaagatagaattgtttatggttagatagatggaggaaggccatctgttgtactgtagagagcagagaacccatgttctaatcctgactgtgagccaataacttgacaaattactgaaaccgatgatttccaacctatacctgatttaaatccctgccaatgggataggaacagggaattcatacactatttgtaaccatttttccaggacattcaaatgctacccatcactatccatgggataacatctgaaggcactgacttaaaattttaataggctcagtatctgcatctctaaaatgatagctcaccaggatgatccctaaggtctcctttccagctctgacatttgtatctgtgtttgtgtaggggaagcatgtgtctcagcagaagagtttgcctaacatctaactgctggcctcggtccccaccccgggggtttgaatacctccacgacactccattgtcaagaattctcattatctggtcatagtgaagctatgcagtggctttaaaagaaagcttaaaatataaatatacatttatataaaatgattgggtgagtaaacaaataaaaccttaggtctcagacactaaaaggctcaatggcatgtaatgctgatggtctgtttctcaaatgtatccacatatgtttgtttaacccccaagttcacccttaaatgtctgattttagtgtaaatggaaagagaacccagtgtgctgagataagatctagacaagtgatagcgatggtgcatcatagatgtgtctcccataaccacaggtcaagtggagttcctaccataggacaggctgagtggaaagctaagatagagccattaatgtctcattgctaggaagagaagctggatattcaatgacactttaggataaaaccacagttgagactggacgccatatcagtagctcagggaatctcactcaatcatggaagaagatcaaggctcagatcaaggcttatctgatgcctgattccacaacagttcagcaccaaccatctgccaatcacttttttaaaggacctcactgacttccacagtgtggcaattcctcagggatctagaactagaaataccatttgacccaggcatcccattactgggtatatacccaaaggactataaatcatgctgctataaagacacatgcacacgtatgtttattgcggcactattcactatagcaaagacttggaaccaacccaaatgtccaacaacgatagactggattaagaaaatgtggcacatagacaccatggaatactatgcagccataaaaaacgatgagttcatgtcctttgtagggacatggatgaaattggaaatcatcattctcagtaaactatcgcaaggacaaaaaactaaacaccgcatgttctcactcataggtgggaattgaacaatgagaacacatggacacaggaaagggaacatcacactctggggactgttgtggggtggggggaggggggagggatagctttaagagatacacctaatgctaaatgacaagttaatgggtgcagcacaccagcatggcacatgtatacatatgtaactaacctgcacattgtgcacatgtaccctaaaacttaaagtataataataataaaataaaaaataaaagaaaagaaaagaaaaaaaaaaggacctcactgcctggtgagaaagatagaacagagagctataaaataacgtaaaagctactatggacgcatagaggaagaacaacaattcttccctccaggaaggattctctgggaaggcttttcagagtactatatgtaactaaaagcagagctttgaaaaataaatctaggaacatctgaaggtagatatagcgaggtgacagtgggcaagaaggcctgagaaaagttgttccaggcagttacagggttaagtacatacacataccaagcatgctatatgtggagacctgcaagtagagagagtacagggagttagtgaggctggagatgaaggcagtgacaaaaatatgaggccccactgaggaacttgcactttatcctataggaaattgagaatgtttttgaggggttataagcataagggtgaactctatagcctcagtctggaaggtggatttaatggagctaaaactagaggcaggaaggccagttataataaccactgatgaacaaaaggtgattaaggccagtatagaaacatggcagtagagatggagagaagcggaattattttgaaaatttttagatcatatcagctggatttggtgataggaagggtaaggagcaggatgaaactaggatgagctcctaggtttttggcttcgatgataggatggcactaatttaagaagagatcacaggaggaagatcaggcagcatggattactctgaggttcagatgaagaggaaataagattggatggtagctagagagtatggtgacgctagactatacatttcaggaagacagagattacatctgcattatttgctcacaatactctcagcatctagaacaatgcttgcccttggtaagcactcaataaatattattttgagtgaatatggaagggccagtggaaggatcattgacatgagaaaaatttgaacatgtttgcaggaagagagaaagaagcaagtgtgggaggaataaggccataacaaagggaagttgtgctccgtatagtgaggggtattagaacatgccaccccaatatacaccactctggcataaccgtttttttgagctgaaagcaattgaaaatcaacagatgcaggaagggttttctgtcttcgtatcatgtgcttaaaatcagggcataaatttacctttgtgaagatgccctccctgccacaaagaaaagagtgactctaatcaccagagaaagaaagtcaacatagagatgagtttgcataaacagacctttctaaaatattcctgtttcattagttccctcatatattcctagtcatttctccataatttatagtcccttaaaccccaaaacctttttcccttattaaaattgtatataaacctaaagtctaaccacttctttttttttatactttaagttttagggtacatgtgcacaatgtgcaggtttgttacatatgtatacatgtgccatgttggtgtgctgcacccattaactcgtcatttacattaggtatatctcctaatgctatccctccgccctccccgtcccccacaacaggcccctgtgtgtgatgttccccttcctgtgtccatgtgttctcattgttcaattcccacctatgagtgagaacatgcggcgtttggttttttgtccttgtgatagtttgctgagaatgacggtttccagcttcatctgtgcccctacaaaggacgtgaactcatcatttattatggctgcatagtattccatggtatatatgtgccacattttcttaatccagtctatcgttgttggacatttgggttagttccaagtctttgctattgtgaatagtgccacaataaacatacgtgtgcatgtgtctttatagcagcatgatttataatcctttgggtatatacctagtaatgggatggctgggtcacatggtattcctacttctagatccctgaggaatcgccacactgacttccacaatagttgaactagtttacagtcccaccaacagtttaaaagtgttcctatttctccacagcctctccagcacctgttgtttcctgacttgttaatgatccccattctaactggtatgagatggtatctcagtgtggtcttgatttgcatttctatgatggccagtgatgataagcattttttcatgtgttttttggctgcataaatgtcttcttttgaaaagtgtctgttcatatcctttgcccactttttgatggggttgtttttttcttgtaaatttgtttgagttcattgtagattctggatattagccctttgtcagatgagtagattgcaaaaattttctctcattctgtaggttgtctgttcactctgatggtggtttcttttgctgtgcagaagctctttagtttaattagatcccatttgtcaattttggcttttgttgccattgcttttggtgttttagacatgaagtccttgcccatgcctatgtcctgaatggtattgcctaggttttcttctagggtttttatggttttaggtctaacatttaagtctttaatccatctagaattaatttttgtataaggtgtaaggaagggatccagtttcagctttctatatatggctagccagttttcccagcaccatttattaagtagggaatcctttccccattgcttgtttttgtcaggtttgtcaaagatcagatggttgtagatatgcagcattgtttctgagggctctgttctgctccattggtctatatctctgttttggtaccagtaccatgctgttttggtgactgtagccttgtagtatagtttgaagtcaggtaacgtgatgcctccagctttgttcttttggcttaggattgactttgtgatgcgggcacttttttggttccatatgaactttaaagtagttttttccaattctgtgaagaaagtcattggtagcttgatggggatggcattgaatctataaattaccttgggcagtatggccattttcacgatattgattcttcctacccatgagcatggaatgttcttccctttgtttgtaacctcttttatttcattgagcagtggtttgtagttttccttgaaaaggtccttcaaatcccttgtaagttgggttcctaggtattttattctctttgaagcaattgtgaatgagagttcactcatgatttggctctctgtttgtctgttattggtgtatacgaatgcttgtgatttttgatttttgcacattgattttgtatcctgagactttgctgaagttgcctatcagcttaagtagattttgggctgagacgatggggttttctagatatacaatcatgtcatctgcaaacagggacaatttgacttcctcttttcctacttgaataacctttatttccttctcctgcctgattgccctggctagaacttccaacactatgttgaataggagtgatgagagagggcatccctgtcttgtgccagttttcaaagggaatgcttccagtttttgcccattcagtatgacattggctgtgggtttgtcatagatagctcttattattttgagatacgtcccatcaacacctaatttattgagtgtttttagcatgaagcgttgctgaattttgtcaaaggccttttctacatctattgagataatcatatggtttttgtcattggttctgtttatatgctggattacgtttattgattttcgtatgttgaaccagccttgcatcccagggatgaagcccacttgatcatgatggataagctttttgatgtgttgctggattcagtttgccagtattttattgaggatttttgcatcgatgttcatcagggatattggtctaaaattctcttttttggttgtgtctctgccaggctttggtatcgggatgatgctggcctcataaaatgagttagggaggattccctctttttctgttgattggaatagtttcagaaggaatggtgccagctcctccttgtacctctggtagaattcggctgtgaatccatctggtcctggactttttttggttggtaagctattaattattgcctcaatttcagagcctgttattggtctattcagagattcaacttcttcctggcttagtcttgggagggtatatgtcgagggatttatccatttcttctagattttctagtttttttgcatagaggtgtttatagtattctctgatggtagtttgtatttctgtgggatcggtggtgatatcccctttatcattttttattgcgtctatttgattcttctctcttttcttctttattagtgttgccagcggtctgtcaattttgttgatcttttcaaaaaaccagctcctggattcattgattttttgaagggttttttgtgtctctatttccttcagttctgctctgatcttagttatttcttgccttctgctagcttttgaatgtgtttgctcttgcttctctagttcttttaattgtgatgttagggtgtcaattttagatctttcctgctttctcttgtgggcatttagtgctataaatttccctctacacactgctttgaatgtgtcccagagattctggtatgttgtgtctttgttctcgttggtttcaaagaacatctttatttctgccttcatttcgttatgtacccagtagtcattcaggagcaggttgttcagtttccatgtagttgagtgtttttgactgagtttcttaatcctgagttctagtttgattgcactgtggtctgagaggcagtttgttataatttcagttcttttacatttgctgaggagtgctttacttccaagtatgtggtcagttttggaataggtgtggtgtggtgctgaaaagaatgtatattctgttgatttggggtggagagttctgtagatgtctattaggtctgcttggtgcagagctgagttcaattcctggatatcgttgttaactttctgtctcgttgatctgtctaatgttgacagtgggatgttaaattctcttgagtttcacttcttttctgtgacctcttgtgcacataagtgttaatacaaattatgttctttcctcctgttaatctgtgttttgttagtttaatttgcagatcctcaggaactaaacctaagaggacagaggaaaagatttttctctctgaaaataggaggtccctaaagaggtgggaagggggctgggctcggttgctcacacctgtaatcccagcactttgggaggctgaggttgggagttcgtgagcagcctgaccaacatggagaaaccccgtctctactaaaaatacaaaattagccgggtgtggtagcgcatgcctgtaatctaaccccagctactcgggaggctgaagcaggagaattgcttgaacctaggaagcagaggttgtgttgagcctagatcacaccattgcactccagcctaggcaacaagagcaaaactctgtctcaaaagaaaaaaaaaaaaaagaggtgggaagcgatggagttaagggaaatacttgacaaaatgtgcaacattgcatcctctgagacaagagaaaagttgctctggatgaatattaatatagctatttacagggacaataccggggagctgaaggaggttatgcctaatgggccctcatttccttgatgaagtaagagacagtctgagtgagaccccactctttttcattgtccatgaaccaactgagccagaagggctgggctttttgtttcctccctgtcagatcctgaatgacacctctctaagcatcaataagtcccaagagtcctggtactttatctattaattgagagtaaaagaatcttagaaactcctttacaacaacaacaaaaaatctaattttcaagacttgctatatattatactttgagacccagtgatccttttcctttttcctttacctccactctcttcctctaagattaattctttactaaatgggtctttattcctttaagtaaatagagtcctgccagcctcctctaccagctgtgtagatatgtccagacttgcctaaatcccagggcagaaaaaagcaaaaaagttcagctttaagctgcatctcctactgtgcaaaaagaagtgtggatccattcagtaagaaatgagtcaaaaaatgtaaatgcccaagagactataaaataggtgaggaatatgaaacagcaaatgagaaaccatacaatgtatgcagcattcatttttacctgactgagaagaatcatgagtaatgaaaacatcaaaaaccaggaaagtagtctctattttccccccaaatgcaacgatcattttatggcaggtcttatagtctaaccctactattttcaaatgggcaaagaaaatttagtttcactttccacctctgattaatctctagggaccagtttttgtccaatctagtaaacttggtccaattcaaaaattcagatgtctttagaaaactgagtctctgtataattcttggtcttcacattttctcccctgtcttttgcttctctctaagagagcacatggctacagagggtgattttggtgtataatctcatgatgggttagaggagagaggcagaggccttggatccatacaatctcttctagatcactgcttctgaaacttaaatgtgacatgaattaaatgttcatcttgtcagagtgcagattctgattcagtagttccaggatggtgcccaagattcttcatatctaacaagatcaagtgatgctgatgctgctggtccttgcacatacttcaaggagtgaggatacaggtcctggcaggtctttgctacatgtccgagctgtttagcttctaggctgctgaccactgaggtatgacttgtcccattagacctgctgaggtgatgtactggcccttactgctaacatccatggtctcagccaccttcccttagttacaaaatctttgtgcatgagaggctttttgattctatatagttctggcattctgtgcacctactcacaaggacatgggagaatacctgggttacctgaatgttaagcaaggcataggagcatagagtgaagcctcatactgacctctaaagctcccttccaccgcttttttgccatatactggaccatcttaaagaggtctcgtgtaggactccttcagacttaacgcttactccatccatctctaatgcccatcattttctcatggctctgtggatatttctgagatttcatatcagagggaatctttaagaagggaaaactgaggatcataaagtgcttcctgctagctctacctctgtctcttttcttgctgcagcctacctgagtgagaagggatgggcttttgtttcctttctgccatatcctgagttatgcctccctactatggactgcatgtttgtgttttcccagaattaatattccaaagccttaatccccaatgtggtggtatttggaggtaagcctttgggagataattagatctagatgaatgtgaagcacgcatgatgggattggtgtccttataagaagaggaaaagggaccagagctcactcactctctctctctctgtttctctctgccatgtgaggttataacgagaaagcagctgtctgtgaactaggaggagggccttcaccaacaacccaaccaggctggcatcctgatctcagacttccagcctttacaactgggagaaataaatgtttgttgctaaaaccacccagtctgtggtattttgttacgagctaaccaagacgctctctcagaataattgagtctcacaaggtctggcactcgatctgataatgggagttaaagaaattgaaaaacctgcttattaaaaaaaaaaaaagcctgatttttaagacttattatagactttgatactcagtgactctttttcctaggtaggatctgtcctcactttgcctagagtaatgagcctcacagcttagccatgaagttgaaagactgcaagggaacgtgatttagggaggaaataaaactacattggtttactatgtcaaatatgttatatctgtaaccatactcacactatatctcagaagtgttagttcatgtaaccaatttcttcctttctaatgtaattgtaatatagtgattacctcttattcctgccttctcactctgaaaatatggctctttctggaggtctccagaataatattcatcgatatgtgatactggtagtaaaagtgtgaaaattccagagacttaggcaaatgactcaatatcctcttccagaatgagcctttattaaatacaaagaacactcactctgcctgggctaatcctgtggacctaaacttaactgcttactggtgcttcggttattgatgtttatgatgatcatgatgaggaggaggataaggagttttctgctgttaaaagctttacccattaaaaaaatatctgattactgattatctaggccctttgatttctgtcagggcaggattcatctgttgtaaggtgtaggcataaggcttttctccttgtctaaaatgtcctttttccatttgcctgccttgaaaattcttactcagtcttgtaaactaaaaataaaatcccaagcctcccaactgactgaatggacaccatcataccatcttggccagagggaacccagagaagccttaaaaactgaattcctggccatgacaggacaggaggtgagacacgtctcattataccccttccctttttgcagtttagacacaaccaaccagcattaatgttaaagtagccggaacagactctttgtgacaataaaataccaaattataaacagggcctaaggctgtgccaggcaagggttacttaagtcctgcaccctacccttaaagaatgaactatgctctaacttctacaaggtttttcttgttctgtggcagcccagcaagcacggggcctcaaggtaagcaatgttcaaacaattgcagctcagtcacattcaattcactgccaccattgcctactgactaactgaccaacaccacctcagtcccccctcccaccccgcctgttccacaagccataaccacagctttggctagataagagacttatctcagtagctttctcctgttaagaagaacaccaaccacagactagttctggccagttttagagagtctgcacacttgattatcttcatgtcccagcttcagcctttgacatctagggcctaattgtagatactacaatattaagtctccaccaacacaatgaacatgggtcgtatgttacatgtgtgtgtagtgaatacacatgctttaggaccactttcatgaatatttatagttcctcttgtaacctgctgaatatgtataattagccaaacccatttcatcataaagctcctgccccaacccctcctcctttgacctcctttgaagtatctgtcttctggtctttgccaaaggctatacttcccagcctgcaggagaaccatatttacaggctgtaacccttataagaaataaagtctcttctccagatttatagatctcatgatttttttagttaacagtatttgaaacccagttgcaatgctgcctactgtgtacagcatcccctgagtcctcccctacacccaggaagtcttaaactccctttgtgccatcattatatcttgtaaacatctctattatcacatctttcatagtgaatcatgagtatttgccaccatgcctgtctcccttacaaaattctctgtatcattcacaccagttcacatctggcacatgacaggtgatcaataatgtttgttgcctgcacgactggctaaatgaataaattagtgggtctcaagtgccagtgtcaaggtcccacagctaggaaaaaagaatgctgaaattcagcattggattgtgaccacaaggccaacttttgctctgcactatgctgctttgcacttttgtgatttaaattgagtttgttgtctacctgtgatatatgggcatgaacttccacgagccttatgtgtttttccattcctttctctcctcctcactcttccattgatgaagagcatatttcccaaaattgtcagtggaactgggttttagggtaagtgttagtaagagaatagagtagattatcaccagacaagccctaaacaataaagatcatgatagaactactttccttgaagtcttcctgtaagaattgcttgcatttcttaggtgtttcttaagtgcttgacatagtagtaagttatttgcatactttgtttcatttaattataacaattatcctttaaaataagtcttactagtatgccttatttcacaaatgagcaactgagactcataagagataatgttaatttcccaaggcctgatggttttagtagaagaagaactgggactcaggcctgcctgatgccaaaatcaactccccaagataatggagtccaccaataataggcgagtagggaagagggaggggaaattaattataaattaacatttatttggagtagtagatatctgtcaggctttgtgataacccagtattttttactatctttcctatatttgggtaattttccgcagtgaaaaattcacatcccaaaggtggaagccagttacttgttcttgggtaaaaagtgaaaatgccatttatcacacacatcagaactggctaaatgaataaataaatagagctcataaagatagaagcagtagcagttgtgcagggccctgtaatccattgcattctagggcagagcacagaggcttaacagggccagacagcagactcctagagacagactgcaaccttgggccatggcacttttatgaactacatgattagcaatggcccctcccctcaagtagtgaaggttcagggtacaatagtcatataacatgtgatatggtttggctgtgtccccacacacatctcatcttgaattgtattaagatgattaatagttcccataatccccatgtgttgtgggagtgacctggtgggaggtaatcgaatcatgggggcagttactttaatgctcttcctgtgataatgagtgaattctgatggttttataaggggcttttcccccttttgcttattctccttgctgccatcatgtgaagaaggacatgtttactttctcttctgccatgattgtaagtttcctaaggcctccccagccatgctgaactgtgagtcaattaaacctctttctttataaattaccaagtcttggatatttctttattagcagcatgagaatgaactaatactacatggtagaacattggctctctttgtgacattgttatatcttataaacatctctattatcactgccccaagctttcatgatgtgagggtaactggccttctcctggtataaggaagaagctgaggaccaaggcttgctattatagttgtataacatagcaagactttggcttgagccccagcacctcaatctgcattcaagactcaggaagtaccagcccttctcctgggatccaagactcatgttggccagaattgagtgccttaatcctgggctatagccagtttccatccagttgcaaaggagcagctcattttctaaaaggcagcctgcagagagtcagtctttgacaagtttccaagggggcaatttcccctttctctcttactttcccagtctcccttgcggcaagagcataggtgtgtgacttaggctttaccagtcagacacatccatgagactttgacttagaagacagcagggtgagaacacaacagcatgaactttattttcatgtgaggctgatacagaggactctggtttctgggaatgacagtggtggcaactctggagtcagggagcagcattagcggtgcctgttgtggtgtctgtgcctagtggtagctgcagcaggcttgctgctaggacagacccatagtatagtttggatattgtttctgttcatatgctcaccaggctgatttggcctcctctgagccacctaataacctggaataaacttatcatatgcttcaaccagctgaagtagattctcttgtttataacttagaagttgagtaataattggtcacctgttttgtgcccagcattgtcctagacattgtcctattctttttttttttttttttttttttgagatggagtcttgctctgtcacccaggctggagtacagtggcacgatctcagctcacggcaagctccacctcctgggttcacgccattctcctgccttagcctcccgagtagctgggactacaggtgcccgccaccacgcccagctaattttttgtatttttagtagagatggagtttctccatgttagccaggatggtctcaatctcctgacctcgtgatccacccgccttggcctcccaaagtgctggaattacaggcgtgagccaccgcgccaggcctattctttatctcattggattctcacacaaaacctgtaagatgagtacagtttgcactgctgaagaaaaatgtggtaaggtagtgttatgggatgaagcagccaaagtcaacagaaaagagatcatgaggagtcttctttgtccagtggttgagtttggcctttgtcctattaagcatgatacacatacctggctgcagagctgtgggggcagcagcttccacaaggtgccagcatccacagacccttccacaagctgcttctttgcaatcccagggggcagctagacatgctaggcttctcagatcccctcacaatctctgattcactccaggcactagtgcttcagggaaagtggctacggattattctatgaccctctgattccctcctccagccaggcctttacttctcaactcttccacaattgtgtaaaatccaattcctctgctgtagtcatgatttccaagatgtgtaattctctttccctgaccggactgtggctgatacaatcagcaaaaggaaaagtgggatggggaataacacgcgtggtaaaaataaactgtagtgcgtaattctgttcaaagcagcctggaacaatggaaaaatctcgagctttgggtatcgtaaagatttggatttcagtctcagttttgcccttttgtcccttgtagctgtaggatgttcagtaaattaccaaacatcttcagttacctcattttaaaataaggatcataatacctacctcatggggttattgacgataaaatgggaacgatttaaagtgttgtgaacataatagacccgaatattagaacctttctatttaataataaactttaaaaaatcaaatataatgaggacacatgtttgttgcccatcctaacttggaactgttgttttatatggactttcaaggtaaaaatacatatctttacaaaatacactgttttaaataatatttaaatatattgacatatacatctataattgtgattgctctgggtttgcttcctcaaattggcttttaaaggattctatgtaagctgtgcttcttttagtacatgtctaaaagaaaagtaaactttcataggcaaggaatttttaagttttgggaagataaaaattttatttttcacatttataaatatgaaaaacaacatgttgaactaacatgtacttgactgataacaatatggggtcactgtttacaaaggacacattccagcaagaaaatgaaagcaaaaaggtagataagagttcattgtactcacacggaaaggcacatcagcaactttgaagagttctaccaaggcccagtttcccagtctatagtcccaatgacgactggactctttggaccccaatttcttcatcaattactatgaagaaggcttgatgtggactcctccaagttctatcagtgtaggtccatgaatgtgagctctgttggcaatacatttcatttactcagtccaactcctactcgccaaatgagaaaagtggatggtaattagatttttcccaactcttaaattagacactttaaaagaataatcataacatgacatgcataacaagacattttactgaatgttttatattcagtatataatttaatcctcacaaatcaatgatataaaattaatgttgttccccttttatagacaaagaaatagaggcacagcaaagctaagtaacacctgtaatgccatccagttaagaagatggacaaagtcttcaccataatgctgtgaaggatattggctctgagagtcagactgacctggttcaaatcctgactctaccatgtagtacctttgtggtttggggccaaattacctaactgctccaatgctccatttttgttatctgttagatggtgatgataccagttgtactttcctccaagggttgctgtgaaaattaaatgaaataattagtttagtgttcaataactgttatgtatgctggagatgataatgatttaacttgtctcccaaagagtgttcttttaacaatgcctagtgtcttgagcaaattggcatttcaaagctcaagcactgtacaccagtgttgttagacaaatgttcatctgtttaactggaaagaccagtgccacatacctgactaagctgtttcacatttcatatgtactcacaaagtaaaaaacattggctcttttcaacagattgctgtacatcctatttacatgtttcccaccacccacaggaacacacttggcaatccagaagtttttcaacatgctaattaatgcagataattcatcttgccttccgagcaaaacgttaaacaggcatgaaaggaaaggagctgctcattgtccaggagggcggaagtagagtcctccaaggaggcatcactgcctcctcgatccagtccagcaaggcatcccagaggcaaggggacctgctgtggcttcccacgaccctgccgtcacactgaggcaccttgtgtccctgagcagagttacatgctccaagactccctggagcacgtgcagctgtttgacctgatgaggaggatgttagaatttgaccctgcccggcgcatcacactggccgaggccctgctgcaccccttctttgctggcctgacccctgaggagcggtccttccacaccagctgcaacccaagcagatgacaggcacaggccaccgcatgaggagatggagggtgggactgggccgcccagccccttgactccagcctcgaccaccaggccccaggctagagccacccaatgaacagtgcaatgtgaaggaaggcaggagcctgcaggggagcagacttggtgcccggctgccagaaagcacagatttgacccaagctatttatatattgtaaagttataataaagtgtttcttactgtttgtaaaaaaaaaaaaaaaaagaaagaaagaaagaaagaaaagggcaggggaatgtgttagatatcactttcatctattagaaaatatttacatccttctgaactttcccctactttaccctcagaactgacaatgccagcaggacttattggacaatatcccccagtgcctaatggcaagaaacatcttgacagctttgggctctccggtgtgcattaggttcagaaaggccctgagaagacagcaaatgtattcagatttttatttgtctgcagtttgatgtaatagtgttttatttttggcccccaattgctcagcaaaagaaaaaaaaaaaaaacaaaataaaccttggttaagctgctgatttcctctaaatcgctgagcacagggattgtagcttgatgaagtcatttagtgctggttgtttatattcaaaccgtgccagtggctcttgctggagtttttcatgaggaatgtgatgatgtttacttctttatagagttaaaataactatgaatttaccagtactaacttgcaagggattttcaaacttttattttgtcttgaaagctttgaaatatacaatttcatttaggttgtcggggaagaaaatgtcacaaagagaaatcatgtaagctttgacaaaataaaatttgttgcaacttctccaaatatttctaagttcggtggtcatcaggctgcttgaaggtagcattcttaggccattcctcaaagagtattatggaagtccatttggataggaaaattcatgattgtggtatcaaaaataaatggagagaagaaagtaagggatgagagaacttgtataataaatataccttgtcccattttttctttttctattgtcttttctgttttctctcttctcccatcctggaagagaaaaggatatgctgagaaagtaggctgtgcttactcaaaattagaaaaaaaattgaattaggaaagttgttggctctccaggcatccattcaataaacatatatttgttgaatacctgtaaaatgctagacattatgctagagataaaaaaaaacaaaattggccgtttcatcaattcagtcattcatgtaatgaatgttaccaatttgccaatgtttgattcaggaaaactgaaaataaacaatgataacatatggatgaatatataaacgtattcaaaatgctgggggagcaaaaaatcgaggaaatatctaagacagcctatagcatgtgtctcagaggctgactttcagaggccctcaggccacctcaggacacacagaaaaactatctttggcactctgcctcctctccttggctgccaaggtgctcaagaagcagtgtgagatgacggaaaggttctagtctctggaccacatagccctgagtccacatcccttctgtgccagactgctaattgtctttcaacatcccttttccccttcttcctcaaaaacataaatcctgaatttagctggacacgtagccacccagaatagattatgtttatcagtctctcttgcagctgggcaagtctttgagatatagctcggatcgatggttgcaagtagaagtagtgtttgtcacttccaagaagtgtccttaagagaagtggaaattctcttctccctttgtttcctcctactagagagtaggtggtgacccactgcagccatcttggaccatcagacagaacccctgtgtggcggatggcagagaaacatgaggtgcaatttgacaattgggaagcctgaccctaaccctgtgtggcgtgagagaggaaaatacaactcacattttgttttagccaatcttgtgttcctgtcacttgcagtcaaagctaattctaactaataccaacaatgagaccttcagcaaatacaaccttaaaccctctgagactcagtttcctcctatatataaaaatgaggacaataacatatatttttataattgttgaaaggactgaattataagaataaatacatttaattcacctggaataatgccagatatccagtagtattaacagtagctactattataataatgttttctgcctattcaaaattcctgctccatgagtgtctccaaaactttaatagaataaaaactcctattccccaacagttgcaccaatagggaggtactgatctgatccaagatgtgtggtgttgaggcctagccttcccaggaactatatggaacatggctgttttccagatatggttcagccttgggaaagaaatgcatggattgatggggaatggagaggctccttgctagagagcaaggctagcagaattgactctgatgatgggcagggaagctaatatgatagtaaaagcaatctcatatctttcaagttatcctaccctaagataatactccctgccctacttgcttctctgcccgccactcaaaataccattcatagagactttcttacatgctggaccaaaatgggagcaaaatgggaacattattaaagacgaagttctctttggtggaatgtgtttggggaaaccatggagaggatttttctctagataggggctacatgttttcttcccctctagaggaaacaaaacctcccccttgttttgcctggtcacttgtccctctcatgatctaaggggacttgggcagcctgttagacaaatgaggcagattttcagcccttggagaagcacctgggtgggtacagttttattgacagccagactgggttctaacccctgatgtgccacttaccatctgtgtgaccttgggccaaaattcactcttgttctcgccaagcttcagttcctccatgcgtaaatacaaaaacaaaccaaaaatttttctaggcatgaaaaaaaaaacaacagttgatccagtgaattaagtggataataatgaacattagaaacgaactggacattagccccttggtaatcacttaggtggatttctctagtccttaggtcactcttaacagtaaaagttaagggtctgttttgaggatgtgtggacagtggatattcaattacatttgttggttgaatcaggcaggcagtcagcaaacatttatagagcacttgtgaggcatcaggctttgctctaggcactaagaatattgtgaagaacaagagagacaaagaaccaaactctagaagctcattttctggtgggagagagggataaaacagacacaaaacactgaaataaagtaattttgtgtagtgataaatattatagaaaaataacaaaataggatgtgataggaactgccttgggatgagagcaggggacagacactactttacatgggatggtcagggaaggtaactgagaaagcaggttgtttagtagaatgtgaactatgagaaagaggcagctcttcaaagattatagggaaaaacattctaaacggaagaaaaagcaagtgcaaagaccctgaagtacaactagttagtcataagggagggacaaaaagaaggcccatgttggcatagagtgacaaacgaagagaaaaagggaagggagggaactcaatctgaagaggtgagctgagttgaagatgtagaaatgagtttgaaaaaggcagcttatttattatctggttatatagtttggatgtttgtccctccaaatctcatattaaaatttgatccccaatattggaggtgaggcctaatgggaggtgtttgggtcttgagggctgatctctcatgcatggtttagtgccatcctaaggtaatgagtgagttcttgctctcttagttcagctctctcaagagctgattgtttatttttaatttgtattggtttttttagagacaggatctcgctctgtcacccaggatggagtgcagtggcgtgatcatagctcactgcagccttggactcttggtctcaagcgatcttcccacctcagtctctcaagtcactgggattacaggcatgagtcactatgccaagcccagagagctggtaatttaaaagagcattgcatatctgcctcctcttcctccctctctcacaatgtgacatgctttctcccccttcaccgtctaccacaagtggaagcttcctaaagccctaaccagaagcagatgctggtgccatgcagaactgtgagccacataaacctctttctttataaattacccagtctcagagtttcttgtatagcaacacaaaacagactaatatatctgttttatattagagagtgaaggaagattctagatttaattctcattacaataggaagactttgaagggttttaaccaggacagtgacatgctctgacctatgctctaaaatattttctgtggctccctctgcagaggctggtgtgaacaggacaagactgaagaaaagaagagacaggaggccactttagtagtccaggtgacagctacagtaatggagatgggccaaccaggtaagattcagcacatattttggaaggagagaataatggacttgtagatggactggatgcattgtacgtgcaaagaagagaaatcaaaggtgttttacttaacaagtgggggatattagggtaggagatgatcagagaagaaggtaggcttgggagaaatcaatcatccttttttcatataagcaaagtttgagatgcttatcagacatccaagtggaaaaaaatgtcgagtgagcaattggatggatgattctgtagctaatgagaaaggtactggaggagccacagatgtgagatttgtcagaatacagatactattaaaagctatgggatggtacgtgcctgtagtcccagctacttgggaggctgaggcgggaggattgcttgagtccaggaattcaagaccaacctggcaacatagtgagactcctgtatcaaaacagtaaattaatttttaaaaaagctatgtgatggaatgagatcacacaagaatgtaggtatcaagataagaggaccaaggaaagagccttcagacatttcaatatttagaggtcagtaaaggagaagaagtcatcagtgagaaaaacccaaccaataaatatgctgacacacaaaaccagagaccttgtattttaataaggaagtaattaattgtatcaaatgacattgagaagtcaagcaggatgagggcagaaaattgcccattgacattggtgagatttggatcactggcaacttggatatggtaggcatcctctaaaatagcctccagtggtcctgccttcctagtattcatgcccttgtgcaatttccttcccttcatcatttactacatctattgacttgtttctaatagaatatggcataagcaatacaatgtcagttctgaaattaggttatgagaagactgtggcttccctcttattgactctttctccagcatttggcttgggtgccagcattgagtaaacagatatttaggtttaaactgggttgggattttttaaggcgattatgatagagaaagagacgggtgtgcaacttactggggtttgtaatggagaggttatattggtggtccataaactctaaactaagtaagaaggtaagtgaagatatgaactgtgtgcaaagagaagtatggatcaaaatattagaaatgcaatttgatgaggcttggtggaataccagaataactgagaaaggaagataagagatagtcggtagaaagaacaatgctttaaatagatatttcaaaaccggtattgatgaagtaacatctacagtacaaccctaagtgtaaatggtccacgtggagcaaaagaaaaaactaaaagtgtagaatgaatcattggcataggtgtggaagtcatccaggattttgacagccaccatggtaaaactgacagtaagacagatgccagggccatcaattcatgattcagtgtgagtggcaagttggtagagatagaaacaagaagggataaaatgttaatggcataatttaagaatcctgggttgaaggaggaacgaggaaaaatggtttggaagcagcaatggggaccccatccctcacccctgaaaagacaataggggaagaagcgttctcaggaggaagttttggtgattgctaagcatgaatggaggcctatggactgttttggaactactaaggattaaatttgtatttcctttcaggtgatgagtatcaagaaagtcaatctgagtatgctacatctatataataataataataataattacaatttatggaacaccaaccaaatgctaaggatgctttttcccctataataaacttgcactacagatgaggaaatggagttcaggtggattatagacacacccactgtactggctttataccatgtttgtttagctaagctgaagctacaagtcccagaatatccttcccagtgtaaatccaggttggggatgttcccaggagaactttgtgcagagattgggtggtagaagagaagcagcagccaaggtgctctgaaggttgatgcacggtgccaggcacctgcttattcagtgtctctactgtgctagctcacactgatggtctggggccagggctctcctcctctagcttctctgactcgtgagccaggggtgtgtgtggctccaccagattctccaggagaaggctaccaggttgtcaggatacctgtgtcacagggttagattcagggagaaacagaccaggttccaatttgtgcttgtggattccagattgtcctcatgggttccagttgtccttgttttcctgtcccattctacccttcatgtgaaagggcatttggcatttcttcccaactgccttctcagttgatctatagcaacttcaggccacgactagacaccgaggcagcagattctgtactttatcacctagagtggttcagcttccctgacacccctaggatcatacattagaaagcggtaaaaccaagatcagtaccaaaatttctcggaattaggtcctttgcatttctactcttccagaatccctcttaggcctacaaataaatggcatatttaatgaaacactgcagaatcaaaagttaaaagcccacagataataatgtgccactaagatttaatcactctaaatagggaagtcacattacacatgaggttgggggttttattataaataaaagaggagaaaaaaatgggttgcttggtgcatactcttcagtcactttaggttttatcaatgaacaaaagggtcagaaaattagagaaaggcagaagaaataagggcaaattttggaaaatggaatgaaaggaaagttatgagaagatcgttcaagtcatttgcacctacttaggaatggacttaaaagaaacatcattctattatataaacattttccagaaaaattaaaacataatggaggcatgttgtttgtttacagggtgactaggtgaacagcccactaaaaggttggaaaggatactttttaaaaaccaattatttccataggttttgggggaacaggtgctatttggttacgtgaataagttctttagtggttatttgtgagattttggtgtacccatcaacgagaagtagacactgaacccaatttgtaggcttttgtccctcactccactttcccctgagtccccaaagtccatttgcatcctcataccttagctcccacttatgagtgagaacatgcaatgtttggttttccattcctgagttacttcacttaatagtctccagttccatctaggttgttgtgaaagtcattaattcattcccttttatggctgagtggtgtcccatcatatatatgtaatttctttatccactcatttgttgatgggcatttgggctggttccatatttaagtatatttttcgtataatgacttcttttcctctgggtagatacccagcaatgggattgctggctcacatggtagttccacttttagttctttgaggaatctccacactgttttccatagtggttgcactagtttacattccaccagcagtgttagaagtgttcccttttcactgcatccatacccacatctattatttttttatttttttattacagccattcttgcaggagtaaagtggtattgcattgttgttttgatttgcatttccatgatcattagtgatgttgagcattttttcatatgtttgttgtccatttgcatatcttcttttgagaattgcccattcatctgtacagcaaaagacactatcaacagagtgaacagaacacctacagaatgggagaaaatatctgcaaattatgcatccaacaaaggtctaatatccagaatctacaaggaacttaagcaaatttacaagcaaaaggcaaccccattaaaaagtggggaaaggacatgaacaaacactttttaaaaattttaagttccagggtacatgtgcagaatgtgcaggtttgctatatagataaacgtgtgccatagtgatttgctgcacctatcaactcatcacctaggtattaagcgcagcacgcatcagctatttttcctgattctctcccttcccctgtccccttacaggccctagtgtgtgttgttttcctccctgtgtccatgtgttctcgtcgttcagctcccacttataagtgagaacatgtggtgttttgttttctgttcctgcgttagtttgctgagtataatggctgccagctctatccatgtccctgcaaaggacatggtctcattcctttttatggctgcatagtattccatggtgtatatgtaccacattttattcatctagtctatcattgattggcattttggttgattccctgtctttactattgtgaatagtgctgcaatgaacatacatgtgcatgcatctttataatagaatgatttatattcctttgggtatatacccagtaatgggattgctgggtcaaatggtatttctggttctaaatctttaaggaatcaccacactgtcttccacagtgaactaatttacattcccaccaatggtgtaaaagcgttcctatttctctacaaccttaccagcatctgttgtttcttgactttttaataattgccattctagctggcatgagatggtatctcgttgtggttttgatttgcatttctctaatgatcagcggtgttgagctttttttcatatgtttgtttgccatataaatgtcttcttttgagaagtggaacagacacttttcaaaagaagacatacccacagccaataagcctataaaaaaatgctcaatcattagagaaatgcaaatcaaaactacagtgaaataccatctcacactagtcagaaaggctatgattaaaaagtcaaaaaatcatagatgctggagaggttgtggagaaaagagaatgcttatacactgctggtgggagcgtaaattagttcagccattgtgaaaagcagtgtggcgacttctcaaataatttaaaacagaattgccattcgacccagcaatcgtattattaggtctataccaaaaggaatataaatcattttaccataatgacacatgcacacatatgttcctcgcagcactattcacaatagtaaagacatggaatcaacctaaatgcccatcaatggtagactggctgaagagaatgtggtacaaatacaccatagaatactatgcagtcataaaaaagaatgagattgtgtcctttacggcaacatggatgggctgcaggacatcatctttagcaaagtgacacaggagcagaaaaccaagtaccacatgttctcacttataaatggaaccgaaacaatgagaacacgtgggtagatacaggggaataatacatactggggcctaattgagagtacagggtgggaggagggagaggcacagaaataatacctatcgggtactatgctacctgggtgatgaaattatctgtacaccaaacccccatgacacacagtttacctgtataaccaaccctgtacatgtacccctgaacctaaaatagaagtcttaaaaaattatcctcaatcataattaagtgcttagttaccactacaccacatacaagctgcacaactctgagcttgtttcctcatctataaaatggggagaggataagaacgaactttcatagagtttctgtgaggaccaacagacattgtatgtgaacatgttttataagttgtaagttctctatacattaaagcatcatcatccacctgaaacaaccatgattccatgtgaacatctagtgtttctctctactcaggcccctgcctaccttcttccagtaatagcatagctccccttcctttgaagaactgttcttccttactataatggaagtgcctccccacctaaacacgttagcatgcatctggccacagtgatgggtcaggaagggcatgacagttaaacgggtccagtgagagttcttcttgaggaacttttttcttttcttgccaagatctataaggatatgtccccagcgacactgttggccacatacactgccatatggagacactcacaaggataaagctgacatgcagaaggaatgagaattgagagacagcatcctgaaaaaattctagtcctcctgtatggccagtcccatccaaccttgtccactctgtaagaatacagatgctcctcaacttaccgtgtggttttatcccaataaatccatcgtaagttgaaaaaatcctaagtcaaaaatgtatttaatacccctaacctactgaacgtcatagcttagtctaacctaccttaaacatgctcagggtacttacattagcctactgttgggcaaaatcatctaacacaaagcctattttatattaaagtgttgaacatctcatgtaatttattgaatactgtactgaaagtgaaaacaatggttgtatagatactcaaaacatggtttttactaaatgcatatcacttttgcatcattataaatttgaaaaaatcataaatagaaccattgtaagccaggaaccatatgtttatatataagaatatattttaggaatatatatacatatatacataagcataagagttgcactttattcacttccaactaagtgtctggctaatacagatttcacaatgaaaaactttcaaatttaaaaatgtgtagagtaggagaacttgctcatagtttcctttttcaactatacaacagtgttcagaagagtgaaaacacaaaacccagatatagaaccaggatggtgtacacagaatgagacgctgtcatccagtaatcatcaagcagcagtattgattagcaggcattttgtaggatgtgatggaggaaacaaacttctttaggaatagggctcataaacactgaatttcttaaaaattaattgtatagttttggtttagctattataaactaatacacattgttataaaatcctaagtaaaaagatcattatagatgaatttctagactggatgcattgaccctgttgtgagggataattagtgtatgtcatatatttagaatgaggcacaaaaagtaggcatatcaaccattcgtcctattattatcacatgagtatagttgatatttaaagccattgtactcgatgagatcacttcagtctagcaggagataagggtcaaagactgagacctgagatgactttttccagaataagtagcaccttttacagggtagacctttaataaggccaatttctgtctatatatggtacatattagaacagtgatagagtcggaggagccttagagatacatctaaaacagtgtagagttgggaggccaaggtgggcggatcacgaggtcaggagatcaagaccatcctggctaacacagtgaaaccccgactctactaaaaatacaaaaaattcgccaggcatggtggcgggcacctgtagtcccagctactcaggaggccgaggcaggagaatggcttgaacccaggaggcggagcttgcagtgagccgagatagcaccactgcacttcagcctgggcgacagagcaagactccatctcaaaaaaaaaaaacaatgtacagaaacatcattttacagatgaggagactgagcccccaaaatggtaaatgacttgagcaagtgcacatggtttgcagataaattaggtatagattctttacttgtgaaataattatttgccctacaaaatgctacagtctggtttttattttaattgcttacaatacaaatttcttatctctattaaatttgtaagactctgatttgtacacaatttaggaaagcatttattgcacctgtatgtaatttcagtctagacataacaattatgatactagaagtttatcatcttttcaatgagtcaccattgggatagataaaatggtttagattggcacatcgcaatatctaagaaatagagacatttgcctggtgcaaacatgatattcctaattaatgttctagcagttcttaaggcagtagacaaaatcctggttgctataactcttgtgttaggtaatttttaatcatttgatattctaagtcacaaatgtttaatcaaatatttgtaataaatagagatctaacgcacagcatgaaggctaccgtccataaaattatgccgtatttgggatttctgctaaaaaaatgtttagtcagattctcttacagtgcaattattttcatcagtcttcctgcatattgctaggcactgagagctctaaaaggaatcctgcatcggctgcttggtggagtagccttttcacccagcagggcacagctcagtttaggagatattaaaagatgacatttttaaatgttgcttgctgcttgcttttatttgaatcattgagctaaattctctaacctgtggggtgagttttatatatctttagaaagtgtttgcccagtaaatgactgggtggtggaaacctattctctattttttttttttttttaacctgtagatcctcaggaagcttttgcagagggaccaaatccccagaaagttaaagctgacagtggcagcgctgaacatttgcctaaagtcaggactgtgatttccatgccatttcttgtgcctactgcttttcagggaactaaggaaagtgggtggggggcgtggagggaaaagtagttttatgagctatcagtcacaaggaagagatccacacatatcaagatgacatagaaccatagtaataaaaaccaaaaaagggcaaagaactggaacataaaaatttcagaaggaaaaaaatacaatgcttaataagcaaataaagatgctaacctttggactgaaaattaaaacaccagtatgatacctttattcatggagaaaaactgtcacaacttaaaaatgcatgttcggtattggccagggtgtggtgaggtgggcactttatctctgttggcatatcttgtattggtataatatttctagaaagctatttaacagcagcctctaaaatattcatgctttaatcccatttttgagaactaccctctaccccaaggaaatagagagaatggcaaagattaatgtatgacagattaatatggtggtgtttgaaacgattaaaaattataaacaccatcaatgtgcaaaagaatagttaaatgaattatggaataggcataggttgaattattaaagttattaaaaatgacatttgtgaaaaaaattaataacatgcagaaatgctcactatttaatactgtatgaagaaagcaggggatgggacaaatatactcctgagtccatgaaaccaaaattgccaaccacttcccaagttccattttgaggaagccacccttagcagttgtttatgtctaatgttgacttagcttgtaataagacagtggtattacatgatttgacatgtgcaaatttgactctgtctacagcaaaaaataaaatgagaaaaataactactaaaagagtactggcaatgttgcctaacattccactaaataagtgtgtacccctaagttaacgtgagataagggttgtgaatttgctgtgccctcggacagtctcaatctctaaggcgctgtcatagtgggggttccttaccaaaataatcagaattctagtgtataaagatacaagtctgtaacactatcctttacatattatgtcttttttgtgccgtactttcccatcagaatagctcttgcaaaggtcccctaaaatctctatgtagcctaagtcagtagatggttctcaggcttcatcttatttaacctgtcaacagcacatgatacttttatctctgctttcttctagatattttcagttgacttctggggacactatttgctctttcttcttatcctattcactcttaagtctcgtctagtctcttcccctcctcctacaatctaaatattggaggatctcgggtctcagtctttgaactctgtttcctgctagactcaagtgatctcactgagtataatggctttaaatatgaactatacttatgtgataataataggacaaatggttgatatgcctactttgtgcctagttctaagtatatgacatatactaatcatccttcacaacagcactaagattgtttctattatgatcctcaactcagaaggaaaagggaggcatagagaagttaaattatttgcccagggccacagctagtagagaaaagagccaagactggaacctaagcaatctggctccagagtagctgcttttaagcactacacaacacacctccttgatgacccccaaattatacctctacatcctgcgactcctttgaagtcaagatttgtacattgaaaatctttggtttgatcgttaagatgaatttcaaacttaacatatccaatccccccaatctcttcctcctatagcctccttcagtaaatggcccctgtctatgccagttgctcaagccatccctgacttctctctttctttcatttcccacactcatcccattagcaaataatgttagcttggcttctaagtataccaagaatccaactgcttttttcaccttttctgtagctactatcctaagtcacatcaacttctctcacctagattttcacattgactttataaactaaattccacatatgctgagactgtactatgtgctaagaaaaagcagccccacttccgtggccatgacatattggcccaagggtcagagtccaagccaatggtaattatgtaaaagtggacataagaaaggttaaatcccttcatccactaaggatgctccatgtgtggtgatgtacaccagcccaatcagatgataactttgaaagttatatgatgaaaagttgcatgccaaccagtcccgagttacttccctggttctccatgtgttaatgtaagtttactcttggaaggattggaatgctgtgtccaggctaagaagaacacatatcatgctacctctcatgccatcacaacattgccataaattctcttttaaaaaagtaattgcattataatactgccttacacttttaaatagtcatagggaaatacacaggaaaacagtggaaaaaataaatcaaaacataagtagattttgactctaggaactcctcttataggtcattttattttgttatttttttacttcttcatgttttagtctacctttcagaatatcttattttgatagtcaaggaaaatgttaagaaccaggtttaagagggactgtagaaagggcatttttatatttaaaaatgaggggatcaaggtaattataaaagacattattatttacttgctaattttattataaaattcactcattctactttgcaaatacttatatcctctaagcaaacaagaaaataaaaattccatatgctgacttttgaattcatatttgaaataactcttacttcttagggggaggagggaacagtgatagagttgactcaagagcatttagttctaatcagcgtgccccctactggcttttttcttccatgtttttcagttgttgcatttttggcttggggagaatattttctgatactactattactactatgaggcaaatgaaaaaattactattcagatatgtaaaaccaacaacattttaacattcaagtctttataacaaggttccattgtaacccaaaataacttgctatttcctttaaactaaataggtaataatgactacaccaggtatttatatgatgctctatataggttttcctaaattcaaagcaatttgactggccacagcaatcccaacctaccatgattcacccgtacagcactcagctataaaatagctctttgcagactgcatacaaattaacttaccaccatcagtctcctctcggggttgctgcaaattgcttccttgactcccagcctgtctggcctcacagccctgtgtttcagcatctctagctctttgcaagtagcagcctcagcatgacctctctggggatattactactgcttgtgtaaaagatgaggaagggacagaggtgggaggggatgcattcaacagaaaaaaagacaaggaggaataaagattagcagactgagacagaatgtctaattgcaataaggtaatgatggagttttttcctgtggtggtacatggttttgaaggtggtctccaaagagaagtccaacatgttttgaattatggagtgttgtcttcatgctctagagagaattattttgaagacaatattctatgtgtggcataattgggggttttctgggggagaaggggaaggagattatattagtttcttcttgcactgctatagagaaatacctgaaactgggtaatttataaacaaaagagatgtaattgacttccagttccacaggctgtataggaagcatggctggggaggcctcaggaaacttacaatcatggcagaaggcaaaggggaaacaagcaggtcttacatggccagggcaagagaaagagagagataggaggaggtgccacacacttttaacaaccagatctggtaagaactctatcagcaccaaagggggaaatccacccccatgatccaatcacctcccaccaggccccacctccaacagtgggaattacaattctacatgaaatttgggtggggacacgaatctaaaccatataaaagattgtcatgatcattatgctatttcttattttgtttttaattatttctattctgctttcttaagataatttctaaagatgttatggagtaataagcaggattaattttttaaaaatccaagtgctcatcctggattatccaatggaactggccccactcctactcctactaggaaacctgcatccaatccttcccctagcagcaagggcttcaatttcctattggcctcaaagtctccaggtgttatggagctgttttcccaggattgctgcaaactgcagccgcctaaattctggcagcttggcaataagaagtcttcttgctgataagggcatttttgtgctcattccaaaaaaaaagtaagagcagtaggtgttgttgtcccttgactggagcactctggatctatcgagcccaaaatgcctctgcacagggtggtaacaggtctgctgcctttgtggccatgagttctggccaaaaatatcttccctttctggtgttacccccaagcctcatagattcacatctttaaaaaattaaataagcacatacataaatttataagaataagtaataagaaaataaggatgagaaaataagatggaaccagggttgaaggtgtaaattaagtgtacgccacaaagttgtacactcttgtaacctagaagtcccagttacttcagcccttgtgtttcactgttccctttaatatccaaagcaagaatccaaatatccattccaggtgaccacaggcaatccagtcttcctccaggttcctgtctctgagtgtttctggagctctgcagaaagcttccatctgccacagttctatcttgggggctacttccctcctcagcttgctgtcttactttgggcaagtcacttctggccatctcagatccagctttgtcctgactgccactacattcccatactccttcactccaaacattagggaattccacacttgaggtcggtttctggaatgtatatgactttactaaaagtaagggaactatcacaaagaagttgccacaaagaaaaggaaaattttaaattggttatgaaaatggtcagtgcctctagaatctgtaggctaaactatggagccaaactccatagtttagcctacagattctagaggcactgaccattttcatatacaaactatggacctccatagtctctctcttcccagcctgtctctccttttcctcaaactcagtctaatggcagtctccagcttgcttcccaccgaagaattgttcttcctctgatttccctcccttttggaagtcaagaaacccagccctcactggggcccaataaaaagggaggaacatcacttttccctcaccctcagtctcaggcccttctttcagacaatggcgtaataatctgcacagacatgagtcccctaaagaaaggcaaaggttcatattaatatagagagaaatttagctcccatattgtccaaagttttccattctgaaataaaatttttgactttacctttgcaaaagacaaatgaaaatatttctcctaatgaagaaaatagtccttctcaaaaatgaagcagaaaacagctggcagctttaaaatagcagcttgaacttacttagatcaagatttcaaaaatattgactcaatatttttggtgaaccacaaatatggttctaaatcttctagcaacccttgtggaaggaaacatgactcactttgtgtttcaaggtgtcccataagacaaaaattaacttttcccatggctatgagagagacagagagcgagacagagaaagctgtgtaatgtaataaaaacatctttcataatatctattagttaacatagcaacaagctttataaaactatttcttacaatgatcctcactataaattggagacatcatcattcagtaaaagcagttctatggaaagccaatttaaaatgggttaactacacaatttgctgctgatctgacttaaccagaagaaggctgtaaagaattcagccagagggtcttcacatagccccttatatatggtttccaagaattctatgaattaccacaattggcacacatgtacacacacacacacacacacacacacacacacacacacgccttcaataaacatacattttaatgtcaatccatatgttgagatattatctcattctaagtaaatgtgagatggcatgggatactgttgtatatcctcaggattttaattcatgtaatgatgtcttattattacctattgaacatgcccttgtggccactgaaccacattcacaattacagaaatctttctatgtttaggtgttgtctggtttaaattgaaaaatattcaagaagcataatattaatatgctctttgatttggctttaataatcaaatctgttggccctaacaatactaaaggaagacttgacatgctgcaagtatattagatagaggatatttttggagaaagtgttggtattctactaactcttgcatttttcccaaacattaaactttgttttgaagtattggataaggttgcttatcacattaccatgcacaactggagaagccttggttaatccatgtgccttggaaatgattgagtgaatgtatgacttgaaacagagaaaggaatctgaagcagtgtgtcattcaagtgacatgatctagccccagattcttctcatattttaagcacattcgtagaagaattggcagctgttcatcattcctttcaatatgcaactggatgcaaccactatatttctcactgtagttcacaactgattttcagctgctgggtgcaggcctgtacttcataaaagaattcctctttcttgagccctattttgaaatctcaaaggccctcactgtcttcaaaatggtgacaagtttctttgccaagaaaacctccccataaggataatcttgatattccgctcacagatggagcccttgcaggacttggtaacacatctgggttgatgctttgatgaacaaagaggctccgtatgtcataatgactcattgctgtcctcatcggtatgcttttcagttagagactctgccaaccatcttgaactaagttttgtcattatctacttaaaagtaagtcctcaatttcgtcagagtcagggcttcatccacctcattttcaaatgactttatgaagaaatgagagcaaaattaaaatgttatctactaagcagaagtacactggtattttttaacacaagtcttgaaagagttgattgaagcatcaggaggaaatttcagttctttgagagagaaaaggaaagcttgttcagtataatctgacacaaaggtatccatttatgatttggttttctcagtaatacttttgcccataggcaagagtaaactttccattgaaggcatcaagtcaccatatgaatgctagttaaaaacaaatacataaggcaaaaacttttggctgagctttttttttttttttttttttgtaattctggaagataaagttagacatagaaaacaaaattaactaagctaactctctgaagctagaagtgcttctgtaaattgaggagaataaataaagccttagaggtttcattgtaggcagaaatttaaagacaaaaattgaagaacaatacctctgctcaaattatttgcttacaatttggaaatgcagataaagaagacttcattccattgctaagatatcatcaataactcagacgcagacaaagctgacctcagagatcaggacaaatgaaatgatgtagtgtaaattcaacctgaagaatcttgagggaactcaagtatctagaaataagcctgtccttgtctggcaaagagagatgtggatgccacagacctttctaaacattttcagacattgacatgaaaatttgaaaagtatttgggtcaaaggcatgcatatttgcatattcaagatcattatacaatttccaatttcctgtacaggccaacagcaacctccttatcttgccataaaccttcagaatcaaattctacttttaattttgtttgaatttttggacttttctagcaagtattcaattatatttagatgaaaaataagaatgggagatattatcttttctgggcaacacttctctattctgtatttgtggaggaaataaatttccagagcaatgaattatattgattgaaaaatatgcctggccaacatggcgaaaccccatttctactaaaaaaacaaaaattagctgggtgtggtggctgacgcctgtcatcccagctactcaggaggctgaggcaagagaattgcttaaacctgggagaaagaggttgcagtgagccaagatcatgccactgcactccagcctgggcaacagagccagactctgtctcaaaaaaaaaaaaaaaaaaaaaagaaaagaaaagaaaaagaacaatatcatatgtacgagtttatagaatttttaccttaaattgaaatctgtagttttcagccattgtttaaagggatttatggcttcaaaatttttaagaattgctgatctagagaaacaagttgcacaaattatcattaaagcagccaataagtgttgtttttagaaactgggattttgatggctattgagacgtgatgatttggtgatttggggcattcggcaagtacatggagttcagtcagaccattttgtagcttcagagctgtgtaatatactttatcccccttccccaccattactatgggtaggctccaaattctcatgataaaactgagttttgtctctaaaattcacacatagtagaatctaatccctccttttaggaggtgaagcttctcttctgaatatgagaccctgtctctagagaaagaaggaaagaaaaaggaaagagaaaggaaaaggaaagggaaggaaaggaaaggagagaaagagagagagagaaagaaagaaagaaagagaaagaaaggaaggagagagagaaagaaaaagaaagaaagaaagagaaggaaggaaggagagagagaaagaaaaagaaagaaagaaagagaaagaaaggaaggagagagagaaagagaaagaaagaaagagaaggaaggaaggagagagagaaagagaaagaaagaaagaaagagaaggaaggaaagaaaggaaaagaaaagaagaaagaaagagaaggacggaaggaaagaaaggaaaagaaaagaagaaagaaagaaagagagaaaagaaagaaaaagaagaaagagaaagaggaggaagacgaaggaagggagagagggagggagggaggaagggaggaagggaggaagggacaccttacttagattcaactatttaatgcatggcagaaatttaaacctgatttgataatcctttcccactaaagccatactgcttcttcagactttctgagttcaaacacagagggacaaacaacttgatttttaatgattatgcttatttctataatgccctgaatcattcttcttcttcttacctaaccattaaccaacatctttgaccagttcagatctcttaacaatcttgaatttagacatgagggatttaaggagctaatctccagcactacaggactgactttattaccggggctctggaaacttgattcttctctgacccctgttaggacttgctatgaaattgctatggtataagggaatatttttacaagaagacccaggactgccaaaatcctgcattgtcaatcatcccttccacttgaagtttccaacagagctgccatatacaacaaggattattagatataagaaacaggttaatattatactacttgtactaggccctaccgcccaaatgtctacatctgttaaaactgaattggagcacagagttctggatcaaggccttagcagggagttatcacaaacaaaaacacatcagcaacctcctctcagagccgtatgagacaaggtgggtacagtgaaggacagaaaatgagaggagaggtgaggaaaacgacctgagacagacagcaggaaatagaaaagaaggtaacacatgcatacactggtacaacaacctcaatcactagaaatgtgtatctgtgtgctggcacctgcccagtgagagtgagaactcctcctttatccttcggaatgatttgaagtgaggaattaggcataatcaccataatactgagaactccatctccttccaaggctttgagtcccctccctggatagcagtctatggaatgagatctcaggagtctccaaagctgagtaactgcctgaatctctaaacaatgcatgttcctatatttcccatagttactgcctgccttcctgttactacatattggagctctctagcatcctttttgaccataccatcctagccaccaggttccacaattggacctgactcctagtgcacctggtcaaatgccagctttgggccccatctagttactaaaattaattggtccatacaccaagagaatcctgatatataacaaccacaggactatgtactaggaccaaaccaaagaagaccacaaaaaaaaagtcttcaaaattgcaagtttgttaaatatgttctttaactgtaagtagtttttaccaccaaataagaaaattttgcatatgtttttaaaaaataaccagtaaaaatgagcttacaatagaatgtaactttctccagataatatcccaaattctcttgccccttccagaaaaactattgttattccaaaaacattctatgaaaacacaagtatagataaataataataaaaataccttatttttacacaaagtaaaacatcttctacacatagttttagccttttttcaattaacaactaatcttgtatattgtttcatgcaatatatagtatctacacacatgcacacacacatatacaaatatgaataaaatggatattatgaaattgaaaaacacattattaactgaaatggcaaattcaccagagggggttcaaatgcagatgtgagatagcagcagaaagatacagtgaatttaaaggtatatcaatagaatgtatcccatttgaagaacagaaagaaaaaactaccagtggaaaaacatcaatctttctgttcttcaaattggataaagctaaacaaacccaaagtaccatcaacataagaagaattcacatctaaacaatttatagtcaaattattgaaagacgaaaaaatcttgaaagcagcaagaaaaaatgaattatgttcagtcaacaacaatatgaataacggataacttattgtcagaaataatggaggtcagaaggcagtggaattacatgttcaaagaatggagaaaagaactcccaaccaaaaattttatattcagcaaaactatcattcaaaagccaaaactataaaactctttggaaaaaacacaggtgtctttctgaccttggattagtttcttagatatgacagcaaaagcacaaacaacagaaaaaaaaagaaactaaaattaaaagttttgtacatcaaaaaacattatcaagaaagtcaaaagacaacccagaggatgggaaaaaatatttggaaatcatctaagctgataaaggacttgtatccagaatacataaataactcttgcaactcaacaataaaaagaaaaaataacccaatttaaaaataggcaaaggatctgaatagacatttctccaaagtagatatacaaatggccaataaatacaggaaaatatgctcaacattattatccatgatgtaaatattaatgaaaactacaagacacaactttatacctaataggatggctatagtcacaaaacggaaaataacaagtactggtgagaatgtttagaaactagaatccacatacactgctggtgggatagtaaaatggtacagccactgtggaaaacagtgtgacagttctctaaaagattaaacacaggattaccatatgactcagtaatactactcctaagtatatacccaagagaaatgaaaacatataaccctacaaaaacttgtacataaatgttcatagcagcattattcataatagctaaaaagtagaaataacctaaatgaatcaataaacaagatgtggtatatctgtacaacagaatattgttcagccatcaaaagaatggaatactgtggttacatgctataacatggatgagcattgaaaacattatgctaagtaaaagaagctagttatagaaggctatgattccatttgtatgaaatgtctagaataggcaaatccatagagaaagaaagtggactggtagcttccagaaactaaggggagggaaaaatgaggaataactactaatgggtacggggtttcttttgtgagatggtgaaatgttctaaaactagataggggtggtggccgcagaacagtatgaataaactaaaaaaagactgaattgtaaattttacaagacagagtgttatattatgtgattatatttcattttttaaaattatctccttctaaagtaaggatgaagtgtagaaatccctagatgaagaaagactaagcaagttccttgctaggagacttactttacataaatattaaaggaagtccttcagattgaaaggaagtgacaccagacagtagcttgaatgcacacaaacaaatgaaaagcactaaatatgataaatttgtaggaaaatacaaaagatccacaaagatatttttattttaactttttaagaagacatgactttataataattacactgttgttggatttatgacatatagagttgtcatacatatgacaaggatagcacaaaggaagagggaggaaaaggacacagcttttttaattatcaggactcagtatcattctgaaatagattatcataaattaagatacacattgtaatatgtacagaaaccactaaaaaattaactttgaaattataatttttaaaaatcaacaaaggaattaaaatgttacaccaaaaacatttatgcaacctgtaaaagttagtgaagggaaagcagaaggacaaaaaactattgtagtcatagtcagactactggaggacaaagaaaaaatcttgaaaggagcaagagaaaaacgaatgctcaagtacaagagaacaagaatatgagtaagaggtgaattattgtcaaaaatagtggaggccagaagatacgaaacaagacaaggccaaatagcagacataagtcccataaatagactgggtgcagtagctcaagcctgtaatcctagcatcttgggagtccgaggcaggagaactgcttgagcctaggagtttgagatcagcctaggtaacatagggagacctcatctccactaataataaaaaattagccaggaatggtggtacatgcctttggtcccagctacttgggaggctgaggccagaggatcacttgagcccaggtggtcaaggctgcagtgagccgtgttcctgccactgcactccagcctgggtaacagagtgagaccatgtctcaacaacaacaaaaaatcccacataaataactacattaattgtgcatgaactaaacacccactcaaaaagcagagagtatcagactagattttttaaaaagaaaattcaactttgaatgaaagtgacacatatttcattaaaaaaagcaaataggttaaaagtaaaacaatggaaaatgatataccatacaaagagtaaccaaaagagagctagagttgctaaattagtataagaaaatacagacttcagaaaaagaacaattgctagagacaaacagggtcatttcataatgaaaccagcatgaatacgactaggaagatatagcaattataaatatatacacgactaacaacaaagattcaaaatacgttaagtaaaaaaatgagcagaactgaaaagagaaatagacaaaaataatatcccattctcaaaaaatggaaagaacagctagacagaaatttaacaaggacataaaagacttgcacaacatcattaatcaaattgacctaactaacatttatagaatattccgtcttgtgactgcagaaggcaaattctttccaagcacacaaagatgattttccaggataaaccatatgaaaccatatgctaggccacaaaacaaatctcaatacatttacaaatatcaaaatcataaaaagtatgttcacaaatcttggttgaaattaaattagattcacaatagaatatttgaaaataaacaataagcctctaatagatcaaagaataaatcacaagaaaaaaattcaaaaatacattgaattaatgaaaacaatttttttcaaaatttatgggttgcataatgcttactataatgtataattagtgaatgcaactatcagagagaagttactgttttaagcacctatgtcagaaagaagaaagatctcaaatcaacaacttaagtttcaacctaaaaatgtaaaataaagagcacaataaacccaaaacaagcagaagtaaaggataagtaatagaataaaaataaatgaagtagaaaatcaaaagacaaaacacaattttaaaacaaaaccaaaagtttttttttgtttgttttgtttttgttcttctgagacagagtctcgctctgttgcccaggctggagggcagtggggcaatcttggctcactgcaacctccgcctcccgggttcgaccgattcacctgcctcagcctccggagtagctgggactacaggcgtgcaacaccacgcccagctaatttttgtatttttagtagagacggggtttcaccatgttagccaggatggtctggatcttttgacctcgttatctgcctgccttgtccttccaaagtgctgggattacaggcgtgagccactgcgcccggcctgaaagttgtttttatgattaataacattgacaaacactggggtagactgaccaagataagaggaaggaccaaattaccaaaatcaggaatgaaagaggagacagcactagcaatcttagaaagagaaaaaaaactaaaaaggaatattacgacaattgtatgctaacaaattagacaacttaaataagaggaacaaattcctagaaagacacaaattactgaaatcgattcaaaaagcaatgggaattctgaataatcctctaacaactaagtaaattgaattcataattttgaaatgttcccacaaagtaaatcccaggctcagattgtttcactgatgaattctataagctacttaaagaaaaaatgatggactatcagctcttgccacttcttttttcctaatttttaatttttatgggtacacagcaggtgtatatatttatggggcatatgagatttttttgatacaggcatgcaatgcataatagtcacataatgaaagatggaatattatagataccctcaagaatttttcctttgtattacaaacaatccaattatactcttagttatttttaaatgtacaattaaattattattattgaccatggtcaccctgttgtgttatcaaatactaggacttattcatttattcatttttttaacccactaaccatccccacctcccatccaacccccccagtacccttcccagcctctgataatcagccttctactctctatatccatgggttcaattgttttgatttttagatactacaaataataagtgaccccgtctctactaaaaatacaaaaattagcaaggcgtggtggcgggcgcctgtagtcccagctactcaggaggctgaggcaggagaatggcatgaacctgggaggcggagcttgcagtaagccaagatcacgccactgcactccagcctgggcgatagagcgagactccgtctcaaaaaaaaaaaaaaaaaaaaaaaaaaaaagtgaaaacgtgatgtttgtctttttgtgcctggcttatttcacctaacataatgatctccactttcatccatgttgttgcaaatgactgaatctcgctatattttatggctgaataatactccattgtgtacaaataccacattctctttatccagtcatctgttgatggacccttaggttttttccaaatctttactattgtgaagagtgctacaacaaacatgggagtgcaaatatagcttcaatatattgatttcctttctttgggatatatactcagcagtggtattgctggattttatgctagttctatttttagttttttgaggaatctccaaactgttctccaaagtggctgtactaatttacattcgcaccaacagtgtatgagggttcccttttctccacatccttgccaggatttgttattgcctgtcttttggctataagccattttaacttgggtgagatgacatctcattgtagttttgattttcatttctctgatgtttaatgatgttgagcaccttttcatatgtctgtttgccatatgtatgtattcttttgagaaaggtccattctaatcttttgcccatttttaaattggattattagatttttccccccaatagagctgtttgcactcctgacatattctcgttattcccttgtcagatggctagtttgcaaatattgtctcccattctgtgggttgtctcttcaatttgtttattgtttcctttgctttgcagaagctttttaacttgctgtgatcccataagttcatttttgctttggttgcctgtgcttatcgggtattattcaaaaaatgtttgcccagactgaagtcctagagaatttccccaatgtttccctgtactagtttcacagtttgtggtcttagatttaagtctaaaccatttttatttgatttttgtatatggcaagacataggggtcttgttttattcttctgtatatggatatccagttttcccagcaccatttattcaagagactatcttttccccagtgtatgttcttggcacctttgtgaaaaaggagttcactgtaggtatgtagatttgtttctgggttctctcttctgttccattgtgtgtctgtttttatgccagtaccatggtgttttgattaccatatctttctagcataatttgaagtcaagtactgggattcctacagttttttcctttttgcttaggacagctttggcgattctgggtcttttgtgtcttttgtggttccatataaatttgggattgatttttagggttgctttttctatttctgtgaagaatgttattggtatttttatagaaattgcattgtatctgtagattactttggatagtatggacattttaaaaatagtgattgttccaatgcatgaacatggaatacctttccattttctggtgtcctcttcaatttttttcctcagtgatttatagttttcattatagagatttttcattcattcggttaagtcgattcctacgtatttaattcatttgtcgctactgtaaatgggactactttttaaattttctttttcactttgttcagttggcatatagacatgctactgacctttgtatgttgatttttgtatcctgcaactttattaaatttatcaattctaggcattttgtggtggagtctttaggttattccaaatataagatcacatcatctgcaaacaaggataatttgatgttttcctttccaatttggatatcctttatatctttctcttatctgatcactctagctaggacttccagtactatgttgaataacaatgatgaaagtgggcatccttgtcatgttctagatcttacaggaaaggctttcagtttatccccattcaatatgatactagctgttcatctgtcatatgtagcttttattatgctgagatatgttccttctatacccagttttttgagagattttatcatgaagggatgttgaattttaccaaatgccttttcatcaaatgaaatgaacatatggtttttgtccttcattctgttgatatcatgtatcacattaattgatttgcatacgttgaaccatccttgctttacagggataaattctacttggtcatgataagtgacatttaaatttgaatttgtttttctaatattctattgagagtgtttgcatcaatattcgtcaggtacattgacctgtagtgtttgttttttgttttttgttgttgtttttttttctggttctttgtcttgtttgggtatcagggtaatactggtcttgtagaatgagtttgaagtattccctctgcctcctctattttttggaatagttttaggattggtattagttctttaaatattggtagaattcagcagtaaaaccattgagtcaggcttttctttattggaagactttttatcatggcttcaatctcattgcttgttattggtctgttcaggttttggatttcttcatggttcaatcttggtaagttgtatgtgtccaggaatttgtccattttttctagattttccagtttattggcatgtagttgctcatagtagccactaacgatcctttgaatttctgtagtatcagttttaatgtctttttcatctctggttttatttgtttgaatcttctctctttttttgttagtctggctaaagtctgtcaattttgtttaactttttaaaaaaacaactttttgtttcgttgatcttttatattttcttcatttctgtttcatttatttctgctctgagctttattatttcttttattctactaattttgggtttccttttctagttctttaagatacaccatcaggttgtttatttgaagtttttcttttttgatgtgggcacttatagctataaacttcccttatggctccactgtattccatagattttggtaagttgtgtttctgttagcatttgtttaaaaaaaaattcaatttccttcttaattttttaatttacccactggtcattcagaagaatatttaatttccatgtatttgtatagtttccaaaattcctctggttactgatttctagttttattccattatggtcagaggatgcttgatatgatttcaattttgtgagtgttttgagacttgatttgtgacctaacatatggtctctctctgagaatgatccatcctgcagttcttggataaaatgttctgtaaataactattagatccatttggtctagagtacagattaagtctaatgtttctttgttgattttctgtctggaagatctgtcaatgctgaaagtggggtattgaagtcttcagctattatcgtattggggtctagctctttctttagctatgataatatttgctttatgtatctgggtgctccagtgttgggtgcatatatatttaaaattgttaaatattcttgctgaattgacccctttaccattctatagcgaccttgtctctcttatagcttttgtcttgaaatctattttgcataagtacagcaactcctgctcttttttggcttccaatggcatggaatatcattttccatctccttattttcagtcagtgtgtgtctttataggtgaagtgtgtttcttgtagtaaagacttactcctgtcatattgttatttattttctggttgatttgtggccttctcttccttctttctttgtttccttcctatattcctttcagtggaggtgattttctctggagatgtgatttaatttcttgctttttattttttgggtacccattgcatgctttttggtttgaggtaaattaccatgaggcttgcaaatactatctgatagcccattattttaagctgataacaacttaacaccgtttgcacaaacaagcaaaaaaaactaatgaagactgtaccccataacttcatcccttccacgttttaatttttttgttgttactgtttataccttcttattgtactatgtcttgacaagttgttattattatttttattggttcatcatttcatctttctacttaagagtagtttatacaccacagttgcagtgttataacactctgtgtttttctgtgtacttaacgattaccagtgagatttgtaccttcaggtgatttcttattgctcactaacatcctttcctttctgattgaagtactgttttagcattcttgtaggacaggtctagtgttgatgaaatccctcagcttttgtttgcctgggaaagtctttatttctccatttttgaagggtaatttctccagatatactattctagggtaaaagttcttttctttgagtattttaaatatgtcataccactctctcctagcctgtaaggtttccactgaatagtctgctgccagacatattggaaccccattgtttgttatttgtttattttcatttgttgtttttagaatcctttacccttgacctttgggagtttgattattaaatgccttgagattgtcttctttgggataaatctgcttggtgttctgttgccttcctgtacttggatactgatatctttctctggatttgagaagttctgttattatccctttgaataaactttctacccttgtctctttctctacctcctctcaaaggccaataactcttcaatttgcccttttgaagctattctctagatcccgtagacatgcttcattggtttttattctttttttcttttgtttcctctgactctgtatttttaaatagcctgtcttcaacaagttcactagttctttcttctgcttgattaattctgctattaaaagactctgatgcattcttcagtatgccaactgcatttttcaactccagaatttctgtttgattccttttaattatttcaatttctttgttaagtgtatctgatagaattctgaatcccttctctgtgttatcttgaatttctttgagtttcctcaagaaagctattttgagttatctgtctgaaaggtgacatatctctctttctctgggattgatccatggtgcattatttagttcatctaatgaggtcatgttttcctggatcatctttgtagatgttcatctgtgtctggggattgaagtgttaggtatttattgtagtctttacagtctaggttttttgtgcccatccttcttgggaaggctttctagatatttgaaaggacttgggcattaggatgtaagctgtatctgatttagggtggaccccaagcccagtagtgctgtggttcttgcagacttgtagaggtactgccttgatggtcttatacaagatctggaagaattctttgaattaccagacagagacttttgttttcttctcttactttttcccaaacaaatggaatctctttttctgctctgagccacctggagctgagggtggagtgacacaagcaccccctgtagccaccatccctaggagtgtactggatcacacataaagccaacacagcactgggtcttacccaagccctgctgtaatccctccctggctaccagttatgtatgctaaaagccctggggctctataatcaggaggtggcaaagccagccaggcctatctccttcccttcagggcgtcaagttcctctaggccctgggtgggtccagaggtgccatccaggctagagtcaaaaaccttagaagtccacctggtattctattgtactgcttctgagatggcactcaaaccacaagacacggttcttcccactcttctctcccctttccaaaggcagaaaagtctcaccttcaggccactgccacctcgggcccacgatgaatattgccagacaactgccaatgttctcttaaggcccaagggctcttcagttagcttgtcatgaatgcctcctggtctaggactcacccatcggggactgtgctcccctctggcccagggcaggtccaaaaattccatgcaagagccaagtcctggaatcaagaactctaatggctacttggtgctctatcgccctgtagctgagctggttcctaaggtgcaagataaagttttatttactttcccctccacttttctcaagcagaaagaatcttgacccatagccaccacagctgggaatgtgctgagtctcacctgaacccatcaagtctcagtgtcttaccaaggccctcaacatcgtacttgagtatcactgctggttagtcagaggccaagagctcttcagttaggtgattaatcctgccaggactgggttcttgccttcaaggcagcaggttcccttctggtctagggtgtgtctagaaatgtctgggagatagggcctggaaaaagggtctcatgactgtgactgttgccttatcctgctgtggctgaactggtatccaagatgtaaaataaagtcctccccactctttcatctcctctcctcaggcaaaggaaggggtctctttttgagccatgagctgtgcaacttagggttaggggagggatgatgtcagtactcccttagccaccctggctggtgtctcagtaggtcacatgctcccccagtccattgtctctgggctcagttcagtcctaggactgcctaggagttgtagtctttgtgtcctagactatgttttaagtttatttgataacccagagcactttagcccatggtgtcaaggcttgtaggaacttaagttctgatgctgggatgagcaattcctctctggctagggctggtttaaatgcaccctccttatgtgggcatcagctgagtttggtctggttttgcttcctgctataacaagggcagcactaagtttaatgtcttacagttgctggctctcacactccccagagcacagaaacaccctcctcacaatgctgccactgcaaggggatgagaaatgggtgatgtccttgatttcagactgttttttgtacctcttcagtgtctcttttggtaatatgaaattaaaaccaggtattgtgagtgctcacctgatttttggttcttacaaggtgatttattgtgcatgtagatagttgtttatttggtgtgcttgcagggggcaaggggaattggcagagccttttattttatcatcttgctctacccctcatcttttatttttaacatttattttaggttcagggatacacgtgcacgtttgttgcataggtaaactgcatgtcttgggggtttgatgtacagattattttgtcccccaggtaataagcatagtgctcaataggtagttttttaatcttctcccttttcccatcatccaccctcaagtaatccccagtgtctattgttcccctctttgtgtccatgtgtcctcattgttaggtcctacttaaaagtgagaacattcagtatttatttttctgttcctgtgttattttgcttaagataatggcctccagttccatccatgtttctgcaaagaatatgatctcattcttttatatggctgcatagtattccatgacatatatgtaccacattttctttatccagtctaccattggtgggcatctaggttgatttcttgtctttattattatgactagtgctgcaatgaacatgtatgcatgtgtctttatggtagaatgatttatattcctttgtgtatatacccaataatgaaatttctgggtcaaatggaagttctgttttaatttctttaaggaattgccacactgatatccacaattgctgaattaattttaattcctaccagcagtgcataagcattcctttttctccacaatcttgccagcatctgctattttttgactttttaataatactgattttgactagtgagatggtctctcattgtggttttgatttgcatttcactaaaaattagtcctgttgaccatttttcataggtttcctggccacatgtatgtcttctttgaaaattatctgttcatgtcatttgcctgctctttaatggggctgtttgatttttgcttataaattcatttaagttccttaaatgaatcttctagatattagacctttatcagatgcatactttgcagatattttctcccattctgtaggttgtctgtttattcagttgacagtttattttgctgtaaagaaactctttaattaggttccatttgccaattttgtttttgttgcaattgcttttggcatcttggtcatgaaatcttgcccattcctatgtctacaatggtatttcctaggtttcttccagagtttttagagctttaagttttatatttaggtctttaatctttcttgagttaatttttgtgtatggtgtaagaaaggagtccaattccaatatctttcatatggctagccaattattccagcaccatttgttgaatatgtagtcctttccccactgcttgcttttgtctactttgtcaaagattagatggctgtgtgtgtgtggcattatttctgggctctccattctgttccattggtctacgtgtctgtttttgtaccagtaacatgctgttttgattactgtagccttgtagtatagttggaagtgaggtaacatgatatctccagctttgctcctttggcttaggattgccttggctattcaggctcttttttggttctgcatgaattttaaaacagatttttttctaattctcagaagaatgtcattagtagtttgataggaatagcattgaatatgcacattcctttgggcagtatggccattttaatgttatacaggaggttctagctagtgaaatgaggaaaaatatagcaacagtacccagactgcaaaggacgaaatagtactctttatccacagatgatatgagtctgtctgtaattagaaaatcctaaattctgataaatctgcacaccaaaaaaaaaaaaaacctactgaagtaatgttagtttagcaaggtttcaggatacagaatcaatatttaaaacccaattgcatttccatacactagcaacaatctgaaaattaaattaataaatcatttccatttataatagcttcaaaaagagtaaaataattatgaatacatttaacaaatatgtgcataatttgtatctgtaaactaaaaaatattgctgagaaaaattaaagaagatttaaatacatacaaatgcaacctatgtttatgaattggaagactgaatattgttgtgatagactgaataatggccctcaaaagatgttcatatctaatctgcagaacctggagatttgttacttaacatgataaaaataactttgtagatgtaattgaggatttggggatgggaagatgattgtcctagattaccttgctaggcccactgtaaccacagggtccttagaagagaaagttaggagggtcaaagtcagtaataggagatgtaataatggaagccaaagttgggaatgatgcaaagaagtggacacaaaccaaggaatataagtaaactctagaagattttcagcttcatcttctaggcggagaaatagattctctcctgacagcctccagaagaaactagttctaccaccaccttaacattagcccagtgagattgatttttcaactttgtacttccacaactgtaagataataaatccatgtttaacaataaagttaaaatacaacccagcaattttactccccaaccctaaaagaaatgtttaaatatgcccacatggcggtggtggtctctgtggctcagtggacttagtctttcctgcctgctggctctgaagaggccaagcagtccagataagggggatttgtccagatgagggggatttctccccagtgcagtgcagcgcaaccgatccaccatggggcagccagagcgctttgttaagcagatcctggatccagtgccttatgactgggtgggaccctccaacaggcactgccagacaccttatacaggagcatttccaccagcatcaggtcagtgcccctctgggacagagctcccagaggaaggaacaagcagtcatctttgctattctgcagcctccactggtgacacctcccagtgcaagagggacccagatgaatagggtctggagtggaccctcagaaaaccacagaaaccctatggaagagggtcttacctgttaaaataaaaacagataaacagcaacaacaacaacataaacaaaaaagaccccacaaaaaccccatccaaaggtcagcagcctcaaagttcgaaggtagataagctcatgaagatgagaaaaaaaatcaacacaaaattgctaaaaactcaaaaagccagagtgcctcttcttctccaaatgatcgtaactcctctccaacaaaggcacagaactgggctgaggttaagatgcatgaactgacagaagtaggcttcagaaggtgggtaataatgaacttcactgagctaaaggaatatgttttaacccaatgcaaagaagctaagaaccatgataaaacattacaagagctgtcaaccagaataaccagtttagagaggaacataaatgacctgatggagctgaaaaacacaacacaagaacttcacaatgcaaccacaagtattgatagccacatagaccaaacagaggaaagaatctcagagcttgactatctttctgaaataaaacaggcaaacgagactagagaaaaaaaatgaaaaggaacaaacaaaacctccaagaactatgagattatgtaaaaagaccaaacctatgactgatcagggtacctgaaaaagacagggagaatggaaccaagtttaaaaacatacttcaagatattatccaggagaacttccccaacccagcaagacaggctaacattcaaattcaggaattccagagaatcctggtaaaatactccatgagaagatcaaccccaagacacattatcagattctccatggttgaaatgaaggaaaaagtgttaagggcagccagagagaaaggcaggacacctacaaaaggaagcccatcagactaacagcagacctctcagcagaaaccctacaagccagaagagattggggaccaacgttcaacattcttgaagaaaagaatttccaacccagaatttcatatctggccaaactaagcttcataagcgaaggaaaaataaaatccttttcagacaagcaaatgctgagggaatttgtcataaccaggcctgccttgcaagagctcctgaaggaagcactaaatatggaaaggaaaaaccattatcaaccaccacaaaacacactcaagtacacagaccaatgacactatgaagcaactacattaacaagtctgcaaaataaccagctagcattatgatgacaggatcaaattcacacataaaaatattaaccttaaatataagtgggctaaattccccaattaaaagataaagaatggcaagctggataaagagtcaagacccatcagtgcgctgtattcaagagacccatcttatgtgcaaagacacccataggctcaaaataaagagatagagggaaatttgccaagcaaatggaaagcagaaaaaagcagaggtcatgatcttagtttctgacaaaacagactttaaaccaacaaagattaaaaaagacaaaggagggcattacataatggtaaagggttcaattcaacaagaagagcttattatcctaaatatatatacaccaatacaggagcactcagattcataaaacaagttcttagagacctgcaaagagactcagactcacacacaataatagtgggagactttaacaccccactgtcaatattagacagatcattaagacaaaaaattaacaaagatattcaggacttgagctcagctctggatcaagtggacctgatagacatctacagaactctccacccaaaaatgacagaatatatattttttcagcaccacatggcacttactctaaaattgatcacataattggaagtaaaacattcctcagcaaatgcaaaagaactaaaatcataacagtctctctgaccacagcacaataaaattagaactcaagattaagaaactcacttaaaaccacacaactacatggaaattgaacaatctgctcctgaatgactcctgggtaaataatgaaattaaggcagaaatcaagaagttctttgaaactaatgagaacaaagagacaatgtaccagaatctctgagacatagctaaagcagtgttaagatgaaaatttatagcaccaaatgctcatgtaaaaaaagccagaaagatctcaaattgacatcctaacatcacaactagagaaccaagaactaacaaactctaaagctagaggaagacaagaaataactaagctcagagaagaactgaaggagatagagacatgaaaaacccttcaaaaaaaatcaacaaatccaggaacctgttttttgaaaaaattaatcaaatagatagactgctagctagactgataaagaagaaaagagagaagaatcaaatcaacacaataataaatgataaaaaaggatatcaccactgaccccacagaaatacaaccaaccatcagagaatactataaacacctctatgcacataaactagaaaatatagaagtggataaattcctggacacatacaccctcccaagactgaaacagaaagaagctgaatccctgaataaaccaatgagttctgaaattgaggcagtaatacatagcctaccaacaagaaaaagcccaggaccagaaggatttacagctgaattctataagaagtacaaagaggagctgataccatttcctctgaaactattccaaacaattgaaaaggatagactcctccgtaactcattttatgagaccagcatcatcctgataccaaaacctggcagaggtacaacaaagaacacttcaggccagtatccctgatgaacatcggtgcaaaaatcttctataaaatactggcaaatcaaatccaccagcacataaaaaaagcttatccaccatgatcaagttggcttcattcctgggatgcaaggctggttcaacatatgcaaataaacaaatgtaatttatcacataagcataactaaagacaatatccacatgattatctcaatagatgcagaaaggtccttcgataaaattcaacatcccttcatgttaaaaactctcaataaattaggtattgaaggaacatacctcaaaataataaaagccatttttgacaaaaccacagccagtgtaatactgaaagagcaaaagctagaagcattgcccttgaaaaccggcacaagataagaacgttctgtctcaccactcctattcaacatagtattggaagttctggccagggcaatcaggcaagagaaaaaaataaagggtattcaaataagaagagagaaagtcaaatagtctctgtttacagatgacatgacctacatctagaaaaccccatcatctcagcccaaaagcttcttaagctgataaacaacttcagcaagttctcagatataaaaccaaaaatcacaagcattcctatacaccaacaacagataagtagagggccaaattattaatgaatttttattcacaattgctacaaagagaataaaatacccagcaatacatctaacaagggaagtgaaggacctcttcaaggagaactacaaaccattgctcaaggaaataagagaggacacaaacaaatggaaaaacgctccatgctcatggataggaagaatcaagatcatgaaaatgaccatactgcccaaatttatagattaaatgctatttccattaaagtaccattgacattcttcacagaattagaaaaaaaactattttaaaattcatatggaaccaaaaaagagctcatatagccaagacaatcttaagcaaaaataacaaagctggagacatcattttacttcacctcattgtactaccaggctacagtaaccaaaacagcatggtactgatacaaaaacagacacatagaccaatggaacagaatagaaaactcagaaataagaccacacatctacaatcatctgatattcaacaaacctgacaaaaacaagcaatggggaaaggatttcctatttaataaatggttctgggagagctggctagctgtatgcagaaaattgaaagtgcaccccttccttataccttatataaaaaataactcaagatggattaaagacataaatataaaacccgaaagtataaaaaccctagaagaaaatctaggcaatgccattcaggaaataggcatgggcaaagatttcatgacaaaaatgtccaaagcaattgcaatgaaagcaaaaactgacaaatgggatctaattaaactaaagagcttctacgcagcaaaagaaactatcatcagagtgaacctacagaatggaagaaaatttttgtaatctattcatctgacagaggtctgatatccagaatctacaaggaacttaaacaaatttacaagaaaaagaaaacaccattaaaaagtgggcaaaggacatgaatagacacttctcaaaagaagacatttatgtggcaagaaacatatgaaaaaaagctcaacgtcactgatcattagagaaatgcaaatcaaaaccacaatgagatactatcttatgccagccagaatggtgattattaaaaagtcaagaaaccacagatgctggtgaggctgcagagaaacaggaacgcttttatagcattggtgggaatgtcagttagttcaaccactgtggaagacactgtgatgattcctcaaagatttagaaccagaaatatcatttgacccagcaattccattactgggtatatacccaaaggaatataaataattctattataaagatacatgcacttgtatgttcattgcaacactattcacaatagcaaagacatggagtcaacctcaaagcccaccaatgattaactggattttttaaaaatgtggtacatacacaccatggaatactatgcagccataaaaaggaatgagatcatgtcctttgcagggacatggatggaggtggaagccattatcctcagcaaactaatgcaggaacagaaaaccaagcaccacaggttctcacttataagcgggagctgaacaatgagaacacagggacacagggagggaagcaacacacactggggcctgtcagcagtgtgtgggggatgggagagcatcaggacaaataactagtaatacctaggtgatgggttgacaggtgcaacaaatcaccatggcacacatttacctatgtaataaacctgcacatcctgcacatgtactttggaacttcaaatttaaaatacatatatatgctgggccaggcgcagtagctcacacctgtaatcccagcactttagaaggccgaggcaggtggattacctgaggtcaggagttcaggaccagcttagccgacatcgtgaaaccccatctctactaaaaagtacaaaaactagcctggcatggtggtgggctcctacaatcccaactactcgggaggctgacacagcagaattacttgaacccaggagatagagattgtggtgagccgagatcacgccattgcactccagcctgagcaacaagagactccatctcaaaaaaaaaaaaaaaaatatgtatatatatatatatgtatgtgtatatatatatatatacatatatatatatatatacatatatatatatatatatatgtatatatatatatgcccacatgagtacttgtacaggaatgttcataatagccaaaaactggaaacaatctaaatatccatcagctggtgactagataaacataaggtgacatatccacataatggaaaactattcagcaataataaatgaaatattgacacatgctatgtttttaatagataaaacttaatattacattaaatggaagaagcaagatataaaacactacatattgtatgattccatttatatgaaatatccagatcatgcaaatttataaaaacaaagcacagatccatagttgcttaaggctgggatgggagggaagattgaaaattgctcaagaaaattttgggggataatggatatgtgctaaaactggattttgatgatgactgagcaactttatgaatggccaagaatcattgaattgtacactttaaaagggtaaattttatgatatgtaaattatacctcaataaagctataaataaaaggtatgcatatttatgaggagatagcattgctcatatatatatgctttgcacatttaaaaagtttgttatctagatggtgactacacaattcaaatgttctactcctgaacttttccttgcatttgaaaatgttcaaaatataaattagaaaaattctttgaactttacatttattgcagtataacctataaattataaagatgagagcattgaataatactgtatgctactttatcatattaaatgtaatttaaaattattaactattatgatgactgcttaatttatttttaattattttaaggtctttataagtgtacaggcatttatataatttcaggagagcattcttataaagaactgagcatcaggcttttactcagaaacatagccctacataacattcatcctacaaaaaaaaaaaaagcagtttttattcttatgatttagatttctggccccttttctggaaaaatagcctgctggaaatgtgctaactgcctttcaaatgttattcacatgtatcagttctttttactttttatttcacaacgaccattaaagaactttctatatctaaattcattacagagacattcactttaaatatccttgattgttgataaaatattatctcagtgttttggtctttgcattttaggttggtgccagctatatttatgtcttctcagagtcataacattccagacttagaaggacagagacgtttagttggatacatgacagaaagtctatagcataaaaaatagacgcatttctaggctatagcctacacgttggtgagtaaattttattttcactcacattcataactattttacaataatgcatttcatttttaaaattagatatgtcttttctttccccagtgtgctttatttctctattgaaacattcacaaactagtcataaatgtaatagtagtacaatgtcttttcattagccaatattgttaaaacataggccctatcttctattttcaggagaagctcatcatttacacttttaaattgagttgaacaatagtgtctcagaaaaataataattttaacaattaaaatactgtaaaatattacttatatgctttacattatcagagacatttcacaagtgtacagacgtgtatcttcataggatttattctatgtattcttagtgagcaattaagagttttcttaagagtaatttggccctatatgtgcttgtttttttcttgcctcattcactgactttatctaatccccaaacgcagagcagagggaaggtaaagatgcaatggcacactactgggaaaacctcctctgacagccacccttccccagggtctctgcccactcagtgcccccagccctgtacacatttctcgcttgtgccacttccctggggatgcagttgtttctttacatgtctgcctcccactctagggtgtgcttcccttgaatgcagaatccacgttttatttatctttgtatccccagtgcctggggcatccttggatctcaataaatgtagcctttgaatagcagctggttagaattcagattatttcaggtcaacatttattgaacatcttctatttaataaatgctcaggtcaagtcggtgacacaaaaatgagtggatataattccattgaccacaaggaagtgtgaaaccatttaaataatgaagaacaatcttttgtggttagaaggtttttacatttttttatctcacctactaccctttatgtgaaattacatttaacttatatttaggaagcaaatttttaaattattcacttgtaatgcttattatatataattacatttctataattctaaaatgttaataatagctaactcttgcctaggaccatcctaagtgctttacatacaataccatatatcatttacacacaatactttacatatactatacatatcatttatatgcaatatgttacgtacactgctatatgtgtcatttattctccacaccaataataaattgttgcttattttataagtgaagaaacagaaccaagaggaaaataaataatttgtacaggtaataacacagctaagagataacagagccaaactttgaacccactcattttctcacccaatgtttagcgtaatattttcagcaaatctacaatttaaacctcttcctctatcagtgcttcctcttggttggtaaaaattaaaaaacaaaacaaaacagaaatcaatgcttatttttggttggtgaaagctaaaaacaaaataaacccctcttctatacaagtttagtattgtctagtgaatatgtttaaattcagaaaaatccacttgttcagaatagttaaaataataaggcaagaaattatgacacagtctgatatcatacaagaattgtggtaacaaggtagttgctgatggttgtcaaatttgaacagtagcttcctgttgaaaaagagaagtcccttgacaataagattcaaagctgggatgaacctctgccgccatccgaggctgagagccttgtctatccaaacataaaatgacccaacaatgactgtgggtcccatgaactcaccgtctatttgttctgagaaaactgggtcaatgtttactggtctgaagaaagaaatgaaaatagtcaaaatcacaaggattaggatggtaaacaagtacaaattgggtcaatgtttactggtctgaagaaaaaatgaaaatagtcaaaaatcacaaggattaggatggtaaactacctccagtgcgggtagcaaaatatatatcatgcttgcgttctgtgtaagctcccagtcttctctccggtgtggagatctacttattggtaatgcatttattatttttatttttcctactttccataagtaattgagacaaattaccttacaaacccatatatgtaaacactattctttaacatttaaaagagaataataacccaggagagagggagagatttatatcagcaaccaatgagaagatagggtaatgcaattgagagttttgttgaccattgaacttcttggtagccaaggctaaaagagaaacattataattatatggtttgcattatctgataaataatgcaatttattctttggaacacataaattttttcccaacataaaatttcaagagaaacttccctcagggctatttaaataatgggcaatattaaattaacaaataaacagaagttttattaaaaatgcagaaatttatactctttgttaccttctgaatgattatctttttatgccacatatttacttgcatttatatagcattagacattttgctctataaatagtcccatataataattacataatgtcaaataattagagaagctgtttttacctaaaaattatatgaacagaacctaagccagatctgcattttttttaagagactggattttgctctgtcacccaggctggagagcaatggcacgatcacagcttactgcagcctcgacattccaagttcaagtgatcctcccacctcagcctcccgagtagctgggaccacaggcatgcaccaccatgcctcatttttttatttttgcagagatggggtctcactatgtttctcatgctgttactgaactactgggctcaagcaatcctcctgcctcagcctcccaaagtgctgggattacagacatgagctactgtgcccagccccagatctgcatttctgttccaacacttaatataaataaaaattgctgaacacacttaaatacatagcccacagaccctataaagcaaccacacaaaacaaccagctaacaactttgtaataagatcaaaacctcacatatcgatattaactttgaatgtaaatggtctaaacaatccacttaaaaggcagagtggcaagttagatttaaaaaataagacccattcatctgctgtcttcaagagacccacctcacaagtaattacacccataggatcagggtaaagatttggaggaaagtctatcttgcaaatggaaaacgaaaagaacaagtgtccttattattgtatcagttaaagcagactttaaaccagcaatagtaaaaaaggacaaagaaaggcattacataataataaaggattatatttaacaagaagacttaactatccaaatatatgcgcacccaacattggcatacttgggttcataaaataagtacttctaaacctacaaaaagattttgacagccacacaataataatgggtgacttcaacaccccactgaaaatgttagaaaaattatcaaggcagaaaactaacaaagaaattctgaaattaaatttgacacttgaccaattggacctaatagacatctacagaatactccacctatcaaacacaaaatatacattcttctcatctgcacccagaatatattccaagatcgaccacatgctcagccataaagcaggtctcaataaactcagaaaaaaaaatgaagtcataccaaacatattctcaggccacagtggaataaaaatagaaatgaacaccaagaagatctcttaaaaacacacagttacatggaaattaaacaacttgctcctgaatgacttttggataaacagcaaaattaaggcagaaataaaaaattatatgaaataaatgaaaccagagaaacaacataccaaaatctctggaatgcaacaaaagcagtgttaagaggaaagcttatagcactaaacatctacttcaaaaagttaaatagatcccagaataatgttctgacatcacacctaaaggaactagagaaataagaacataccccaaacctagcagaagaaaagaaataaccaaaatcagagcagagctgaatgaaatcaagtcccccaaatccataaatagagtcaaagaaacaaatgttggctctttgaaagcataaataaaatcaatagactgcaaaaagggatacaaataggaaaacaagaaatcaaactatctctcttcactgattacatgattctacacctaaagaaccctaaagactctgccgaaaggctcctggaactgataaataacttcagtaaagtgtcaggatacaaaattaatgtacaaaaatcagtagcatttccacacaccactaacttttaagctgacagccaaatcaagaatacaatccaatgtataatagccacaaaaataaattaaatacctaggaatgcatctatccaaggaggtgaaagatctttacaaggagaattttaaaagactgctgaaacaaatcatagatgacaaaaacaaatggaaaaacgttccatgctcgtggattggaagaatcaatattgttaaggtggtcatactgcccaaagcaatctacagattcaatgctattcctatcaaagtaccaatgtcatttttcacagaattaaaaaacgctattctaaaatttatatggaaccaaaaaagagcctgaatagccaaggcaatcctcaggaaaaaaaaaaaagccagaggcattacattacccaacttcaaactatactaaggctacagaaaccaaaatagcatggtactggtacaaaaacagacatatagaccaatggaacagaaaagagaacccagaaataaagctgtgcacctacagccatctgatcttcaacaaagtcaacaaaaataagcaatagggaaatgactctatttaataaatggtgctggaatagctggttagccttacgcagaagaatgaaacttgacccctgcctttcaccatataaaaaaattaactcaagatggattaaatatttaaatgtaagacgtcaaaatataagaatcccagaagaaaacctaagaaacaccattccagacattggccttgggaaagaatttatgactaaatccccaaaagcaattgcaaaaacaacaaaaaaaattgacaaatggaacctaattaaactaaagagcttctgcacagcaaaagaaactatcatatgagtaaacagacagcctatagaatgaaaaaatatctgcaaactatgcatctgacaaaggtttaatatcccaagtctataaggaacttgaacaattcaataagcagaaaacaaccccattaaaaagcaggcaaaagacatgaacagacactgctcaaaagaagacatccaagcagccaacaaacatatgaaaaaaatgttcaacgtcattgatcactagagaaaggcaaatcaaatgagataccatctcactccaatcagaatggctatcgttaaaaagtcacaaaacaacagatgctggcaaggctatggagaaaagggaacatttatacactgttggtggcaatgtaaattaattaagcccctgtggaaaacagtttggagatttctcaaagaactaaaaacagaactaccatttgacctagcaataccattactgggtatatatccaaaagacaataaattgttctaccaaaaagtcacatgcactcgtacgttcactgcagaactagtcacaatagcaaagacatggattcaacctagatgcccaccaacagtggactggacaaagaaaatgtcatacatatacaccatggaattcttcgcagccataaaatagaatgaaatcatgtcctttgcagcaacatgaatgcagctggaggccattatcctaagcaaattaatacaggaacagaataccaaatatcacatgctctcacttgtaagtgagagctaaacattgactcatggacataaagatggcaacaataaatactggggactaatagaatagggagggatggatgggagacaagggttgaaaaagcaaatattgggccctgtgcttactacctgggtgatggaattaatcacacgccaaacctcagcatcacacaacatacccacacaacaaatatgcacatggaccccctgaatctaaaatgaaagttgaaattattatttttttatatggagtttcgctcttgttgcccaggctgcagcacaatggcaaaatctcagctcactgcaacctccgcctcccaggttcaagcgattctctggcctcagcctcctgagtagctagggttacaggcatgcgccaccacgcctggctactttgtgtgcgtgtatgtatttttagtagagacatgatttcaccatgttagccaggctggtctcgaactcctgacctcaggtgatccacccaccttggcctcccaaagtgttgggattacaaggcacaagccactgcgcctggcccaaaattattttttttaaagtatgaagggcacaatttcaagacaaaggacactcttctaactagaacatattagcttttttaaaaaaaacctggctgcatatctttattttttcccttttgccctaaacagatgacagcattgttcatggactggcaccagcacttgagaaacactaccacgggatatatacagaagtacaaagacacagttctggcttcaaatgaccctacaatcagctgggggatataaaatctaaacattgaaaacataataattaagtgataatccaacattaggaaaaacattataaagtataaaatcatttattatagaagggagagatccccaggaacttgggagcttagtggaagcttagtgatctgagctgtgtttgaagaatggagagatatcagaaattttagagggggactgtcagatagaaggactgtgtagaatagataaaagcacaatatatacaatacagctattggttcagtagcataaagcactcaaaatttctaagttgtagtttcatatttcagtttagtggaaccattgtgttcattggtgggaacatcccccccttggagactaaggtctctaaaccagtatagctcaaagttgccaggataagaagcagaatttctgtgagtgagatattacttggaattgtgagagtagccattcctactttcatcccttgatttctggacccatgtattctggccatggggacagcaacatataataacctctgattcaaagcataaatcgtttcctgtataatagagcccattcttttcaagtgttgtctcctaactacatcataactgagtcttcagtaagccattctacctttcagttaagctagctgcttctggatcatggagtatgtagtaagaccagttcattcaacagttatgatcccagtgctgcatttcttttgtagacaattagtttattgatcagactcaatactgtacagaaatccatgatgatggatagggcattctgagggtccttggatgcggtgctgacagaagcattatgagcaggaaatgtaaattcttatttagaatatgtatgcttcctaggaagatgaatctctgccacttccataatagaagatgtctaatgtaatcaatctgtcaccaggtgactggtcagttcccacagggaatggtggcatatccaggattccatcttggtatctgctgttggcagattggatactcaacagtaatattagacagataattcttcataaggagaagttcatgctgttaagcccatgcttagcctccatccctgccaccatagacactttattcatgggcccaataagcactagggtggctggtgttactgatatccacagaatgaataattatgcccccctgattattaagagtctcctctgcaatggatgcctgttgatgagcattgatattgggtacaaatatctgcagtctgtgtccattcagagagatccagccatatacctcttccccagacttccttgttaccaatattccaatcctattcagtgtcctcacttgacaaagcttcagtgtgacctggcaaggaaaaactatttaaagggcacagatccaatttcaaagaacaggccaaaaaggtgaattaagagctgagaggtaataaattgataactggcatgtcatcctacctagcacattatgccctcccctaacccatcatctaccaatccctttgaggggcacttcacctatgcacattgaaaagaccaggtatgtgtctgcctgaagggtttcaccttgctcttcttttaccaaggatgcttctttcccagatatccagatgacttgcccctcatctccttcaggtctttgcccaaatgccatccccttagtgatggcatccctggacacctcacactccctattccccttctctgccttattttactccataacacttattgacatataatgttatatctgtcttacttatttttagtctcttctccagaaaacaatctccacaaaaacagagatgcttttttgttcatttttgcatcctcagcatttaaaataatgcctggctcagagtaagctcttaataaatacgtgtttattgagtggttatagaaaacttagatgttctttgtgttcatttaagccaatggtgattgaaaagtctatggttcataaaaaaaaactataaaccatccagctgttcatcaacaggaagattgatatatattcccttatgtacaatggaaaattactcatcaataaaaaggaattaactcctgatacacacagcaacatggataattctttaaaaaaatgttgagcaaaagaagccagtttaaaggtaaatgctgtatgactccctttctataaagttctgtaactggtaaaactaacgttaagatgataaaaatcagagagaggggaagggagctcaagggtaccttctagggtgatagaaatgttgtatgcttgattggggtggaggtcacacagaaatatgcgcttgtcaaaactcattgaatgacacacttaaaataaatacatttcatcctatgtaaattttacctcaatgaaaaactggataccaatttaaatgcaaaataaatataaagttacaaaacaatctgtaatcccaatttgatgaatatctgttcattaaaccagaagaaaaattcaaggtcattccccagaaatcaagtcataaaagagattagctaagggcccaggaaaagctcctgtatagctgaatagggaaattgggaagtattaagtctctcctcaaacatttcgaattaagaggcctgtagttcctctttccatttttagtgtgggttttctaatcctgttatttctcattatgactactgctgttcaagcctgggtactggtttaattctagaaagagtcgcagttataaggatcgtaaattgttgaaagaggctacctagggaaatagtagtgtttacctccattacttttaaagaaagtctatgtacaggaatactgttaaaaatgagttatgaatgactacaattaaccatctatgcagagtctttgagtcacaaattcaattctcctttaagttcccatgattttgttatgttttgagttctattttgccattctgaaaatgatacacagtcatgcatcacttaatgatgggtatacattcttagaaatgcatccttaggtgatttcatcattgttcaaacaacacagagtgtactcacataaacctggatgatatagcttaccacaaacctaaggtatatggtatagcctattgcttctgggttacaaacctgtacagtatatgctactgtaattaatactgtaggcagttaacacaatggctatgacatcactaggtgaatttttcagctccattataatcttatgggactactctcatttatgtggtctgtcattgacctaaaaattattatgcagctcattactactataatttcttgaaattattgctacagttcagctgtgttttggagcctgaagggaacactttcattaactgtaaaaagtccctaaatttcatgatcttcctccgtcactttcaaacgaattcagattttgacctttacttcaaacgattgtaattattgttcctctgtttttagaatatatttgctacatgaattatattatcaatccactacacaaaagaatgtgtcaggtggttctatatagagaaatacagaaaaaaaaagaaaaatataatccagactatagtacctaacagcattccctgggtacagcaagaatggaagaagcactttgccattacacctaatagaaatcatccctatctctgagcatgttgctgaaacagaaatagcaacaaggaaatggacacactgacttccacaatggttaaactagtttacagtcacaccaacagtgtaaaattgttcctatttctccacatcctctccagcacctgttgtttcctgactttttaatgatcgccattctaactggtgtgagatggtacctcattgtggttttcatttgcatttctctgatggccagtgatgatgagcattttttcatgtgttttttggctgcataaatgtcttcttttgagaagtgtctgttcatatacttcgccccctttttgatggtgttgtttgtttttttcttgtaaatttgtttgagttcattctagattctggatattatccctttgtcagatgagcagattgcaaaaattttctcccattctgtaggttgcctgttcactctgatggtagtttctttggctgtgcagaagctctttagtttaattagatctcatttgtcaatttcggcttttgttgccattgcttttggtgttttagacatgaagtccttgcccatgcctatgtcctgaagggtaatgcctaggttttcttctagggttttttttttttttttaaattaggaaaacaattttatttacaatggcattaaaaagaatacaatgcttagaaattaacttcaccaaagaggtgaaagacttgtacactgaaaataacaaaacacttttttttttcttttttttttgagaccagagtctccctctattgcctaggctggagtgcagtggcaccgtctcgactcactgcaacttccgcctcccaagttcaagcaattctcttgcttcagcctcccaagtagctgggattacaggcgtgtgctaccacaccctgctaatctgtgtgtgtgtgtgtgtgtgtgtgtgtgtgtggttttaggtctaacatttaagtctttaatccatcttgaattaatttttgtataaggtgtaaggaagggatccagtttcagctttctccatatggctagccagttttcccagcaccatttattaaatagggaatcctttccccatttcttgtttttgtcaggtttgtcaaagatcagatagttgtagatatgtggcattatttctgagggctctgttctgttccattggtctatacctctgttttggtaccagttccatgctgttttggttactgcagccttgtagtatagtttaaagtcaggtagcgtgatgcctccagctttgttctttaggcttcggattgacttggcaatgcgggctcttttttggttccatatgaactttaaagtagttttttccaattctgtgaagaaaggcattggtagcttgatggggatggcattgaatctataaattaccttgggcagtatggccattttcacgatattgattcttcctacccatgagcatggaatgttcttccatttgtttgtaacctcttttatttcattgagcagtggtttgtagttctccttgaagaggtccttcacgtcccttgtaagttggattcctaggtattttattctctttgaagcaattgtgaatgggagttcactcatgatttggctctctgtttgtctgttattggtatataagaatgcttgtgatttttgcacattgattttgtatcctgagactttgctgaagttgcttatcagcttaaggagatttttggctgagacgatggggttttctagatatacaattatgtcatctgcaaacagggacaatttgacttccttttttcctaattgaataccctttatttccttctcctgcctgattgccctggccagaacttccaacactgtgttgaataggagtggtgagggaaggcatccctgtcttgtgccagttttctttttttttttttttttttttttttttttttttttttgagacggagtctcgctctgtcgcccaggccggactgcggactgcagtggcgcaatctcggctcactgcaagctccacttcccgggttcacgccattctcctgcctcagcctcccgagtagctgggactacaggcgcccgccaccgcacccggctaattttttgtatttttagtagagacggggtttcaccttgttagccaggatggtctcgatctcctgacctcatgatccacccgcctcggcctcccaaagtgctgggattacaggcgtgagccaccgcacccggcccttgtgccagttttcaaagggaacgcttccagtttatgtccattcagtatgatattggctgtgggtttgtcatagatagctcttattattttgagatacgtcccatcaatacctaattttttgagagtttttagcatgaagggttgttgaattttgtcaaggccttttctgcatctattgagataatcgtgtggtttttgtctttggttctgtttatatgctgaattacatttattgattttcatatgttgaaccaggcttgcatcccatggatgaagcccacttgatcatggtggataagctttttgatgtgttgctggattctgtttgccagtattttattgaggatttttgcatcaatgttcatcaaggattttggtctaaaattctcttttttggttgtgtctctgccaggctttggtatcaggatgatgctggcctcataaaatgagttagggaggattccctctttttctgttgattggaatagtttcagaaggaatggtaccagttcctccttgtacctctggtagaattcggctgtgaatccatctggtcctggactttttttggttggtaagctattcattattgcctcaatttcagagcctgttattggtctattcagagattcaacttcttcctggcttagtcttgggagggtgtatgtgttgaggaatttatccatttcttctagattttctagttcatttgcgtagaggtgtttgtagtattctctgatggtcttttgtatttctgtgggatcggtggtggtatcccctttgtcattttttattgcgtctgtttaattcttctctcttttcttctttattagtcttgctagtggtctatcaattttgttgatctattcaaaaaaccagctcctggattcattgattttttgaagggttttttatatctcttatttccttcagttctgctctgatcttagttatttcttgccttctgctagcttttaaatgtgtttgctcttgcttctctagttcttttaattgtgatgttagggtgtcaattttagatctttcctgctttctcttgtgggcatttagtgctataaatttccctctacacactgctttgaatgtgtcccagagattctggtatgttgtgtctttgttctcgctggtttcaaagaacttctttatttctgccttcatttcgttatgtacccagtagtcattcaggagcaggttgttcagtttccatgtagttgagtgtttttgaatgagtttcttaatcctgagttctagtttgattgcactgttgtctaagagacagtttgttgtaatttctgttctttcacatttgctgaggagtgctttacttccaactatgtggtcaattttggagtaggtgtagtgtggtgctgaaaagaatgtatattctgttgatttggggtagagagttctgtagatgtctattaggtctgcttgttgcagagctgagttgaatcattggatatccttgttaactttctgtctcgttgatctgtctaatgttgacagtggggtattaaagtctcccattattattgtatgggagtctaagtctctttgtaggtcagtaaggacttgctttatgaatctgggtgctcctgtattggatgcatatatatttaggatagttaggtcttcttgttgaattgatccctttaccattatgtaatggccttctttgtctcttttgatcttcgttggtttaaagtctgttttatccaagactaggatgggaacccctgcctttttttgttttccatttgcttggtagatattcctccatccctttattttgagcctatgtgtgtctctgcatgtgtgatggatttcctgaatacagcacactgatgtgtcttgactctttatccaatttgccagtctcttccttttaattggagcatttagcccatttacatttaaggttagtattgttatgtgtgaatttgatcctgtcattatgatgttagctggttattttgctcattaggtgatgcagtttcttcctagccttgatggtctttacaatttggcatgtttttgcagtggctggtactggttgttcctttccatgtttagtgcttccttcaggagctcttttagggcaggcctggtggtgacaaaatctctcagcatttgcttgtctgtaaagtattttatttctccttcacttatgaagtttagtttggctggatatgaaattctgggttgaaaattcttttctttaagaatgttgaatattggtctccactctcttctggcttgtagggtttctgccgagagatccgctgttagtctgatgggcttccgtttgtgggtaacccgacctttctctctggctgcccttaacattttttccttcatttcaactttggtgaatctgacgattatgtgtcttggagttgctcttctcgaggagtatctttgtggcgttctctgtatttcctgaatgtgaatgttggcctgccttgctagattggggaagttctcctggataatatcctgcagaatgttttccagcttggttccattctccccatcactttcaggtacaccaatcagacatagatttggtcttttcacatagtcccatatttcttggaggctttgttcatttctttttattcttttttctctaaacttctcttcacacttcatttcattcatttcatcttccatcgctgataccctgtcttccagttgatcgcatcggttactgaggcttgtgcattcgtcatgtagttctcatgccatggttttcagctccatcaggtcctttaaggacttctctgcattggttattctagttatccattcgtctaattttttttcaaagtttttaacttctttgccattggttcgaacttcctcctttagctcagagtagtttgatcttctgaagccttcttctctcagcttgtcaaagtcattctccatccagctttgttccattgcactgaggagctgcgttcctttggaggaggagaggcgctctgatttttagagtttccagtttttctgctctgttttttccctatctttgtggttttatctacctttggtctttgatgatggtgacgtacagatgggtttttggggtggaggtcctttctgtttgttagttttccttctaatagtcaggaccctcagctgcaggtctgttggagtttactggcagtccactccagaccctgtttgcctgggtatcagcagtggtggctgcagaacagcggatattggtgaaccgcaaatgctgctgcctgattgttcctctggaagttttgtctcagaggagtacccggacatgtgaggtgtcagtccgcccctagttgggggtgccccccagttaggctactcgggggtcagggaccaacttgaggaggcagtctgcctattctcagatctcaagctgcgtgctgggagaaccactactctcttcaaagctgtcacacagggacatttaagtctgcagaggttattgctgtcttttgtttgtctgtgctgtgcccccagaggtggagcctacagaggcagacaggcctccttgagctgtggtgggctccacccagttcaagcttccctgctgctttgtttacctcctcaagcctgcgcaatggcgggcgcccctcccccagcctcgctgccaccttgcagtttgatctcagactgctgtgctagcaatgagcgaggttccatgggcataggaccctccgagccaggtgcaggatataatctcctggtgtgccgtttgttaagcctgttggaaaagcgcagtattagggtgggagtgacccaattttccaagtgccgtctgtcacccctttcttttactaggaaagggaattccctgaccccttgcacgtcacgtgtgaggtaatgcctcaccctgctttggctcacacacagtgcactgcacccactgtcctgcacccagtgtctggcactccccagtgagatgaacccggtacctcagttggaaatgcagaaatcacccattttctgcatcgctcatgctgggagctgtagactggagctgttcctattcggccatcttggctcccaatatcgtttcctaactttttaatgatcgccattctaactggtgtgagatggtatctcattgtggttttgatttgcatttttctgatggccagtgatgatgagcattttttcatgtgtcttttggctgcataaatgtcttcttttgagaagtgtctgttcatatcctttgctcactttttgagggggttgtttgtttttttcttgtaaatttgtttgagttcattgtagattctggatattagccctttgtcagatgagtagattgcaaaaattttctcccattctgtaggttgcctgttcactctgatggtagtttcttttctgtgcagaagctgtttagtttaattagatcccatttgtcagttttggctttggttgccattgcttttggtgttttagacatgaagtccttgcccatgcctatgacctgaatggtattgcctaggttttcttctagggtttttatggttttaggtgtaacatttaagtctttaatccatcttgaattaatttttgtataaggtgtaaggaagggatccagtttcagctttctacatatggctagccagttttcccagcactatttattaaatagggaatcgtttccccatttcttgttttcgtccctgaccttacttttgaaatttctagtctacacaacatgacttggttgatcattttgacagaatccgttactaatcacttgtttaaatgactcatatctggcttacaacatgtttaattaagtaggtttgtatatagaactataacattcactgatacaacttgaagtagttagtcatttaaaatcagccaaattactttgaagacatatattatgggtttctttaacttctaaatggtactggtgtttgggttacagttggaatgctctgctcaccagaccaaaatctgggatttcttctctttctgaggcaattagattctgcctattctgaaactggcctctctgaccatgccttggcatttcatggctctggaaatgcctgggtgagagagtacagacaggcaaagatgtgatctaaatctattgcactactacagacttcacaacaaacaacaaaacaaacagacaaaaaacaatgtccaactaatgctggatcagcaatgctatctttttcattatgctagagtatttttaatttgatatgtatcatgagcaaaatgtttacttctagagttactaacatttttattgaatacattcttctattctaagtttagcaaggaaatgcaattatgatttgaatggcatatcttggctctaaatggtttctttatttggaaagcaataacattgtttcagaaggaaaataaatatttggcatggtgaaggcttgagatttttttctcactaccagaagtctttgtccttttgtattctttgtctctgaatcactgaataattttaaagacaatgttgtcttcctaattagaaatcattttaaaaattctgttggggaaataaaaaacctatgaagcagtgtcatcgagaatcttatgatatttgtagcactacagttgtttgaactgatttgatttcaaatttatttagggacatgctttaaaaatgcatgcttatttttttcttcaagtttcaatatggcttataagtggccttattttatctgccagcaggaaggaggtatttcatgtggaaaggatagttaaagagtgagagtggtgggggaattttaaaagagctataaaaaacagtggactttattttcatacagactttcaggagaagaaaaacacaagaaggtcttgaatgggcactctcccctggcagccagactacaatgcataaggtacttaatctagctagtgaccagaatttcttacagtcagtgctatgcttggaatgatgatgtcccctctaaaactcatgttgaaacttaatccccaatgcaatagtatcaagagatgtggcctctgggagatgattaagtcatgagggcagaacccccatgaatgggattagtacccttataaaagggttcaaggttaaaggaggcattcttttgcctttcctttcctttccttccaccaagtgaggacacagtgctcctcccctctggaggatgtcgcaacactgcaccctcttggaagcagagaatacccttcaccaaataggtatcaaccctgctgatgccttggtctggaactttccagcccccagaactgtgagacatatatttctattgcttataaattacccagtcttaggtattttgttatagcaggactaacagactaagacagtcaggcatacaccattcattcagtgtcctctgcttggctctttggctcatgcatcaatgctgaaatcttcagagtccctgcaatgtccagttagggaaaggcaggagtctggagtctgccgggtctagatgatctgccacactgcagagctgctcagatgaactttttgtggccttgctggttcatagaatggaagactcctggaagattcagtcaatttcattctaccctgaaatataccagtgttattgtggattgaggtttcgaatgaatgattgttggtccaactcgtagctgtgtcatttgggataagttatataacctttctaagagtcagcttcctgatttgtaaaatgtagctactactaattcttatctcacagtggtatggtgagaatctaacaaattaatgcatgtcaaaatctgacataatgcctcatggcaaataaatatatcaaatgtgttaatgtaaaaaatatattaattgattaaaaaggccccagattcctgaggagtttttggaaagaacttactttccttggggcaaggatatcctgacatatgtgaaacaaaacaaagtgtctagcaatttcttttagccataaaacccagtatctcagataggtgatgtcagtgggctctactcaaagtggcctcaaggcctgcatggcagccctggagagataacttggaactctgctggaaaactacaagaaaaactcatccaccgtggactggctccctcatcacccatctgcccttgcccttgggtggccaagggagccaagtaggctgatattgtttcaggttgtatttatttactcttcctcttatatcaaaaaagaaagaaagaaagattgaaactggagaatccaaataaaataaaatctcaaactttaataaaaagagaaaggaaggaaatgaataattacaccagaagaattgaagtttaaaaaagttctatatatgtgtgtgtgtgtgtgtgtgtgtgtgtgtgtatatatatatatacacacacacacacacacacacacacacacacatatatatataaaactttaagtatatatctatattttagaggcaatgtctcattctgtcatccagcctggaacagtggtacaaacatagctcactgcagcctctaactcttgggctcaagtgatcttcccaccacagcctcctgaatagctgatattacaggcacaagtcacgatgcccagcttatagtttttttttaaggggaaaaaagaaagaaatttcctgagctttctaacagctgcggtaaggtgggaaaaattaaagagctttttaggttccattttctacttaaaaggcattggccaaaccatgtcaatgcctttcaaatcattcattgagtgcttgcaacatgccaggtcctctgtcagatgctcttcaatagcaaatcatttagtcttctcaaccacccaatgtgctcttaggtcttatcacctctgagtgggggaagctatatcaaccacaccggtgctccaaactgctctctgtgccccttcatatggccattgcaagtgcaccctatggacttcatagaaagagtcttgaaagagagggcagaggtagcaagaaaagtgacacagagaaacaagagctatgcaaaccctcataccccgtgagtttcaggtacatgaagaaggtattgtctccatgatgggaatttgataaggaaagttagatttcttgtgtagagaccaaaaggagttcgagcaaagggttaaagatgaaaaggaagggtgggtaaaagtatgagagaggaagccagtcggtctgggaattagtaggcagtagaggagagggctgcagggtgtccattagggatctggagggagatttgctgaacttgttaaaatagccccacctagattgcaaataggatgttgggatggagccaaggcttctctgagcctgagcagcaagcagaccctcccctctgctaatcccacacacaacttcagcaaagcagctgatgctggatgacttgccaacatctcctcccctccacttacccaccccctcaagcaatgtgttattttgtgacacctgttcactttttgtaattccttgcagctgtccaatctgtgcactgccaccagattttatccagttttaaaactcgaggtcgttgggggtggggagagtaagggcaggaacaggatatgatttgcccagtcccaatgtgaacctagatatgaacccctctcattaatgaatttactcacagagtactgagaacagaaactcatttcctgtttttaaaaatatttaattcatattcaggttcttttggtttgttttatttattcttaattttttattttgaattattatgggtaaataatagttgtatgggtaataaatagttattatttatggggtgcatgtgatgttttgatacaggcacacaatgtgtaaccatcaaatcagaataattgggatttccatcaccttaatcatgtaccatttctttgtgttaggaacatttcaattccattcttttagttatcttaaaataaacaataaattattgcaaacgatggtcactctgttgtgctactgaatactagatcttattcaatactagatttcattcactgtatttttgtatccatatttagttttgttaaggataaatataccaatctaccaaagtgcctgcacttctacttgtaatggaatcatcataggactatttgtacattaaaaaataataatgttgaccgtcataaaaccaggctgggttgttaaaaattaatccctcgctgctttctgtcatgaagcctctgaggaggacagttggatggcagaggacatgcacatgtgagaattactcagatgaatctcaattttcaggagaagaaagggcctcagctgatggaaatagtctagacatgtcttatatatgggtgattccagagttggtagcatcctcttgggaaggatgcttaaccctcagtaggacattttaaagtagatgatttcttctcacccagctaataagcagaaaaggtgtctctgggggacaggagtgaggaactagaaaatatcatcttattcccttgattgtaagacagcaatttaatgagagctttgagttgtttgtttgatttgcagaatgagggagggaggtagaacagaaggaaaacacagagatgccacattaaacatgcatgtagccttacttccattccagaaatgtaaaaatatatgaaaatgtacatcttagagtcaaagaaatatggcaataaagctaatttttatatatatatatacatttttaaattaccactggtaagtatttgctctttcttcatgctcatttgaatgttcctaacaagaaaacaaaactagggtaacttttcagagcagccctaatttgccattctcaggaagaaagcacccctgcaaactcaaagtttctaacatattcatccaagtcatcttgcgtctacactgacacattggggagtggaggtaaacagctcatttgactaaaatattgaacctaatcagagcttcatatacttatctcatcaagatgcattgttgggagacgacagaccaaagctgatgcacggcctattcctcacatgacccacatgactcctctcagccttgtgtgtgtgttagtgtccctcatgctggtggttttgtgacaacttagaaacatgaaaaagtttgtattttaacaaagtgggttagagctgagtgtgtgggaagcaagagtgtaggaaagtctgtcctacctggcaaagaactctgttgaaaatgtctctatatatcaagagaaaagagcaagaaaagcagggagtacaggaaaaggagaagatacagtaaggagggaaacaaactgctcccaggactcacacatggaaccaggaggagattcactggagaccacattccaaggtgcttcacaatctgccctgaatctctctccatccttgctatggtttgagtgtttgcattccctccaaaaatcacgttgaaactaaatccctaatgcaacagtactgagatgtggaccttctagaaagtaattggcccatgagggctctacccttatggatgagattaatgccttattaaaaggcttgaggggatgagttcactccttcggatcctttcttcatgtgaggacacagtgtttgtcccctccagaagaagtagttttcaaggggccaacttgcaggcagagacggccctcaccagccaccaggtgtgccagcatcttgatcttggacttttcagcttccagaactgtaagaaataaatttctgttgtttataaattacccagtcttgggtatttttttgtggcagcatgaatcaagtaagacaatcttgcctttctctattctctcacaaatacctcaagtcccagaagatcttgctgaatgggactcctccctcttgcctacacttggatatcccattcactctagtgctttcctgtctctatttcttaacctatgctaataccataacagaaggtaactcccctactgtatccagaaaacatcttttcttcttttaatgaacatgttaaatgccacttcttccatgaagtgtttgctgagccttttttttttttttttttgcaatgcatcattcttctgaaactacttctgtcatattttgcgttatgatcatttttgttctggtcttattttccctggtttaattgcattcagagcaggcattttgttttaatcattttccatcccctgagcaaggagaatagtcattcagagtcatattctatatttaacagaaactacatcaacaatttaacccatggaggtaattcacacctcaatgggcaataggcatgtgcctagagagatcttgagtcaatggacctgcctgaatcacttttaagggtttcagttttcccatgtgcctcttactgagtgagcctcttaccaagataaaattgattttggtatttaaaaatattattttttagacaacatgatccctacaagcaaaataattactttgtcagcttcttaactgaaaaaaaaaatctgttctagtgcaagagacacaatctggctgctctgaatttgttgtggggcaggacgtaagactgcaactgggctatttctaccttctatgctgaagttagaccctacatcccagaatgaatgagtccccattgaatttccacacatatcacactatagcctaaatcataaactagttatcaggtgtctacttccccagagtagatataagctcagttagaccctatatcccatattgaatgagtccccattgaatctccacacctaccacactacagcctaaatcataaactagttgtcaggtgtctatttccccagagtagatataagttcctcattcaatgggacccattgttccccaccttagtcttgtcagtgcccacctggcacttagtgagcacttactaaattatttatagaattactccaggcaaaataaaagggaaactctagagcctgatcttggactttctattgctataaaagatataattgagacaatggttaaaacaatggctattagataatagaaatgaattgatgttaactttttctgaaattttactttaagttctggggtacatgtgcagaacatgcaggtatgttacataggtatacatgtgccatggtgttctgctgcacctatcaatccatcatctaggttttaagcctcacagccattaggtatttgtcctaatgcttcacttccctttgtccccaccccctgataggcccggtgtgtgatgttcccctccctgtgtccatgtgttctcattgttcaactcccacttatgagtgagaacatgcagtgtttggttttctgttcctgtgttagtttgctgaaaatgatggtttccagcttcatccatgtccctgcaaaggacatgaactcatctttttttatggctgcatagtgttctatggtgtatatgtgccacattttccttatccagtctatcattgatgggcatttgggttgattccaaatctttgctattgtgaacagtgccacaataaatatacacgtgcatgtgtctttataacagaatgatttataaacctttgggtatatacccagtaataggattgctgggtcaaatggtatttctagttccagatccttgaggaatcgccacactgtcttccacaatggttgaactaatttacactcccactaacagcgtaaaagcattcccatttctccacagccttgccagcatctgttgtttcctgactttttaatgattgccattctaactgacatgagatggtatctcattgtggttttgatttgcatttctctaataaccagtgatgatgagctttttttcatatgtttgttggctgcataaatgtcttcttttgagaattgtttgttcatatccttcacccactttttgatggggttgtttttttcttgtaaatttgtttgagttccttgtagattctggatattagccctttgtcagatggatagattgcaacaattttctcccattctgtaggttgcctgttcactctgatgatagtttcttttgctctgcagaagctctttagtttaattagatcaccatttgtcaattttggcttttgttgccattgcttttggtgttttagacatgaagtccttgtccgtgcctatgtcctgaatattactgtctaggttttcttctagggtttttatggttttagattttacatttaagtctgtaatccatcttgagttaatttttatttaaggtgtaaggcaggggtccagtttccgttttctgcatatggctagccagttttcccagcaccatttattaaatagggaatcatttccccattgcttgtttttgtcacatttgtcaaagatcagatggttgtagatgtgtggtgttatttctgaggcctctgttctgttccattggtctatacatctgttttggtaccagtaccatgctcttttggttactgtagccttgtagtatagtttgaagtcaggaagcaagatgcctctagctttgttctttttgcttaggactgtgttggctatatgggctcagcataccactctcaacactcctgatctcgtctgatgtgttttgttttgttttgttttgttttgttttttgagactgagtcttgctctattgccaggctggagtgcagtggtgcaatctcagctcactgcaacctccaactccctggttcaaacgattttcctgcctcagcctcctgagtagctgggattacaggcatgcaccaccatgcccagcttgatgttaatttttgattaagcattatactgtgattattattaagtaagaaaattctttacttttagaaaacacaagctgaaatatttagaagtaaaggaatatcacgcctataactttttcttaaagggttcaaaattatgtgtttgtgaatacacacacacacacacacacacacacacacaatgttaatacagggaacctgggtgagggtattcataaattctttgcactattcttgcaacttttctgtaaatctgaaattatgtaaaaataaaaaacatatagggggatctaaataccattatcttacctgtgttctgctaagatagcccatacttacaaggattaagtagctcaaccaagctaataagtggtatggcagatctggtctttggagaagcagatgcccagaagggactagaattggaaaagattttactggggaaattcctgttaaagaggggaagatggaggagtgggaagggtgggtgagttttagatagctgtgcagctctgactcctgagaaggagaagaggaaggaaggaggctgcctttatccaagtctctggaggcctttcttctccagctttttggagaaggggcccgtggttttgcatgaatggaagtaagcttatcattttaatgtgttaaggaactaggatatgatgatacctttcctctgactagtgagcactcccttacattctgtgatgaagtccttgtaaacaatagtcttatttttaaattctgagcccataaacttattttccattagcctatgcaatcacatcgtctcagagacattgcaaagtgggctgtagttcagcacattacctagttaattaatcaggcctgatattttccctagccagttttttggtgcaacagaacaccaatctaattgcaacttcatggtgaagagtatcattccagcaaagataaacctttagattcacatgggattaggtcagattttgcatcaagaaaagatgagacatcggtggggagagtaagaccagcatcagtcacaggccctgaaagaaatgttttacttaaagctctcaggactttgtcaagaaataattttcataacaactgaaaagattcctatcatcaattatatatttttagtctaagccagcactgtctggtccataggtgacaagccgttaaagggtctacaagtttaaaatgcaggccaagcctgattggcatggataacattcccctcatacatagttcttgtacttctacaaaaacatgctgattctatcattattaataacatgtaaatacaacttaaagcattactaagaataggcattatcactaggttattcttcaatcaatagatgcaaaaagtacaacttccagcacacaatagctggtgatgcttttcttagtttcaaaatgtaccttgtattttaaaatgttgggaaccactgctatagatgatgcctcataccattaaatgtcttgcacactatatcaagtccccagcatcctcaggtgagggctttcataaaattgatatcacattctttttttattaacagtcctgtatattttcaaaacttcaaaataaacacaaagaatatgtaggtatacatgttataatttcaaagtcaacactagtatgtaagtttttcttatctaaatacatactaggatacttcctatttcaacacatgtatctacaaacacgtggccatgcacataaccttgcttcctgccccttgtaagaaagttaggatatacaatattgtacattgtttcaacttaaatcttattagaaaattaatgaggatggcatttaaaaattctgatctaagaaatagaaatacaggaagataattattccttagattaaaaacactgaaggctgataaaaagttaagatttaaatcttggcctggatcattaagacttcagaagttctactcccaattatcaaacagagcattctgagtgtttttcagccagtcctgttctcgtttgtatctttcaagatcacagggatatcacattcttaatagattcttttgagtacttccaaatccaggtggaaaggcaaaaaataaatccgtttacaatctataagatgcacagcaatagggacaatcatcactaatatgttaattaaacaaaatgaagacactgtgcatttatttctgtattctagatgcagaatctagattacaaattctatgtgatcaaatttcattttgggaatcaaattccatttttacccctcagatttagcaccagctttttctctctgtttctgaatcctcacagtgcagtacaaataggcatgactctgggggatacagaagtgtaggcagttaaattggctgttttcacacctatatgtaaagctctcctacataacaatccttcagaaactatccactaaaaaaatttaccattttatttcaaaagcaagccaaagccattcagaggttttgaaataaaagtattttttcaaaaatataacatcttagaaaaaaatttggttattcagtggagaactcctttatgcaaatatgatgctggggtctaaaatgtgtctgcttccttgatattgcagaaaacataaatgctacaactaagctctttaatgggaatatgctgagaacatgtagatttgtaagcaaaggtaatctagtccagcatgatttgaagggtccaggccttcttctgatcacataaactttactcagcaatgtaatcccctgtacacacccacagacacatagacacatgtacatacacacaaatacacacacacacacacagaatccttagttacttttaccattaatccattaccttgtgtcagatgtatcaccctggtaatttttttaattaaagtttttctattacaaatcacttctgaagtccctaactctttatttttatttatttatttattttttattttttaaaactttttatttccataggtttttgggagacaagtggtatttggttacatgagtaagttcttttttaaaatttttttttaaatttattattttatttttccataagttatggggtacaggtggtatttggttacatgagtaagttctttagtggtaatttgtgagattttagtgcacccatcacctgagcagtatacactacaccatatttgtagtcttttctcccttgccccctcccactcttccccccaaacccccaaactccattgtatcattcttatgcctttgcgtcctcacagcttagctttccacatatcagtgagaacatatgatatttggttttccattcctgagttacttcacttagaataatagtctccaatctcatccaagtcactgcaaatgctgttaattcattcctttttattgctgtgtagtattccattgtatatatatatatatatatatatatgtgtatatatatatatgtatatatatatatgtgtatatatatatatatacacatatatatatatactgcagtttctttatctactcattgattgatgggcatttgggttggttccacgattttacaattgtgaattgtgctgctataaacatgtgtgtgcaagtatcttttccaaataatgacttcttttcctctgggtagatatccagcagtgggattgctggatcaaatggtagttctacttttagttctttgaggaatctccacactgttttccatagtggctgcactagtttacattcccaccagcagtgtagatatgttccctattcactgcatccatgtcaacatctactgttggtttttttattatggccattcttgcaggagtaaggtggtatcacattgtggttttgatttgcagttccccgatcattagtgatgttgagaattttttcatatgtttattggccatttgtatatcttcttttgagaattgtctattcatgtccttagcccactttttgatgggattgtttttttcttactgattttgatcttactgattgtttgagttcgtcatagattctggtattagtgctttgtcagatgtatagattgtgaagattttgtcccactctgtgggttgtctgtttactctactgactgttccctttgccgtgcaaaagctctttagtttaattaggtcccagctattatctttgcttttattgcatttgctttggggttcttggtcatgaaatccttgcctaagccaatgtctaggagggtttttccaatgttatcttctagaatttttatagttttaggtcttaggtttaagtctttaatccatcttgagttggtttttgtataaggtgagagatgaggatctagtttcattctcctacatgtggctagccaattatcccagcaccatttgttgaaaagggtgtcttttcccccactttatgtctgtgtttgctttgtcaaagatcagttggctgtaagtatctgggtttatttctggattctctgttctattccactggtctatgtgcctattttgataccagcaccatgctgttttggtgactatggccttatactatagtttgaaatcaagtagtgtgatgcctccagatttgttctttttgcttagtcttgctttggctatgcaggttcttttttgttcccatatgaatttcagaattgttttttctaattctgtgaagaatgatggtggtattttgatggggactgtgttgaatttgtagattgtttttggcagtatggtcattttcacaatgttgattccatctgtccatgagcatgggatgtgtttccatttgtttgtgtcatctatgatttccttcagcagtgttttgtagttttccttgtagaggtctttcgactccttggttaggtatatttctaagtatttttttgcaactactataaaaggggttgagttattgatttgattctctgcttagtcgctgttggtatatagaagagctactgatttgtgtacattaatcttgtatccagaaactttgctgaattcttttatcaattctaggagctttctgggggagtctttagggttttcggggtaaacgatcatatcgtcagcaaacagtgagagtttgtgaagtccttaactctttattttgaattcattcatcagatcaaagagcagatttatcccattgaagttgaagtcctttccagcttacagattctctgcttctctggctctcctagctagccacacaaattaagactggtgagaacatgaagcaccttgtagcaggtaggagttagagactttgtgaaaaacagagctggatgaactggaggaatgttacaagaatgtggaaaacaaggccggagactctaaaatgcaccaggtattgcaccaaagattgaagataaataaatctcgtagtccttgttaatcttatcagattaactcctcagtaaaggtacatatttaaagatacgttataggctagtgtggtggctcatgcctgtaaagccagcactttgggaggctaaagtgggaggattacttgaggtgggaggatgtcttgaggccaagagttcaagaccagcctgggtaacatagactccatccctataaaagattttaaaattagctggatgtagtagggtgtacctgtagtcccagctactcactcagtaggctgaggcaggaggatcccttgaactcaggagtgagaggctgcagtgagctatggttgtaccactgcactccagcctgagcaacagagcaagaatttgtctcttaaaaaataaataaataaaaagatacattataaggctaacatttagggatttggtgcaagcagaatttcacttgccacgtaatcaaactctatattttataatcaaatcttagctataatgtagaagaggcaaaaagtttcctgatgtgttctatatatgcctaattccatatctctaatacttcatatggccattataaaattaatatacatgaatatataaaaaatgaatatacataaaatgttaagtgaatatacataaaatttaatatataatttatatattgcatatagatatataaagtcatccaatgggaacaggttggtttgctcaatgatcagttaacccaaattccacccacttttgattggttctttttctgttctgatgttatactatcttttgcctcttttgggcaattaactcatgatacagtatgaaatgggcaggataaaattcaagcaggagtctcaggcataactccctatagttgcttcttccatttcttttgataaatgtgtggaatgatccaagctggcagactgaagcagagatttaagagtgaagttgcccctcctggtgcattttgatatatgaaaccgagaactcacagtgtcttccagatgattattttgatagtatgtgcttctccaaattctgtacaccagatgtgaaattgttataatacgaatcacaaactacttcaaacaattgcattcattcctttttcattcatgcattctatgaatacttattaagtgctactatgctacatgctgtggtacatcatggagtggcagagataggtagtgatatagtttgtatgtttgtcctcacccaaatttcatgttgaattgtaatccccagtattggaggtagggccttgtaggaggtgattggatcatgggagtgagtttctcatgaatggtttagtgccatcctcttggtggtgttcttgccatagtgagtgagttctcatgagatctggttgtttaaaagtatgtggcacctcccttgccctctcttgctcctgctcctgccatgtgatatgcctgctccccttcatcttctgccatgattgtaagcttcctgaggcttcacaagaagcagatgagatgccagtgctatgcttcctatatagcctgcagaactatgagccaattaaacctcttttcttataaattacccagtcttgggtgtttccttatagcaatgcaagcatggtgtaatacaggtagctaccaccaaaaattaatgtgtccccttccacagtgttgagatgaccctaggaagtggctggtcattcaggagtcccatttctcaaacacctttgcaccttgggtagagccatgtgagtagctcttaccatcagaatgtgtttggaggtaatgcgtgtcacttctgggtcaaggatattataaatgaatgctttctttatctttctttcccctgcttgaagtagaagactctaagatcctaggggatagtggagtaacaaaacagaaagagcctgagtccctgaataaccatgtggaggaaagccactcgccaactaggtgaggctgaggaggatttaactatgcaaagaaggaaagaaagacagaaggaaaagcatgcacagaatactcctagtaagaaagcacactcgtgaaaaactaaaagaaatcagcatgattgttgattttagcagccggttgtcacaaaccaggtaagcctgggaaaagccatcaaagcaatcaggaaataacacattctgattaaggtaaaaaaaaaaaaaaaaaaaaaaggggcaaaaaatacatggataatcacacctgtcccaacatggaatttattggaattattaatacttatactccattacccattacatgggctacaattattgtacatatttctttgttttataatccagtgtgatgttatgaacttgaaatggtgaaaagtaaaatattcagaagtaggaatatatccttagggatacaaaagagcctaactgttaacaaagtgttcaaaacttaacaaccatatatatgaaagaatttaaaatgtgttatatctcctttaatttaagagccggtgactcttttgaaactgcaggcaaaagtttgtggatttgtgcataacgcatttttctagggataggttccatggcatacatctgagcctataagattaagaactaaatggattagtgtctaaaaatatttaaaaggggttttaaaaggaaaaaaaggatatgagcactcaaaatgatgcaaaaacagtaataaagtgctgaattttaagtgagctgacaattaggaaggaacaggttttggggaaattgtcccagaacccatccaatgaacacaaaatctttccagttattatttcattagtacaagcaatgtatcctcagaggccagattttatcttccataacagattggaaaaggaagaaatgagaatttgaaaaattaagtgccttgttcagaatttgcaggagaatcccaaagacctcttgagtcactacttttttctcttaatcatctgattattcccataaaattgaattgggtaccaagagagctcttactctcagaatttaaatctcttctgtgtcttagggcccagggtttgtagtgattaacttaataggaaagttctctctgattagccaaaatctataattctcctctatctttaaaaagagcaaacatttttcataaatcccaaattgcagaccaatcagtctgagggatagtcttttagaattctctgtgagttgtattttcaccaaatttcaagaccacattttccaaacctaacataaggagaaaactgttttcagacattatcttttcagtgttcatcactcttataaaattttttacctttctgttagaaactgagacatcattttcaagattcttttctaaacaggattcattttttacttcatagacaggaacctgctgctaaatttagcaagagattcctaatgtctaaatgctgacaatattttcataagagaatcacagcagcaatcaagttctagtaggtcaagaaactatattttgtcattttatccagggcaaagtgagccaaaaaagactggttcatcatgcagattatggccctagacactggttttgattatttacctttagaaatacaactgccaaatgaactggaagattcatttctgaggattagcacattctctccaagtctctaaggaaagctcaattactacctcaaggttgtttggtaagcatggatctgaacatagagagttggatgattttgataacaaatgttaaccaagttattattgttttatgagctctcgtaagtcagaggtggattctggcaactcatttccccagtatatgtgaaaaccactccctatccttccatgagactataactggcttccacctctcactttggaacagagtgctagttgcttaccccaacatccaggctccccattctttcctgaggacagaatcttgatttttatttggcatattgtcattcaaaataaaaaataattatctttctcagtgtgagatatgaccatattatagagtctggacaatgagatatcagtgggtatgatgaataacttacagcagaccaatattcccaataagaaccattagaaaagctaaacaaaaatataaaacaaacaacaaatatgtttaaagccattaaggggctactaaagccactagaactataggaaatgccataattcatttgggcccctatagcaaagtactatgaccttgggtagctaataaacaatagaaatttatttctcacttctggaggttgggaagtccaagatcaaggtgcctgagatttactgtctgatgagggcccatttccaggtttatagaaatggtgcattctccctatgtcctcacatggtggaaaggactagctagctctttatggtctctttataagggcactaatcccattcagggggtctgcaccttcctgacctaatcacgtcccaaaggcacccacctccaaatatcatcactttgatgatttggtttcaacatatgaattttgaggggatgcaaacattcagatcacaacaaggattaaattttgaaaagaggaagatgggctggacgtggtggttcatacctgtaatcccagcactttggaaggctcaggtgagtagatcatttcaggccaggagtttgagaccagcctggccaacaaggcaaaaccccttctctaccaaaaaacacaaaaattagccagacatggtggtgtgcgcctgtagtcccagctactcagggaggcacaagaatcacttgaacccaggaggtggagattgcagtgagccgagatcgtgccaccgcattccagcctaggtgacagagtgagactgcatctcaaaaaaaaaaaaaaaaaaaaaaagaggaagatgatggagaagtgagttgagctgatcatttgcaactgcttctctctgagggtatttgcccattctgagccagggcaagaggtgattgagattccaggctttgcagaaacagagggctgctaactgggaaaccagtagagattttgattgtgtcatggggctggaaaatcaaaattagaaatatcctgggccaaaaactctgaggaaggcaggggcagagaactaagcctgacatgtggctggttcctcttttaaccatttaccaaattctgaaactaaactgagcaggagactaaggagctaagtagaaagcctctggaaaacagaacagagttttcagctaagaggcaaggattagaactcaggacgtttcaggtgcccagaaaatacatcaggctcttcgttgaaagccctggagggatacaccttaggagcaaagaataacggaagtaggcagacacttactgaaactaaagtggctaaacagaataagattatcagacccaattttttctgtcaaaaaaaaatggtgaatactttctggaaggagataaaattatctggaggctatctagtaataaacaatatttgacattcagtcaaatttattatacactccaaaagacagtaccatatgccacaaaattaagagaaaaattagacaacagatgtagaactacaggtggttcttacattggagttatcaaagatttttaaatggcaagattaatatgttagagaaaacagacaaaaagataaagaaatgtattatataattagaattcataaaaagaatcaaatgaaagttctaggactaaaaaacataatacctgaaagtaagaattcaaatcatgggtttaacaagagattagagatagcaatagagagcattagtgaagtagaagatagattgctgggaaatacctagagtgatgcactaagagaaaacaggatataaaatttagaagaatgtacaatacacataatacaaagtttaacataaatttaattggattcccaaaagaagagaaaaaagaatatgggggaaaattgaagaaattttaaaggattgaagaatttccaaaagtgatttgaaaaaatagaaatcattccacagagcagctaagaaaaaacagtatgttatcttcaaatacaacaacaataacaacaattaaatggaaagtaatttctcaccagaacttctgaaagccagacaataatgagatggtgtattgaaagaaattaaagaaaattacatttagtctaaaactgtatatccagtgaaattattcttcaaaaatgaaagcaaaataaagatgttttcaaataaacaaaacagaatttttatcagcaaacctgcactaagagaaatactaaagaaagtttttcagcccgaaagaaaactattccagattgaaacacagaaatgcaggcagtaaagaaaagcaatgaaaaagattttaaaaatgaaatattgagtatacaaagcaatgataataataatgtcttgcaaggtttaaaatatgtatagaaataaaatataaaagcacagagataattaagttaaaagtatctaaagttttaatgttatcagaaaagtggtaaaagataatccatatttgactaaaattaattgaggatgcacgctgaaattaacctctgaaaaaatggtaaaaaataaatgtaaaaataaaagttaatagaggctaggcacagtggctgatgcctgtaatcccaacactttggaaggctgaggtaaatggaataataaaaattatttgattaattccaaagaaagcaggaaaagaaagaaaaagatagaaaaataggtaagtcaaatagcaagttgatatatcaaatcaaatataactgtaattacattatatgtaaatgaacccattgcaaatttaagttcagtaatgtaactgaaataaatactccaaatattttgttttagtttggtgtgctataacaaagtaccatagactgggtagcttctaaacagcagaatttatttctcacaatctaggggctggaagtctgagatcagggtgccaatatgtttgggctctgttgagggtccccttctaggttgcagactgtcaatttctcattgtatggcagaaagagagggagctagctcttcagcctcttcttataaaggcactcatctcattcatgagggttccccctcatgtcctaattacctcccaaatccccacctcaataacatcaatttcaacatatgaattttgtggggcaaatgagcattcagtccgtaacttatttgaaagatacatagcagattgttcactgcggagtgaaagaggttgtggagagaataagaagaagaattttattttcaaacatttcagttagaaacgttcccagtatgttttattttaaaattttaaagaataaaaatgtgattaatattttatatacctatttttctagtcaactatgctacaaattttgtacatttctttctttggacctcacacatttttttaagattatcctcaatattggttattacatagtttttaaaattattatgataaactgtcattgtccattttgttttctaacaagttaccagttgtatacaaaagagctatggattttattatggttttccttataactggctacttaagcggacgcattaactgaatcagctctctttcttcagacattaaagtaagttagcatcttggaacacatagatgtaccctctttttacatagttatggaaatgtgtaacaccgatggactgtgggaacccatttcctccagtgaccattagagccgatcagttcttcatgttcctgatacagttcctattttgtctcgaactgtttggcttaatcacagttccttgtgttatttcctatttacacaggtttttcttttaaaaagactagtctctaaaaacagacactttttattaacagataaaatacctgcaaatattaaccttacctgctccacctggcagctcactctcatgcactgaggaccctctgctgtggatgtccaaacttccagtggctggggtatctgttctcctgagactgtgcctggcatgagcacaggtgctcctcggggagctggggatgtcccagctaccctcactaatccctggaaccacctctccccacttttagacttcagtataccacttactctctctgagttaaatttctctttgctgcttgctatagttctagccagcagtgtggcctctatgccccaagagctagatcggagtttcccaaactgaaatattctacagactcttcattgtgaagtggctgcgttgtctggggtatatacccggggtttgttgtctggcaccaggaaaatttaggacacggacacacacgagtagtttaggagtggaggtttaataggtaaaagaaaagagaaagtaaaacagctctctctatagagagagggaacttccaagaggaaagaccagcaggtggctgatgcaacggaagttatagtcaggtttgaggaggtggtgtccgatttacatagggctcacagatcggttcgatcaggtatgacgtttacatagtgcaggggaaggctggctgccccaccctaatcttattatgaaaatgaactttccccttggctcctgccatcctgtccgctccttactgtacatgtggctgacaaagagaagggaagacagagccgccatcttgaacatgattggcacaactgcaggcatctatgtctgcagctcgattttataggctgctgttgttagcaaggaaaatgatttggggctgcttttcattaaaaaaatccttacggagggcttccataccctcactatctgcctacgtaatttcttcttaactcctgtatcatttggtatactgagaaaataatcttccaccaggtacgttagttttgtaaatccttaacatgttaacgtctttatttatttttactctgttgcatctcagagcatttaatctgtacctgtgtaatttttttagaaatccaacagattttgttgttttcttttgctttttctaagtccactgttgatggattttaaaaaatacatagatattagaaagaaaaccaaaactatcctatcattccatcacccagatgactcctgtggacgtataaaaaaaattaaagttatacatgtacataattaaaaagttaacaacagaaaaacaaaaaagccaaaggtatactcattaactcatttatttgcaaatatgtaaccacaggttatgactggaccagaaataagattcagaacctcaatctttggagattggggcccatcctcagtaagtctttattatgatctaggcattaaataatcttgaaatgttcatttctgtaagaaaacattttaaatggtccatttgtaaggcatggtaaatctaaacactggcagccagcctgcggatgtaacacatcacatggctcatgatcctagaaggtcataataagcaaacagaatgtagaggaggggtcagcccataaaagggaagaaagtttcattactgggaaatcaaaacttaagcagggaatggaactggggtataaccttataagggggataatgaaacttaggcgatatcctgaaagactgtaaccccatagtgctcaaccaatgaggaactgggggagggacttgtgtgctaggagataaattacctgttgtagctgccctggatgtgtctgcctaccagacatccatcggatcttgcaaaaccgctattaaaagtctcactttttgctgttttttgtgcttctgagtccattctttgggtttggacgggttagcatttttctcacaatttcccacactaaatcagaaaactcttgttcttaaacttgttaactgttgttctaagggcaaagaattctatagtcaaatactctatgtaaatgtcacccatttctttcatgggacataaagtaagttccaattcattactcatatgccttttaaaagcagaatccatgtatgttttttaaatttatcagagatgagaaagaatactgcagttaattcaagtacatctgtgtcatctggtaatgctgacactaccatactggttttatttcgggcaccttccagcacaatctatgtttaactacaaggaacagtggctatttcttaggtgcctgaagcaagatccagaaagaacccaaaaagattactcagtaactccccatctgtagggagtccttggggagcagaatccaaattatctatctttccccacaaatgtctttccccacagtgccttgcatttagaatttgctctataagtcttctctgaattaactgaaaggaataaccatttagaagggatgacttataccttaaagataagatgtttcaggtggatcattgtgctttttcttcatcagaaaacaaacaaacaaacaaaaaacgagtggggtgggttctgaggctctgaccctgaacaaatgaagaatcagagtcacagtgctagaactggtgtaaactagcccttacacaagggaactccaagtgcttttcagtttcacagggcaatagtttcgtttaaagcagattcaatccaaaagccataatgtagaagaagaggtggagaaagactgtctgcagtttgaaatgacagacttcctccaatttcgattagcatgtgaaagagactttcatatccatttttattcaaatatactgcctttgtagtcatagtaacccttttatattttgatttggttgcagctacaagcctacttgagccattcattttatcctttctcctaaatatacctaatttctttctcatttgttctttctaatagaatccactgttgtactttttcttctaacatatcagttctccctaaaggatgtgagaaaagcaaaataaaatatcacattgaataaccaaattaggaaacaacttcctgtactaacagaaaaggctagaagatgatgtcgtgttcagataaatggcaaaagccaagttcttacataaatttcaaatctatcaccttccttttgttccttgttaccataaagatgcaccactttactaacttaaagtactggcattataaataactccacttgggttatgaagttcaagagtcagatcagcaggattgtttccaaaaaaggacagaattcaaatgaagtccacttttcatttcttttttaacataaaggaaaatctcaaatgagatataagatgtagtgtaaaattagcatttctccctatgttttctctttcagtgtctgttttgacatgtgattttgtgattacagaaatgagttttcaaatccatctatttagaaacaggcatcaaaattcaaagcagatggagtctcagtttgtctagtacggagtctttattttgcaggtgagaaaactgaatctgcaaagaaaggagggacctacttgtgaaaataaataaaatctataagctgttagaatccccaaaacactttaagttgtgagagagctgtgactgtgatgtgagtcgcatggcacagagttgcaacttctgcttcttagattatggattaactctctttctcattgttcttaaatgactagaagaaaccagagactagaccttctccccttctaatcactgacctttgttatattaatagattaactctcctatattgttctgtctaacttagatcagatagctcagaagatctcatgaatgttatatcttcactgtggaatgttaaatatacctttactgaaagaaaaagactatctcaaccaattctatcctaaactcattgtaaccacacagtaaaccttatatagaaagatggtgacgttttcttaagcttccctaaacctgtctatataaatgaccccaaacctttatatttcaaagcattgatttccattctttgaaatctgtgcttcccaagtgcatgccctcaagctttgtactcaaataaactctacaactaatcatattttctgaatttctgtaggatatactcaagatcacacatttagttaatggctagaagctaagctcccgatgcctgatctgcgggtgcactcctccactgtttacccagtcttcacacctagctgattccactctaccccttatagctttaaatttcaggatttcacttgttgctaaagttttcctagacaattatatttttaaaataaaattaactctttttagtcagagttatcctaatacttgattaatattatgcctattctaattttatctaatttaagagccaaagtcaaagtaaaatgaggtaatacaaaagttttgctttaatttttaggaggaaaaaaagactttattcattcattcaacaagcatgaatctatagtgacatttcactctgaagataataaagcttaagcctcagggacccacacttgcccaaccctataaatgccctataagtaagtttgcttttttttttttttaaaactcagacccatgaaagtgtttgagctttaggccacacaaaaccagaatctaacagtggaaaaaaaaaaaaagtatcaagctcatagcctgactccctagatgcctttgaaatcataggttcaaaaagaaccaatcagggtaacctaatttttatttcttgttttgatcgctcactatgtttaattgctcacagcaagggattgaattcattcactcaggcaacaaatgtttattaagagccttctatgtgtcaggtactattcaaaggtttggggccatcacattgacaacgtacttgccctgacagagcatagtccaacagaatcaaccatatgtatgttcattttgagtgaatctcctaaaatgcattttttaataaggtgaagtaatgttgctctgcataatatcattgttgggtaaatttattgttagataaacaatcaaacattaaggtattgattaatggatttatgttgccttggatagtagtctctagaaaaatggcacaagaaatgtctgtttatggtattgtcatgttcaattatactaactacctcaatgtaaaacataagcatccttagaaaatgtacagctaaagagggtaagtcaatatgatgagtgacaaagtcaaaatgtgtcaatattttccatgaaatgtaggtgggtacttatgtaaaattattccattattgacaccattataccacatatcatgttgtgctgaccagagtcaagaataatatgttagtattctgtgttcaatcactatgctggtttgtcaaattatgtcagctttaataattaaaacatttctttcttgtaaagttaaaggaagtgctgacatttctgttagaatatcatttattaaaatcaaatctcctaccatctgaaagtcaattaatgtaatatgccacattagtagaataaaggagaaatgctacatgatcattttgatacagaagaagcattttataaaatctaacatgattttatgattaaaaattaaaacactcaacaaactaagaatagaagggagcttcctcagcctgatgagaccatctatgaaatatgcacagccagcactatacttaatggtggaagattgaatgccttccccctgagatcaggaataagacagctcttaccactttgattcaatgttgtacttgaggttctaaccagtgcaattagaaaatgaaaataaagcatcttcattacaaaggaagaattaaactctctatttgcaaatgacaggatcttgaacataggaaatcctaaggactcccccaaaagctattagaatgaataaacaggttcagcaagtttgtaggatataatatacaaacgtcaattatatttctatatactagcaatggaaaattgaaaactgaaattaggaaagcaattccatttataactttgaaaataataaattagttaagattaaatttaacaaaagagtacccccataaatatgcacaaatagtatatattcatttaaaaaatttttcaagaggtacaaaacatttttgaaagaaattaaagaggacctaaataaatataagtaatttccatgtttgtggatggaaaggcttaatattaaaatggcaattctctccaaattgatctaccagttcaacacaatttctatcagaatcccagctgactctctcacaggctatccactttaacaagctggctctataattcatgtgtaaatgcaagagaccctgaatagccaaaacaatactgaaaataacgatgttagaggactcacgcttcactatttttccacaacatcggaagatgtaccagattagtttattgtcaatatcatttcttcttcactaaataaaatttcttcctcactaaaggccattttttcatcactaaaaacaagagaaatgtatatttttaaaagatgaatttaatgggatatgaattatatctcaattaagttattttattaatagaaaccccaatgctccaaattctttttagtttctcaaataatttaactatggcctttcacaatttctaacaatagcataatctccaaactgcttttcaactctagcaccataagctgacaactgaggtgcaaatatttctctaatttttattatctcatttctcatctcttctgaattattgggtaattctctctgatgtttatttgatgaaaagtagtaaatataaagttattgagaaaacatttattttatatttttatggcattaatcataagcgattgaatatggttacttaaatagtgccccattaaaatatccagattttttaaaaattataattaaaactccagactttctccctaacgttacactggtacaactatgtaaagtccagtaaggtttttatgtcaatatatttcattgaaatcaatttttctcaagcaccatcaacaaaatacttttatagatcttttatatgtcagcatcccaagactaaaaaacaaaagagcaattttcaattctctcttcaaagtactgaatttttcatttaaagaaaatgtttgtttatatagagcagatgaagctttgtcaataataattaaaattttactgtcttatgttttccaaaagaagcattctcatttcagtacatatcttcttaacaagccagaactacacatatatatcacaatgtgtcctgtctcagtccattcaagctgctataacaaaaataccataaatggggtggcttataaagaatagaaattttttttcatacagttctagaggctgagaagtccaagatcaaagtgtcaacagattcagtgtctggtgagggctcactctctgcttcatgtggcaacttctttctgcatcctcacgtggtggaagaggcaaagaagctccccaggacttattttataaaagcactaatcccattcatgaggggtccatcctcatgacctgatcaccccctaaaggcccaatctcctaatactattgcattgggaattacatttcaatatatatgttttgaggtacacacacattcagaccatagcatgtccattttaacattattatttttctgaagttttattaaatattgatgcctaaaactgaccattatttttctggacttccgcacaatttcatttactttttcaagaatttgatttttaaaacttttaaacatttttattattttgcccattcttgatggtttttaataaatgattgtgtctcctttgtttaaaccaagagatttaatggatcattattcctaatcagataaaatatttaagcatttaacatttctaccttttaataatataattgtgatatcatttcttctccatgttaccacagatccaaacaattcttattcattgtatttaacagaaatgttgagaaacatatccagacttcgttgttccttcatcctgggtatttgtattcagtatattataagaccttatttttaaaacaatataatatacacttacacaagatttacaacacagtagctatgaaagacaaataaaaaccaaactattcagatgcaataggaactataattccatgatgaagataaactggtgcttctcccaaaatacagagttttataaagaatacacaacgtatctgcattgtttactagacattggccaaccagtcatagagctacaaatatttcttagatgttgtggcaggtggcccatatatcaggggttgttgagacatcctacaatatttcacttcaactaataaatttactctaaagtttatattataaatcaacttagctgcttatcatgttactatgacataatgtgccaagtggtatagaagtatttcaatattttagcaaacaacctgtccactatcagctctagatctacatgggcctctccttataggggcaagagaattatctttaataaaggacgacctctactgcagtctgatatgttcttggtttatagaaaactaataaaacctgaagtatttaagaaaaaaaaacagtgattatttcctaatactgagagacagcactagctggatttcctaggcggactaaaaatccctaagcctggctgggaaggtgaccacttccacctttaaacacagggcttgcaacttagctcacacctgaccagtcagatagtaaagagagctcactaaaatgctaattaggcaaaaacagaaggtaaagaaatagccaatcatctactgcctgagagcacagtgggagagacaatgatcaggatataaacccaggaatttgagctggcagcggctaccctctttggttcccctccctttgtatgggagctctgttttcactctattaaatcttgcaactacactcttctggtccgtgtttgttatggctcgagctgagcttttgctcaccgtccaccactgctgtttgctgccattgcagacccgccgctgacttccatccctcggcatccagcagggtgtctgctgtgctcctgaaccagcgaggcacccactgccactcccagtcaggctaaaggcttgccattgttcctgcacagctatgtgcctgggttcatcctaatcgagctgaacactagtcactgggttccacagttctcttccgtgacccagggcttctaatagagctaaaacactcaccgcatggcccaagattccattccttggaatatctgaggccaagaaccccaggtcagagaacacgaggcttgccaccatcttggaagtggcccacccccattttggaagcggccggccaccatcttgggagctctgggagcaaggaccccctggtaacaatacttttgctatggactttagccaagacaaggctggaggcccattggccctccctgtggattacatataaggtagactcaccactggttattgagagaagtggagtgatctatgggagaacatcagcagagaagactcatcctctccatcccactcatgaaagagagacacagattaattcccagatagttcccagtagcaagaaacatactccaaaggaaacaagagaatctttccacactgagatatgtgcataattatgtccattacatcattatttataactggaaaacaacaatagggtaataggggaattgctaaataaattatgattcatatgtgagataaaatattaggcagcttttgaaaaaaaaaggtagtctttcagtaaatgtagtagtactgtataatacatgtttttcccactcacctcataaaagtgcctccaaatcaacaataagacaaaatcatacagtgaaggaaattccatacacaattaacccaagaaatggctctatttgtaactaacagtgagaaagaatttttgcaaagtacaatgacatttggacaaattgaaagaattttttaaaaagtaataaagttccagagctcaataatattccctcaaaataagtgataaggcaagagaaatctaatttcttgcttgcaacaacaaaaagtgaagatatagactaatagagtaggaaaggctataccttggggcctcactttctcatcatggattggcaaggctacaggggccagaatgtgggcacaacatattattttgtcagacctggacttctattccacaagtagtgggttgaaaaatgccttccacattcatgcccacctgaaacctcagaacatgatctactccaaatttagaaatcatcctagatttagagtgggctctaaatccaatgactggtgtctttataagaagagaatagagagagatacacagaaaagaaagccatatgaagaagatggcagagactgcaatgatgcagccacaaatccaggaatgccaagaatttctcagagccgccgaagctagaaagagacaatgaaggattctcccctggagccttaaccatgcttgatttcagattcctagcctccagaactgtgagggaataaatttctgttgttcagtgccaccaagtttgtggtcatttgttgaggcagcccaaagaaatgaatatgccaattaaaaaaacagagtatgatggagagaggggagcgtattaagcatatttatagtggtgaccaaagtggactgaatagaaataaacaccaaattattaaacacaaaacatctgcaatctattagacttcattacgagccatgctgtgagctcatctagatgtgctttctcactgcagttagaggaggctaaaagttaaggcaagatctggctcatgcagaggatctatagattttatgttatctgtggttttaagctgattttaagctgacaggtatttcagatgactccacctcattccttacctcccattcctctccaaacttcatgagctaagtgcaggcatgtagagaacttaccacagtaaaagatgagtgagtaaaggacacaatatggattctaccaaatagataaacacagaacgtggcaggcgttgaaagaaacatcacatgcagaaggcagataaataatatacagaagaagaattactttaggaaacagaaaaagtgtatcaggcaaatacttcagcaaagtattttctctcagaaataaaagtgacaagggctttttctaagtagataaaataaaaaaagctaagagaatgaatgaaagataaaactggagaaatgagatagtaggggaaaaaagcatgagttagaagagctgaaaaaagaaattgaatataagaaaacaaatagaaacagtagaaataaaactaccattagcaacagcaagaagtagaataaaacctatttttaaaaagagttagtagaatagtgtagaagctttctttgaaaatcccatgaaataaaatgaaatgaaatacaacaagaagatgaaaatgagggaggagattctacagaggatggaaaggggatatgtgcataattgtaattattcccgaagaagatgatacaactagaaacagaaaaaagtcacattttttaaccagaaataaagtaaagtttcaaagagaaagggcataccttatttgagaaaaagtagagagaggtataaatagctatagctatagatcttcactgagacttgccatttgtgttacagaacttcaaagataagaagaatacttcatacatatgagcagataaagcaagtgaaaaaattatggatatgtgtttctctacattagcaaaccaggtgacagagtcagtggaacagtatctgcaatttccaggggtgtgtgtgtgtgtgtgtgtgtgtgtgtggtataaaggatttgatcaaacgtattgttcatatataaaagcaatggaaagatttatcaacattaaagatctcactcataggccctctttgtaaaaatgacttggtaattaaatccagctaaccaaggtatgaattaatataaaaattgtacaagtaagaaaatcttattttggaagaagcagatggattatgcaacttattcagtaaaggactaaggctaactatggctgtaggaattattttgttctataaagttgggaaaggaattttaagaaagaatgttaagttcataaatggccttgtttttagcaacaaatcaatactactaacattgacaaatcagcaaatacaagtgtaatttattatataaaagaacaaatgaaagaaaatgatgaagcattaaaaacataaatatcatatgagatgacaaattttagataaaacatacttcaagcaactaaaatgaataaactagtttattaagtgaaatttaatctcagattaaaaaataagatccaattctatataaacatgatacagtctccaggaaagaactcgcccatacaagacctctgacctaaagaactgtaagataataaatgtatgttatttggaaacacaaaggttgtggtaatttgttacagcctacaatagaaaaccaatagagcagaggcacaagaaggggctgaaaataagaagcttgactgaaaatcttaaaggtgcagttatatctgcaaacaccgttccccatcctttatggccaggagactgccccttcccacgctggcaaaaagggggaggttgattctctgtagaagctaagccagagttgttctaggacatcaggcaaagctgaagataagggtaagctaccttaaaatctataaagtgaataataaagtcccctagcctcttttttagctcagctctcatactgctggcagccaaacacaaatacttcagagaagagcttagagaacctgccctggggaaattgatcagcctaagagaaattatgcagagatactgacatgtgtttctggaagtgaaatggttgcatcctcacttgattactctacagtaaagacctctacttggcaggtcgcatccaagcaagagctttcattagcattttaatgcctgattcgtaattattaacagacaccaaagatcaccagatattttagaaaggcctgtgatatgaaaaccaggccagaacaaatatagtaaaaaggaacttgtgggaaacagaaacttcagggagcagaagaaaatacacaataagctacagtaaatagtctcattaattcaaagatacttatcgaacacctactacagtaggcactcattgttctaggcattcaacataaagtaatgaacaaaccaaataaagtttatacctcatgaaacttacattatctcagagacataagagaagctactagacctatgaaataaaaatgggaaactgtaatagaaatatgcaaagaataagatagaacttctcaaaagttaaaaatgtgaggactttttaccaagagaagggttaaatgacaaagttgatgaatagaaaatggagaaaagataaagccttaattagaggactaggcaaggaaggtaaatatcaaaataatagagattccaaaaaggaaagagaaatggagagaagaaaaattttttaaatatacacaaaacaaatttcccagatatttatgagtttctaggcagagaataatgaatgagaaaagatccactccaaggtacattatcatcaagatatagaacactgcaagtaaaaagacttaaagatcttctcaaaagaaaaaatagattccatcaaaaaggaccaggaattcaaatgacatcaggcttctctacagaaataatgaaatgtcaaatacagtgaagaaaggattgccttaaaaatatggaaggaagatgatttctaacctagattttcacaaagccatactttgaaaatagagtatgggagtgggataaagacatcaaaaacacacaaggattcaaacattttcctcctgtgccccattctggggaagatactggaggctgtgctccaaaaagcaaaggagtaaacaagaaagaggcttcaggacacagggtttttaacacaaagaagagaaacagaaaattcctagaatgagtaccatgtgggagatgtaaaacttgggcatgggctgtcaaggaagaaacaagaaacaggaagttcaactgacatgtttgaaaacagtgaggggaaatgaacagttatatcagagagtttggggtgaattagtatactatgcagctcaactgattttttttttttatactttaagttctagggtacatgtgcacaacgtgcaggttagttacatatgtatacatgtgccatgttggtgtgctgcacccattaactcgtcatttaacattaggtatatctcctaatgctatccctcccccctccccccaccccacaacaggccccggtgtgtgatgttccccttcctgtgtccatgtgttctcatggttcaattcccacctatgagtgacaacatgcagtgtttggttttttgtccttacgatagtttgctgagaatgatggtttccagcttcatccatgtccctacaaaggacatgaactcatcatttttttatggctgtatattattccatggtgtatatgtgccacatttgcttaatccagtctatcattgttggacatttgggttggttccaagtctttgctattgtgaatagtgccgcatagttacataattataggatgtaaatggtggctattaatgtattccaagtggtaatataactatatgggaagaatggaagagggaatatggtgagatggaggcttcagagagggaggggggagaatattgtgagaggaagaaatccacctcttccctgataagaatttagtaggtaacatcaaaatcagaaaaatcaagagacaggaaagtgacctcattactttgaaagatggtcctaagtacctggaaaaaaaaactttaaaaaacaaaacagctaaaacctttgaatatggttctttctagagaccagaaagcagaagtttcagggagaaagatttacagtttttcaatataaatgtggagtatttgaggggttcaatatatgtcacgtgtcttcctatcttggcttcaaacaaattgagagatgagcaaaaagagaggcaagtggagaggaactgtcactgttgttactaagaaaggccaatttggagaatggtgggcatgaaccccaaacaggcttattacctgaatcctggcattgggccgggggtgggggtggtggggggtgcctgctcacacagtgtcaggatgctgagggatactccccagcccactacgcccaccacatatgtacatactgtatggaggagatggaggaagctttgttccagctgaacaacttgagacccctctccacaaccgagctgggaaaatagtgacattcctttcaattttatgaattgaataaaacaagtattttagttcagtattcagaaaccatagacacagcagcaccttccttctggcttgtcctatgtttgaggctcaaggcacatggctcctcttttccagtattttaagctttattttatgttgaaattctgaactagaaataggtagagtctagcttaggaaagaaggcagcaggagcacgattttttatttttttttttttgagtcataaagagcaatgctccttgcttgctttccgagtgggctgtcctgcctttgtaccctcttctccagcatgcctcctttaccagtattatttatccttatttccttactggtgtgcctctgagagacaaggaagcaccctgggggactctcaggaagtccctgctggcatcggtaggaatagtagccaagggttgagactccaagtctcttgatgaaatggacagaccccacttctgcccttggagaactcacactgtggctttttttttttttaactttccaacttttatttgtaggttccagaggtaaacaggcaggtttgttacactggtaattgcatgtcacaggggtttgatgtacagataattttgtcacccaggtaatcagcaatcctcacccttctcccacacttccccctcaagtaggcctccatgtttattgttcccttctttgtgtccatgtgtacctgatgtttagttcccacttataagtgagaacatgtggtattggttttctgttcctgcattaattcacttaggataataactataacctgtcttggtgctcaggtgcaatgaagctgagctggtattgcaaagagaagcttaatttcagggcttcctgggcatttaaggccagaaaaattcccgttcctaatgtaaaaataataggcattcatcacttcttacctcgtaagtgaataagaaaagaagaaagagcaatcatgtaggggttggccttaagtgctgttgcagaaatctccgtcaaaagcaaagaagcctgcactttcatccctcaatcccacagaaatttttttctgcttttatggttctcattgcactgaaaaggaaagccaccagacaaaaaatgagccaaatgcaaaggcaaacaaaatcagtccaggctgagaggcctgaggagaacatttcttaaagaacatcaggatattttgatatttatatctgtgatttttttaaataagcaaagcagatcctcttaggaagtagacaactatccttgattgttgacgggctgttggtagaagaaatctataggttctaagtatataatctcaacaggaaaaatgcaactaattcttagttaggcagggactatcatatactatgaggaatagtagaactcgggctttggagacattattggattcaaatggagctgtttgttattgggcaagctacttaacctcattgagcctcagtttcttcatctgtggataataatagtgataaaactgatgagattgaaaagagattagcaaacactctagttcatggtaggtgtgtaacatatcagttccctttttccaccactgatgcccattgtggtagttattattgatcatcaccaaatctttccattcttctctgaagcacacaatgcaactgcactttcttgctcccttgaaaatagatatgaccatctgatttgcttcagtccatgagatactagcagcagtgatgcaccacttccaagctgaagctttaaaagcaagttctaggtttgccatgcatcttttctccctgcaacagcaaatggcagtgttctagatagtgaccagcttggggttaggagttaggatgacacagcaaacttcacaaaggacaggtagcacaagtgagaaacaaaaaccttcattgttttaagccactgtgatttttgaactttttgttatcataacataacctacatcctcctgattgactcaccttcctttaagtaactgtatttgccatcatcttaattcactccacagatatgtgttagccaaaatgccaagcgcagggctagatgctgagaaatgcatgatactgactctttgttctcacggggctcacagtaatgggaggagagtgagggtcattgtcaggagtcttttaaaaataaccccagttcttttgtttagctaaagtcgaggtttggaactactggttttgtgcacattgaatacttcataagtgtgctgactgcctgcaattttaataacagagaagctagagattttaataagtcagaaaaaaggttgtatatgtggagagaatgaagaaagaaatgattaacaaagtaagtatgagtactgtactttattttgtccctgggttgcccacaactttctgactcagctatcctatcttttttttttgagatggagttttgttcttgtttcccaggctggagtacaatggcgccgtctcggctcactgcaccctccgcatcccaggttcaagtgattctcctacctcaacctcccaagtagctgggattacaggcacctgccaccacacccagcattttttttttttttttttttttttgtatttttagtagagacagggtttcaccatgttggccaggttggtctcaaactcctgacctcaggtgatccacctcagcctcctaaagtgctgggattaaaggcgtgagccaccacacccacacctggccctcaaccatctctttcaccttctgctcatgacagtttactagaatttttttcccttgagactgaatgtcaagtcaaaaacaataaaaaattgctaatcattactatgactccagagctacttgcttctttaaaaattcctgaaattataaaatataaagccaaagcaatgaatttctaatggtggaattgtagacactgtggccccctggggatgttatttcagatggggcaaggggatattcctaacctattttaaatcatgccagcctagataactatgtgaaaattatatgggtgcttagcaaaactattaactagcacccctttggcagttttacattaaaaatcctttattagcttaggtatgacctagtgatttttaaaattcattactgatttttgaaagcctcctcttcaaaacaaaaagagcccattgttcttaactggtaataccaattactcctataaactatatgttaaaaccaatcttacagctaatagaagggtaaatatgaggccaactaatgtttatacttacacaagtatctacaaatataaagaagtagctccttaataatttctaaaaagagacccattgattaatctacttgagtctcttagcaaatgctactgtttaataactcatttgatggtagtaaattttctcctgaagctaccctttctttatgactaggcaataaggtctgtggatctgggagacctacagttgttattcaattcctctgcttccacgtagtgtgatttggacaaatgacaggccctgcttttctccattactaccaggatggaagttgtagccttctcaactgttgtggcaattaattgccaagttcttggtcaactgtcaaatcttgagtcgaatatggatctcattgagatgctttggaactgtgtaggagtagtcactcccacaacatttatctcccccttctcccttactaagagagccctgattttctaaaagatgactatgtgctcagttgaaatactgtttacactcccttgcagctatgtcttgtgaccaagtcgtgatcagtgaaatgtaagtgaagcattgacagaatcccttcctaaataaaaagacaaagcctagcaaggaggccttctgcctttcacccttcactctttcccttcttcctgcctggaacacagatgtaatgcaaaagaataaaccattttgtagccatgaggataaagccatacattaagaaagacagatcaaaagatctgggttcccagatagcatcttgaagctattttataaaccctgggcagtctgctttcagacttctttttaccatgagaaaaataaattcttgtttggtttaatcaccaagaatgaatttttattatgtgcaaccaagtgcaaatcccagccaatacaatctatggactcatgaggtcttcatctggatctcattcctcttctcaccgaatcaagactcagggtcatctctgagctgtaggggaaaaacctgaaaccataaaaattctagaagataacataagaaaaactcttctagacattgtgatattcccctccgcaccccatgtagccagaggcacctattgcctcagggaagaataggattgttaaactaggaaagtagacaaaggcagggtaaaaataaagcctaattggttacccagaggtccaatttgtatagaaaaggcaaaataaatgcacaattgttttccttttcctaaaacagttttgaaaattatgagctggttccctctgaaccatcaagcaatcaatctgttcagttgtttttaaaatattatcaattaatagatataatcatgtttgatgtgttttaaacaattgcgattatcttttttttttttttttttgatgctcaaattagcccgtctttggtcagtgacagcctatttgaattgtccccttcttgacacaaccctagtggtagttgatagttttcttgctttctgaaaatatttacagataaaatgatatgatgctctgggatttgcttcaaaatgatgacataggaaaaaggggtatagatgaaatatgactgtccatgagttcataattgttcaagctggttatggccccatggagattcattatactactttcttacatttgtatatgtttgaaattttctaaattaaaagttaaagataaaaaaattcagtcaggcacctatagtctgcaagcacttgggagtctgaggctggaggatggctagagcccaggaattcaagacaagcttgggcaacatagcaagattcagtctcgaaaggagaaagaaaaagaaaagttgagtcttgaatgcctggctttgattggggggtggggggaagaaaaatatttctaagttccctaggcttccctttacttattgatgagtaggcccagaggtctgactacagagctgtactctaagtcagaggtcatgagctctcaggatatacccattacccccattgtaaggagggcatgaagaaaccctcttggatgggggagagaacagaaggatggagggtaaggagaggggaaaatgtgcgaaaagctttcagagcttcacgagttgggtacctcttggcagctttgctggtggtcacagggttgggtaaaaggggttccctcactaccaatttgtcttaccaccgtcttccattctttggcccagattctagtctctcatccccaacaagcctgattctatttcttgtggtcaaggggatcttgctttccagataggacaggaaggagcactgggctggacatcccgaggccaaaagccgaagcctgtcagtgattcaaaatgacacggggttttgggtctcactttcatcacccatgaaatgaaaggtcaccctgcaagactgaagcccctgcagtgtcccaagcatccaaatccaacactcaagaaaccctggaccccaacagcctgtcctgcaggcctccgtgccttttcattgaacgtcttttccaccattacacatcacatcgcctcctaaagaaaagcgcgactgctatcactttttgcagataattggagaggcggtgcccagcataagatgaccccaaagttgacagcactttcaggctttgtgaattaggcgcgtcaccgacctgtacgatttctcctctctgcccttgctcgcctgcaaatcctgacccccgtccacactgcggagaaatctcctaagagacggctgccagcgtcgcctctgcgcccaggaggcgtggagcaaaggactcgggagctgagcgcgctgcggccccgctcccagcgcacagcgcacagcccagagggaggggccggcgggggccgggcagcgccagactcggagcgccgggctcacagcggctcagtctcctcccgaacccagcccggctggcgagagcggcagccagtgcgagccagagcccgggcctcagagcgggtaggcggagggccggcggactggagcggcgggccgcgctcgggggccccgccgtgtgcgcgtcctcccatcttatcctggtaagtgcgggcggctgcgccccgcctgccgctgtagccgctgtggcggtcgtccccgcatcccggttgcgcgcatcccgttgctgctctgcaggctcacaggtggctctgccgtggatgtgggcgccccaggccccgctaggagttagccaactctctgtgctccggggcgtggatttggagcccccgcctctcctacccttgcttttggcttgggatggggggcgtggggcagggcctgccgtcgggggagacgcgcagaggggcgcttccattccccagccacctacaaacgactcagggggatgcgggccaagcgcctcaccaaatgcaacccagctccaagctcacaggtggggcgtctgtcctttagatttattttcctattaatccaccagggaaagtttgggaccacgcaaggcaaagttggggcgcggctgggggcgaacattctcctacggaggcagctcccggggagacgagcggtgggttttcagggggagcgaggatcgggctggagatgactttgcgcccggggagttgaatctgtccctgctggtcgcccgggccgggcatttacacaatcccctgagtgctgtgaatcgcttaatcgttcctgctaagcgttgacgttcgcagccacctgggaatctccgtgatggggtcgggttatctcaggagtagcagcaactcagcggggttgatttgtgctcttgctttgctctgaaaacctgagctccagctaatctcagtatttaagtggcgtgtgtttaattagcttattttacacctgagattatctcagcgactgcctccaaaatgaaatcgttgatatggaaaagaatagtctttttaaagaaaaactaaaaagagaactcttcagaatatcagctgtcaagtctggctattttacccatctcctccgtgggatagagaaagaaaactctgctttggatatctaacctattaaagtcagtggtggggctattttgggcagattttgtggacagaggtattgctacaacttgcgtattgtttatgaaatacacatgtggtctctcgaaatagcctacttgttatttcactgcattgggagttctttgacttactaagctgcctattttaaatatgactaaaggttgtttttttaaaaaaaatatttagctgaaaacaatgtctagatgtttagggaaggcagcttgtgcatgtcaccagaatttttttttgtaaacttaaatttgtaaaggactactttcccgcatctgataaaggagagactttttatgaaaaataagatctgatatcattatgtgtgcagaaaaaagatcactaaattaaagaatcactcactttccaaatgataggttaaatcagaaaaagttgcctacaactgagaattatgtaattggaccaaaagtaaacaatgaataattgttagttgccaagtacctagacagttctgaaagaagtctaggtacctttatagcactggaaggttattacatgatttaaggtgagataatctgatagattttcacctgtaaaatttttattcttacatctgccttctctgcacctaacattggatttaccaaaatatttatttgggtttatacatacatcttcataagtgccacatcccatactaagtgctacatatgtttttactcatcttgaaaacaatcctgggtggtaggtaccgtaattgtccccattttaaatgaggaaactgaggcacagagaagttaagtaacttacccaagatcgcacagctgcaggacaggactttatcatatctgcaaagatctttattaaaaagacgtgattttatgatttacttattctcgtttttatttttatttaagcataaatgatgaaagtttcctgtgaagcataacaatccctgattgtgaaagtaccccacaagcatcgttaactataaagtaaggaaaagtatgaaagaaccatctggttgagtctaaagttggaagatcaccatatccaccagaagacccaggatggatctgcaacaaagcaccaccatcacttccctagagaaatggtgtttggatgagtcactgtctggctgcagaagacattatagtgtcaagaaaaaactgaagttaattcgagtcttaggccttttcatgggtctggtagccattagcactgtctcattttcaatcagtgccttttctgagacagatacacagagcacaggagaggccagtgttgtaagtggccctagggtagcacagggttaccatcagagaactctcttagatttaaatgacaagattctggattatactccacagccacctctttctaaggaaggcgagtctgagaatagtacagatcacgcccaaggagactacccgaaagacatcttttcccttgaggagagaagaaaaggtgcgatcattctgcatgtcattggaatgatctacatgttcatagccttagccattgtctgtgatgagttctttgttccttctttgactgtcatcactgaaaaactgggcatctctgatgatgtggctggagccaccttcatggctgcaggagggtcagccccagaacttttcacatctctcataggggtatttatcgctcacagcaacgttggcataggcacaattgtaggttcagcagtattcaacatcctctttgttattggcatgtgtgctctgttttctagagaaatcttaaacctgacatggtggccgctctttcgagatgtgtctttctacattgttgacttgatcatgctgatcatatttttcctggataatgtcatcatgtggtgggaaagcttgcttctcttaacagcttatttttgctatgtggttttcatgaaattcaacgtccaagtagaaaaatgggtgaagcaaatgataaaccgcaataaggtcgtcaaggtgacagcaccagaagcccaagcaaaggttggtggtggtggatttttatttaatgcttttcttgactacggttctgaattattatgtttttgagatctgcagttcttttgatgtgatggtgtttggggctcttgtggatagcagattgattctgcagttctgtgatagctagactaacatagcagtggaaaaaataattttggggtattcttgcagatgtttactaagttcctcagctacttgcttcagagtaaaacacttgtaaatataggttacataagcctcccaaagccaattcagcagttatttgtctcttattttctgaaagtgggcataatgattttgtgaacaatttaattttcataggaaagtgtgtatgtgcctagaaagttgcaaggccttttctttttaaatgaacacatggcaattaccaagaaagaaccatctctttagagatgtctgaggaagaaagtttgtgtcaccgtagctgtaccttccagtcagcagcctagcccagcagggcttgtcattattgttgtcatggctgtttttcttgattgacacaatcatgtcttaggtcacttgaccaggaactgatcagcatccattgtaaagagaatcattggccagccctgccatctgcctctgcatcacaatgacccactttgcacaccataataaacatgacttcaactatttttagagtagaatttgagggagttttaataacaatcgtggccatcctaccacttaggtgagtggaaagcagattggtaaagagcttagaagtaattcctgcaaacacctaaattatttttttaaatagtggacaaatggcatcaatacaatcgtatgtggtattgtaatggagttctgatttatatcctagcagtggaatatcatctctgaatgtgattttaaacagaaagccaaaatacctacatagacttttcatgccagcatctgggaaaattctcatatatgcaaaaaacagatatttgagcagggggtgaaagattttgttcaaaaagaaaagaaaaatgatattaatatggttaaatttgcataattcttttatagccaagtttgatgaccgtccttttcattgcagccatgaaatggaagcaaagggcaggataaaacactagcaatatttctacttgtactacatattttctaacatttctctcgtatgcttgtttgttagaaactatagtaaaaccaaaaaatcatttagcaaaatatacggcaaacaagcattcagatgtgacaactgagtacatctccttcagggcataaaataggaccatcattggaagttctcccctactctaacttagcagccaaaaaggtgatccctcaagtgctctcctcgagtccgtttgggtggtgtacattgatagtcttgtgtttattccaattaaagtactgaacgattgtcaaggaaatgcttattttttagaggcaaggaaatgattcgatgtcttataaatttcttgggtgcatcaatgctgaaaagtctctttgagaactcagtactttcttgttttcttacaccctagtggaacttcattaacttagagacttggctgaatgttatattggcaacatttatgaaaaatgaatctgcagagcaatccaatggtatatgtaggattgcggaaggattttgtattctgattttagtggggtggaagatggtttagtggagtggaagatgctttcatgcgttttagaaatagctttccaaatataggtttatagactgtatttagtcaattataaaccattcattaaagtagccctggaatgatctttacctactcaattaggtgacttatgtcatttttatgattattttaaggtcagaaattcaggttgtcatcccttaacccttgttatttgcatccataattttgtgctatacttaatattgtgtgttctaaaatttgggaattctagatttacttgattgaaaaagaaagcaggttatattcataactatttctgtttctgatttccccccaaaatgtgttcattgtattgttttccatttagcaccaaatagctttaatttattccagttagtcattaatgtttcttttgacattggttaactaatggaagtagagatttttttctaaacaaagctatgtcttattttgtacttctcaaaaaaatgccagagcacagtcacacgtttttaagtggaacgtgcataaggatgtgtgatttcctttaggaaataccacttgccaatttcacttttgaattattgctggaattttttctgtaattacagcctttatcatatgcctgattgcagaaacttagggaggttttcccccccaggcactgaacataatcacatctctgaatgtgattttaatgtaatttgattcatcctgaaatggggatgaatcctggagtgtggtcatctagtcacctggctgcagagttgaattctgactgtgtagcttacctttcttacagaaattaatgcttctgacatcaccaaaacatctaggaaaaaaagactttaagccaaatgcggccttcagtggagtcttcctagagaggaatgtgctgtacaagaatttaggaagcaaaatactaagcatgttttcatgcaaagtcacttcattgtcctgtttgcaaaattatgggacatgggagtttgggaaggtagaggaatcacattttagatattcttatacaaatcatcaaatggttcttgcaaaaaagtcaactctgctgggctctaggcagtgaatatccttgaaactacttgcttcataggcaaatataaaatcttaatttggttccattgttgatgatgtacatcatagggtaactgtgaagcatggaaaaacatgaactggcattatttttcatagttaaagcaacagtttctcatctcatttaaatttctctaccttgtgtgtggttcttatttttattattgttatttcttttagtgatgctactaccctttttaaaaagttatataccatcatgacacagtgaagagaccctggggctttaactcaaaaaggaaagagtctttagcctggttgtgtaataagcccagtgatttcagagaagtcattttaactctctaagcctcagtttcctaattggaaaatgagaataatgatacctacttcataagattggtaaaattattaaatgaagaaatgaatgttaagcatctagcatgatccttggaaaatgtgggttgttttcaatgaatgttaatgccttccttttatgtttcattcttaagtgaaaaatgagttggaataaattattttagattcaagagttataaaacattccttgaagactgaacttgctccagtgaatccttgagttaagcagtccgtcataccccttagggttatataatatttgctgtattataatattcataagctctagttcacatacagtgaatataaatgggtcaaacattaactccaaggaaacttcaaaatgtctttatttcatcctgagattttattatttggaattttgcttaaagtgagtagctcattggctgggacttagcaatatccattctaagcagagacttttgcttttggggtatttttatttatagatgtttggggctctcttcttaaaatgtctgtatagctggttaggaataagtttgaatcctgcaggatgtgaagcagttaagtttcagatcattcggctcattttgctatgctcctagcctggctgctgggggccgttgatctgttatggtgctaggctgtcattggcctagaaagcagctgtccatggtatttaacttcgtcttagacttggcactgtaatctgacagcaagttggcctggttctaatgaagggcacaatctaaataaagatgcttaaagctggatagttggagggccagactacttagtaatttaggtgtgctttgctttattcagtttgtgtgtttctgaaaagctgtaaagggttttagcaattcaaattgtgattaatgttctttggaaaatcaggattaaaacaaaattattataaacattcttcataaagtgaagtagttcttgtaaagtactaaaccataaataattgtataagtatacatgtgttgcctcaactttgcttaagacacagaatttattaattagtaaaattaatatacaaacttcaaagtaggtaagatggtccttatattaaataaaaagatgtattacttgatagatttggaaactaattctctgtatttcttaaaagaaaaaaacttaggcattaaaattcttaactgactgtgaaagtagtgtgtttatctagggatacagcatggtgatattttccttattttgtttccctctacttatcctaaaagtaaacccgtcagttactgcttgtgattcagagagtgaactaggcattttgagagacccagaagggcccagtggattttgatacacacagttcaaattgcccttggccatttcccttgctattctggtttcccctggcaacagatgacctaaactttgtgaatcctagagaactggagtcaccattatctctcccttccaccttcccctacttcatctattcctctctttgtccttcttttcctctcctcttccctccttttgtccccttcccctcttttttgttagaactagataatttgtatcttaactttagcaaagaatgggatcgtgtgttaagctattctcttgctactggggacacaagtacatccagagtgtggttttggcaagtttagtttttccatccttttattttcaaccttcttttgttttaggtaagtctctagtaaccagaatatgcatgcagtttatttaattcagtttcacaagcattgtcttttaaccggaaagtttactttgtttatatttactatgattactgtaacatttggattctttttcatcatgttattgtatactttctatttattttggcctttctgtttctttttagaattttttcttgcctttttttgaattttttttctaactctctttttccctttaatagtttggaatgtatacactctttttttttttttttttttttgagacggagtctcgctttgtcgcccaggctggagagcggtggcgcgatctcggctcgctgcaggctccgcctcccgggttcacgccattctcctgcctcagcctcctgagtagctgagactacaggtgcctgccaccgcgcccggctaattttttgtatttttagaagagacggggtttcaccgtggtgtcaatctcctgacctcgtgatccacctgcctcagctcccaaagtgctgggattacaggcgtgagcctacactctatttctattatcttgatgcttgccttagaaattttaacctgtgtggccgggcgcggtggctcacacctgtaatcccagcactttgggaggccgaggcaggtgcatcacaaggtcaggagttcaaaaccagcctggccaagatggtgaaaccccgtctctactaaagatacaaaaattagctgggcgcagtggcaggcgcctgtaatcccagctactcaggaggctgaggcagaagaattgcttgaacccgggcttcagagattgcagtgagccaagatcgtgccactgcactgcagcctgggcgacagagtgagactccatctcaaaaaaaaaagaaaaagaaaaagcaattttaacctgtgtatttaacttaacatactataaagttaattaagatgtttacgctccagctaaacaacctaagtaccttagaaaattactcagtcaccacttcacccattgtatataattcgaagtctagaatttaagctctaccttgatgtgttttttgtccgtttgtttgtttttggtttttgatttttgttttgagacggagtctcgctctgtcgccctggctggagtgcagtggtgcgatctcggctcacttgcaagctccacctcccgggttcacgccattctcctgcctcagcctcccaagtagcggcactacaggcgcccgccacgacatccagctaatttttctgtactttttttactagagacggggtttcaccatgttagccagggtggtctccatctcctgacctcatgatcctcccacctcggcctcccaaaatgctcggattacaggcgtgagccaccgcgcccgcctaccttgatgttttgtaaacagctttattgagttataactttcattttttaagcctcataaattagacattgtcattttaccatcaatatttttagatttatccacatatgtactggtttttcccctcctcattccttcttgtataccaaaccttttatctacagttttttccctctattcctgatgtacattcatgatgtttcttaatctgttaatagtagatgcacctgatttttatttacttagagttttatttcacttttgttcttgaaatataggacaaaagtagtgagtagaaaattattttctcgtccaatttcgataataatattccactgtctctcaattccgtttttgctgttgaaagactaccatccatgtaaacattgctcctttataagaaatttatcttttttcctttactacttttaaggtttttgctttgagtgtttggcattttccttaagatatgtcaggtgtgattttctcatttaggtatcctctatttgtgactcattaggcttcctgattttgaggattagtgcctcccaacaattttgcctctaccccaatcttcctatagtctgccttctagaattccagttagacgtatcttgtactatcttaccttccacgtgttttcactgttcatggttttctatctgtgatcctcattcttgtcatttctttatatctaccttctagcgtctcattttctctttaattttgtctaatctgctctaaagcgcatctattgactttctaattttagttatattattcatttctacaagtcttatgtggctctttttcaaatctgttaggtagcttttcattgtttctaatttcatcatacttttaatgcctcttttattcctctaaacatgttaagtatatttattttgtatttcattgttgataaattttgtggcaatatctttgtgggtctagttttgttgttttattgattcttaaccatgaaatttttttaaactttgagcatatgtttcttgggactttacctgtggaactccattgaggcctgggttttaagtacattcctccagagaggattgctctcctgtcaaaggtccgggagtactaccaactggggccattctaagctacatgtttgacttttttactacccaggtagtgtaaattcagactgcaaacccgtatgagcgagcctgtgcttaaaaattcttaagggagattcatctttcttccccatcttcaactttcagcagcactaaaaaccaagactcaaatagacacatcctaccatctccctttgcgaggcagattttttttttcttatttgcttactgaaagtgtcaacccttcaggagtctcagcttacagatagagaagttctctgaactcccttcccgctatcaggcctcatgtttgtatttctaaaaacctagtctttaggctgctaaggaatggcaaataccttgaaggcaaagcaatacagacatttctggacttgtatttggtcagtgttctgggttctaagaatcccttattcctcactaaataaaatagttagatatttgaaaaatatatttcaagtgtaatattccaacattttagggagtaatatattaagaagggtttgttattctattgccagaaatttcagactatagatttctcaaaagataatgcatacaacaagtgacactgttatggaattttaatggcattctctcaatgtttaatacagcctgaccatcatagtaaagtttctcatcaaaataataaatcctagaaacagcaagttttagtcattcaaatctgaggagcaattctaacatgaagttatatgaggccactttaaattttaggtttgccttttaaataatatatttatcagataccaaaattatgtattcattgtacaagagtattaaaaacacatcaaaatataaaaaagaaaattttgaacagtttatattctctcattgcaccatccaaagatgactatgcacattttcgcatatagcattcttctgaacttctcatatacacatacatatacacatgcatatgtacatagacatatatatacacacctatgtatttaaataaataggaacatattggacatacaaaattttatatttaccatattgaatatatacaattttaaggtttttacaaatttttggcctattatggagccttttccccatcattaaatgtttttctaaaatgctatttactgtttagtattatcataatatagaaagccattttcatgttgccatttattgcaatatttaacattataaaaaatactacaacaaatagctttacacatgaatttctgatttcgtagaagcagaatttctgggtcaaggcttatcagctttttaaagtttctgccacattgctacatacttagtagtgttgaatattataatttttaatgttttccaatttcatagatgaaacgtagcattttaattaattgttttaaatgtgcattgctttatttgggagtctgggctttgaaacatatgtttatgaagaatgacatttttcttttatagattgccagtttcctgtgtcctttgtgtcaattttaaagctagctgtgatgactcacacaaagatctcttacaaatatatgctgagaatcactaactttagctctcctctctctccccatttccacacctaaatggagccaggcagtttttgcaggttttgtttttgtttttgttttaatgggagaattattctgaagaggagtcctcatgaccgaagatttgggaaatgaagttttcagggactgggatgtgctccttggccatttaacctaagggggattctgtacctccaaggaaccctattgccacatctggaatgtgggagattcaccctcagtgacctaacagatttttagctggtcatttctatccttaggagctgtaatatttacaacgtggaatattctaaccaggccaaagcagcaatctaatacattcaccctaaacagaagaccagagtctagccatgcccatatcacccaactctttttcttaactgacttacatgtagtagtttttctcaaatgatttaattgacttgaccaagcaataattttagcttaagcatgctgtgggaggtagctcttccagacagatggaagaacaacgtgcatgggaaaaagtcatataaagtttactgtaggacgctagaccgcctcagcatttgtggcttctgacaaggaaaactatcctgggcagctgcatgtgtgtccctggactgctggtctctataggtctctccaaagtcaagagaagagagggatttgaaaagtaggcagtgcttaataccaggtacttactacatcaacactctgaaataaatattatcacctccatctgcagatcaggaatctgaggattgggaaacataaatgattgcctaaggttcaaatttagtgatatttaaatggcgtttgaacttgagcctgtctgatttcaaactgcaagctagttctcttgtacctgagtgcttctcactgggcacttaaaaatacagatgaagcaggcctccaaattagattcacttttcacattgtgagctgtcaaatcagtgactttcaaatgtttttgaccatgccccatgtaaatatattttactctcaacccaatatgtatgtgcacatgcatgcacacatacatatgtgcatatttacatatccatataaagataaaatctaagcataaggcacttttatattttgtaaatttttcattctattaaaaatactggtgtcaactttctaaaataatttcatggaccaccaaagggctgtggccttagttatgttaagaacgtttttttctccttcttcctttctttcagcagggctgccctgcaaagctgtactagttgtgtactctacaagggcatctgtttgatcaaggtgaagaataggagaaggaagctagacatcactctactgaatgagcggaatgcactgatgtgggactgtggctgcctagaggaaggggtgccttttcttaattccgcaaaggtgtcttttggcctggtggtggccttgcttcttaccctcagcttttccttttagtaattaatttatttagcatttcagagccatgatctaaaaggaccattaaatacatataaatccatgctaatcttcatgactgggactctttcagccatttagacctagatccacacatcatcaatgcttcctctccaagcacacacaccatctatgtccatttggctaactctgaccaatgcagatttctgtagaatcctgaggccaacactcaccaaaccatgtattgctctctggctctgagatagaacgattgcagagtaaaaaaggcatagatcacagcatgatatgcttgctgagcctccagtcattcttggttcccagtgagcttgtcatcaggtggaaaagaaatgtgggtgaagcagagaggttatgaaatcagagaaaagcagaatctagacaagaagctgcatttagattaggtgggtttcctttttatgaaggattggatttgtaaaccaaatgatgcagacatggttcttgtatgggtaaaaactggtgggtttggaaaggatctgggcgccaggccatatttaatgtagtgttcacagttttaaagggtgcagtcacaattttgcatcagcaggactaagcctggaaagaagtccctttcatcccagacactggctgcgtaaccctgggccaggcactttgccccaagcgtcttctctttgaaaatgaaaggactagtttatctccaagatactgccagctctgataactctgtgtttctctgttaatgggaaagaaacaagtatacttgcttgtacttatgggttggccaacagaagagatagttaggtcatgaatcgctgaacttatttccttcagagtgcctttccaattaagaaacccaattaaagaggatcgcttcctttggaggagtaatgagggcttctttacccatctacaggaccttcttggaaagggccagatgagtttctgcttctctgtaagtaactttctcttttactgcttgatggacactgagttagacaagcagggtgtaggtagaaatacaggtttcaccttcagctaaaacctgaagcaccgtttttcccacttataaactgtcatctgttgttctagcaacttacataggctgaggtggttttctttttccgtaccacctgatagcaaccaaatatatattgaaccacttatttcaggcccgtaatagacattgaatattggtgtattccaggaacctgttagttttccgagacggccgatgatggctaaaggttaacacaatgaaattattatttaggcctaggacagagattattttggatagaccttcctagctgtgtgatcttggatacattacttaacctctctgggcttgtgtttacttatccataaatttttaaagtaatagcattttcctcatagggagggtatgaatttttgatgagattaaacaggaaaagtgtttagcagaatccagtttctgccctcctcctccccaacccaccaaagatacacttctcctggtctcttttgctctgagtcccttctctgtgctacaagcctactcttcttcagtcctatctttccctgcagagtgttttcctattgccatttcagggccttgcctacttcctaggtttcatttcctagacctctctcttgatgtctcccttgcagccatatgaatctgcagttccccaaccaatccctaactaacagtcaaatcctcagtgtttggacttgaccttgctttccttttattcttgcagaggattaagagagaaatagttccctatctctgaaactaaaccttgctcaaccatgaaattctcttgagccctcttcttgccaccctataaatgtgttcactcttgtgtgtatcatcaatatttaatcttagctattcatgcacctatctagtcatacctgtgactgatgttggtttgccagcatctgtgttttctgtcttggattgaatcactccccttgacttagtaactaactggtcccatttgcagtatctggtgcctagcttggtgtcataggtagaaggccaaagggcgcttaatgcttcaagaagttgatagtggtgatgatgagtgttcatgataaaaagtctgagcctgaatcagtcataaaatgtagtgttttatgtattaaactcaagcagcaaatgactaatttcctacttatgaaagaggaatcattagaaaccctcctgtcccctcaggttgcaagtgtgggcatcagggtaggtaaggcatttcaattctaaaagccagtttattccagctgtggcccaaaatagttctctttgccttctagccttatataatgtttctctattgactttttaataacagcttttctgagatgtaattcatttaccatagaattcaccctagttgtataattcagtgttttttagcatatacattcagagtcacacaaccatcatcactatctaattttagaacattttaatcaccaaaaagaaaccctgtacacactgatagtctctcccaattcctccctctgcccagcccccagtagccactaatctactttgtcagtatagatttgcctattgtggacatttcacataaatgaatttatataatatgtggctttttgcactggctgctttcatttagcgtaatgtttttaaggttcgtccatgttgtaacctttttatgtccaaataatattgcactatataggtacaccacatttcatcagttggtgaatgaatttagattgttttcacattttgggtattaggaataatgctgaagtgaaatttacttacaagtgtttgtgtgaatacatgtttttagttctctttggcatatgcttatgagtagaattgctgggtcatgtgttctctatgtttaatattttgaggaactgccaactgttttccaaagcccctggaccattttgctttcctgtgtgtatgagagttccgatttctccacatctttgccgacatttgttattagcttttttattatacccatctttgtgattataaagtgatacctcatgattttggtttgcattttcctgattaatgataacgttggacttattggccatttgtatagcttctttggagaagtgtctactcaagtcctttgtccatttttaaattgggctatttgccttattattgagtttcagagttccttatctattctggttacaagccccttatcagatatatggtttgcaaatattttcctccattctgtgagcttttaagaaatgtgctccatagatacagcagctcctagcctgggaacccctaccaagctgttctatcttgttttctaagcacatttttatctagagtgatttgagacccttggatcaaccctaaagctgtttcttcctttgagctcgtccttggaaaagattgttcccctgaagctaagaattggaggaggattcaggggttgtttggggcccaggacttcctgattatagagaacctgggaatgcaaagctacttgaacattggacccaggatgcctgtcatctggttgctgcatcatccttctttgcctgctcctgattcttctctgccttatctaaaagactttctcgtcataaaatcttccctacttcttgcccagaagccctaccagcaaagcagttaggccacaggcctttgctccaagatgtgaactttgcctgttttgctgtctgtactgggcccttagctttatacatcttggttatggaccaaacttgcccatccaccttctatcccccaatatatgtaactcctcccattccatgccctaggaacatttgcatccatcttgaacagcactttgtaattgtatgaagctccatatatacggtaaaaaataacaatagcagtaatgatctactctgtccttgtctagcatggacagtaattgcacaaagctgattaatgtgcacattccgagggcaaagagaacttaaccacatgatcatgctttatacaaaaatgcacaattggttcaaagctccagtggtttccagggggctcaggaaacatcctcgctctcgtttctagcttgtgtcagctacacagtaactggtggcatggtggatggagttttgtggccctgacttataataagaggcagatttatttaaatagcattcagatgagcagccaggctgctcttttgatgcttactatgaagggccattacaaatctactattttctgctgccttttattttaagtccaattaagtggatagccacaaatagctctgaccttgaaagtctaagtgaaggtgagatgggagaacaggcttaggaaacatatgttttggcgtgttaatgctctgcaagtcacacacacttgaggaaaataaatagaacaggacaagatagtgttgtgctttaggaggaagaatttaaatgccctgggaaataacaccacatgcctccctggtgcagaatcataaactgggctaaaaattaatccaactctatctccgtttccctgggagacaagccccaagtaagtgttattggcagttatgctcattgcataatcaccttggattggcatctctgccacatgccactaccgaatgatgcttccttctctcggcagccccaatacttgcttttggttatttatttttaataaaacattgcttagaataccgtaccaccatctcagtccagtttcttgcaaatgtggatcacaggatgaatcttctggagttgaatagcttgtttaaaaaatattagtaaggggcctcttaatgaaattattgaagtctaagagttgggttacagaaatttaaagagctgttttttaccatcttaaaaaaatattaagtatttgtaatgtgctatgagttgctcttctctatctttaacctcatcagtcctgggaaataaatatctttctgaggatcttactgactcactgaatggtcaatgttaagttttagtttctataaacctatctcaaaatattttatgtgctactgtctcactacatgctccaatattttacaagttacctatgcatttatctgtttccaattttctccatcaggaagtgggagcagatgacctttctcttgtcttgtaggatagtatgatagttagtaaggtaataggaatggatcactatctgagcccatgctagaacaaaactgcagacatgaagagactgtgacaagtagattaaaatgatttcaagcacatttttagtgtaaagttcaaatagtctttatagaaaggattgctctaatgtgactatcctgaaaaaaaatgcatatagtattaatcttgagagattaataaagcactttctggcaaactatatttgggtatgattttaatcccataaacttccgttaatccagaagtatcttacttagatgtccagaacagaaccgagatccaaaaccaagagaacttttgaacggccaaatagatgccagaagatcaatgctctaaattccaggcacttagtcatacagcaacttcttgagactctgcattaaagtctgcttactttggtcatatacagaaatcaggcaagttaggtttcctggctcataaagaaattagaagcagcgaatgcagtctacatgggacaatatagactgcatttgcttcttctaatttctttatgagcctggaaacctaacttgctttatttaggtaagtaagttacctaaagtaactaaagtaagtgcacagtgtgcacagtgcctgctactgacctatttagtgcctttaagcagattttaaaaggctccctgcactgagcagaccaaatagaacaggcaaccccccacagacacaagtgtagacagacctgtaggtgtaggacgtgttaagcaaaaggcattttgtgcaaaaagaaaggtgccatcttttctgggtggacagatgcagtgtccaccaggactcatggcttggagtgtggaacatgggctctgatccccactcagccatgcatctctgggtagtgcacaaatgcacagcgtaggatgcagccctgctgattacattggtaacacagtcagtggcagtaagcatcggaagaaccataagaacatagaaaaatatatttgtctggggtcagtaagtgtagggtcaaaacacaacactttacctcatggtgtctgcaggcatgaaagtaatatagtaattaatgttgataatacccaaagaaatactgacaaagtctgactcatgttcactgtgactcatgttagagacagtggaagtgttgagacaggctgtagggtcaagtgtgtgagcagagtgacccacatgttcaggcactggtgccatgaatcaggtgggtaacagtggtggcctggcccaggtggtggcagcagaggcagtgagaagtgatcaaatgctggacgtatcttgaaggtagagctaacgacatttgctgatgggtttggtgagggaaggataaaaagagagaaatcgagggtgacactgagattttttgtcctgtgtaactagaagaatggaattgcacttaatggaaaaggggaagacttcaggaggagtgggtttcaagtagaaaagagaggagttcaattttgggtttaagatggttaacttgaacattgaaatggagatgctgagtaggaagttgggtatgagtctggaattcagactagaaatacaagttcagacacgagagtgtagataatgtgtaaagccatgggatggaataaaatcacccaggaatgaatgtagcagggaagaactcaaaggcctaagtcctgggattcatagcattgaagcatgaggaaaacaaggagaaaccagcaagggagcctgggaggtgcagctactgaggaaggaagaagactggagaatgggaagccagatgaagaaagcacagtagtccctccttttccacagtttcaattacccacggtcaaccacagtcaaccacagtctgaaaatgttaaatggaaaattcctgaaataaacaattcatgagtttaagttgagtgctgccattccaagtggcatgatgaaattttgtgctgtcgctctctgtcccacccagaatgtgaataatcccattgtctagggtatccacgctgtagatgctacccacccattagtcacttagtagccatctcagttatcaaatttaagaaacaaaatatagagagggttcagtaccatttgaggtttcatgtatccagtgggggtcttgggacatatcctcctctgataaggggaggctactatatcaaagaaaagaaactggtgaccaagtaggatgaggtcagagaattgaacattggggttagcaatgaagaggtcattggcgacttggtaagagaagctttggagtgcttgggtgaaaacctggccaagtgggttcaagaagtgagagaatgtgaattagaggtatttgtaagggaggatgaacaaatggggatggaagctggaagaaaaatatagagttgctatggtttaaatgtttgtctcctccaaaactcatgttgaaacttaattcccaatgtggcagtattgagaggtggggcctttaagaggtgattgggtcttgagggccctgtcttcattaatcaattaatttacccatggattaatggattaatgggttattgtgggaatggaactgatggcttcataagaagaagaagaaagacctgagctagcacacttagcccgttcaccatgcgatgccccatgctgcctcaggactctgcagacagtccccaccaacaagaagactcttagcaggtgcagcctctagaccttggactttgcagcctccttctttccctttataaatcacccagtttcaagtattcttttataaccaacaaaagatgaactaaaacagagatcaagtgatttttctttttaaaagtaagagattttacagataagttcctggtcaagttggctgaataaaaacagctctggtctgcagttcccagcaagaccaacacagaaggcaggtgatttctgtatttccaactgaggtacccggttcacctcactgggactggttagacagtgcatgcagcccacagagggtaagcagaagcagggtggggcatcaccttacctgggaagcacaaggggttggggaactccctcccctacccaaaggaagccatgagggactgtgctgtgaggaacagtgctatctggcccagatacgacccttttcccatggtcttcacaacccgcagaccaggagattccctcagttgcctataccacaagggccctgggtttcaagcacaaaattgtacggccatttgggcagacactgagctagctgcagaagttttttgttttttgtttttaacccagtagtgcctggaatgccagtgagacaaaaccgttcatgcccctgaaaagggggctgaagccagggagccaagtggtctagctaagcagatcccacacccatggaacccagcaagctaagatccactggcttgaaattctcgctaccagcacagcagtctgaagtcgacctggaacacttgagcttgatcgggggaggggtgcctgccgtgactaaggcttcagtaggcgttttttccctcacagtggaaacaaagtcactgggaagttctaactgggtggagcccaccacagcactgcaaagtcactgtagccagactgcctctctatattactcctctctgggcagggcatcactgaaagaaaggtagcagcctcagtcagggacttatagataaaactcccatctccctggggcagagcacctgggggaaggggtggctgtgggcgtagcttcagcagacttaaacgtccctgcctgccggctctgaagagagcagcagatctcccagcacagcactcgagctctgctaagggacagactgcctcctcaagtgggtcgctgaccctcatgccttctgaaggggagacagctcccagcaggggtcaacagacaactcatacaggagaactctggctggcatctggcaggtgcccctctgggatgaagcttccagaaggagcaggcatcaatctttgctgttctgcagcctctgctggtgcaggcaaacaggttctggattggacccccagcaaactccagcagacctacagaagaggggcctgtctgttaggaggaaaactaacaaacagaaagcaatagcatcaacatcaataaaaaggatgaccatgcaaaaactccatctgaaggtcaccaacagcaaagaccaaaggtagataaatccctgaagatgaggaaaaaacagagcaagtaggctaaaaattccaaaaaccagaatgcctcttctcctccaaaggatcacaactcctcaccagcaagggaacaaaactggacagagaatgagtttgacgaattgacagaagtaagcttcagaaagtgggtaataacaaactcctccaggctaaaggaacatattctagcccaatgcaaggaagctaagaaccttgataaaaggttagaggaattgctaaccagaataaccactttagagaagaacataaatgacctgactgagctgaaaaacacagcacaagaactttgtgaagcatactcaagtatcaatagccgaactggtcaagtggaagaaaggatatcagagattgaagatcaacttaatgaaataaagcatgaagacaagattagagaaaaaagaatgaaaaggaatgaacaaagcctccaagaaatatgggactatgtgaaaaaaacaaacctacatttgattggtataccggaaagtgacatggagattggaaccaattggaaaacacacttcaggatattatccaggagaacttccccaacctagcaaggcaggccaacattcaaattcaggaaatactgagaacaccacaaagatactcctcgagaagagcaaccccaaaacacataaatgtcagattcaccaaaattgaaatgaaggaaaaaatgttaaggtcagcccgagagaaaggttggattccccacaaagggaagccatcagactaacagcagttctgtctgcagaaaccctacaagccagaagagagtgggggccaatattcaacattcttaaagaaaagaattatcaacccagaatttcatatccagccaaactaagcctcatacatgaaggagaaataaaatcctttacagacaagcaaacgctgagggattttgtcaccaccaggcctgccttacaagagctcctgaaggaagcactaaatatggaaaggaaaatcaggtaccagccactgcaaaaacaaaccaaaatgtaaagaccatcggcactatgaagaaactgcatcaactaatgggcaaaataaccagttagcatcataatggcaggatcagattcacacataacaatattaaccttaaatgtaaacgggctaaattccccaattaaaaggcacagactggcaaattggataaagagtcaagacccattggtgttctgtattcaggagacccatctaatgtgcaaatacatacataggctcaaaataaagggatgcaggaagatttactaagcaaatgcaaagcaaaaaaaaaagcaggagttgcaatcctagtctctgataaaacagactttatacaaacaaatatcagaaaagacaaagaaggtcattacataatggtaaagggatcaatgcaacaagaaaagctaactatcctaaatatatatgcacccaacacaggagcacccagattcataaagcaagttattagagacatacaaagagatttagactcccacacagtaatagtgggagactttaacaccccactgtcaatattagatcaatgagacaaaaaattaacagagatattcaggacttgatctcagctatggaccaagaggacctaatagacatctacagaactctccaccccagatcaacagaatacacattcttctctgcaccacatagcacttattctaaaatcaaccacataattggaagtaaaacactccacagcaaatgctaaagaatggaaatcataacagtctctctgactacagtgcaatcaaaatagaactcaggataaagaaactcactcaaaaccacacaattacatggaaattgaataacttgctcctgaatgactactgcgtaaataacaaaattaagacagaaataaataagttctttgaaaccaatgagaacaaagacacaatgtaccagaatctctgggacacagctaatgcagtgtttagagggaaattcacagcactaaatgcccacaggagaaagtgggaaagatccaaaattgacactctaacatcacagttaaaagaactagagaagcaagagcaaacaaattcaaaagccagtagaagtaagatcagagcagaactgaagaagataaagacagaaaaaaaccttcaaaaaaatcagtgaatccaggagctggttttttgcaaagattaacaaagtagatagactgctagccagactaataaagaagaaaagagagaagaatcaaatagacgcaataaaaaatgataaaggagagatcaccactgatgccacagaaatacaaactaccatccaagaatactataaacacctctatgcaaataaaatagaaaatctagaagacatggataaattcctggacacatatatcctcccaagactaaaccaggaagaagtcgaatccctgagtagaccaataacaagttctgaaattgaggcaataattaatagcctgccaaccaaaaaaagcccgggaccagatggattcacagccaaattctaccagaggtacaaagaggagctggtatcattccttctgaaactattccaaacaatagaaaaagagaaagtcctccctaactcgttctatgaggccagcatcatcctgataccaaaacctggcagagacacaacaaaaaaagaaaatttcaggccaatatccctgatgaacatcaatatgaaaatcctcaataaaatgctggcaaaccgaatccagcagcacattaaaaagcttatccaccatgatcaagtcagcttcatccctgggatgcaagactggttcaacatatgcaaatcaataaacataatccatcacataaacagaaccagtgacaaaactacatgattatctcaacagatgcagtaaaggcctttgataaaattcaacaccccttcatgcttcactccataaacaaggtattgatggaacatatctcaaaataataagagctatttatgacaaactcacagccaatatcatactgaatggacaaaagctggaagcattccctttgaaaactggcacaagacaacgatgccctctctcaccactgctattcaacatagtattggaagttctggccagggcaattaggcaagagaaagaaacaaagggtattcaaataggaaaagagaaagtcaaattatctctgtttgcagatgacacgattgtatatttagaaaaccccattgtctcagctcaaaaactccttaagctgataaacaacttcagcaaagtctcaggatacaaaatcaatgtgcaaaaatcacaagcattcctatacaccaataatagacaaacagccaaatcatgagcaaactcccattcacagttgctacaaagagaataaaatacctaggaatacaacttacaagggatgtgaaggaccacctcaaggagaactataaaccactgctcaaggaaataagagaggactcaaacaaatgggaaaaacattccgtgctcatggataggaagaatcgatatcatgaaaacagccatactgcccatagtaatttatagattcaatgctattcccatcaagctaccattgactttcttcacagaattagaaaaaacaactttaaatttcatatggaaccaaaaaaaaaaaaaaaaaagcacatatagccaagacaatcctaagcaaaaagaacaaagctggaggcatcaagctacctgacttcaaactatactacaaggccacagtaaccaaaacagcttggtactggtaccaaaacagatatatagaccaatggaacagaatagaggcctcagaaataacaccacacatctacaaccatctgatctttgacaaatgtgacaaaaacaagcaatgggggaagaattccctatttaataaatggtgttgggaaaactggctagccatatgcagaaagctgaaactggactccttccttacactttatacaaaaattaactcaagatggattaaagacttaaacgtaagacctaaaaccataaaaaccctagaagaaaacctaggcaataccattcaggacataggcatgggcaaagacttcatgactaaaacaccaaaagtaatggcaacaaaagctaaaatagacaaatgggatctaattaacctaaagagcttctgcagagcaaaagaaactatcatcggtgtgaacaggcaacctacaaaatgggagaaaatgtttgccatctattaatctgacaaagggctaatatccagaatctacaaggaacttcaacaaatttacaagaaaaaaacaaccccatcaaaaagtgggcaaaggatatgaacagacacttctcaaacacttttgcactcttggtgggactgtaaactagttcaaccattgtggaagtcagtgtgtcgattcctcagggatctagaactagaaataccatttgacccagccatcccattactgggtatatacccaaaggattatgaatcatgctgctataaggacacatgcacacgtatgtttattgcggcactattcacgacagcaaagacttggaaccaacccaaatgtccaacaacgatagactggattaagaaaatgtggcacatatacaccacggaatactatgcagccataaaaaatgatgagttcatctcctttgtagggacgtggatgaagctggaaaccatcattctcagcaaactatcgcaaggacaaaaaaccaaacaccgcatgttttcactcataggtgggaattgaacaatgagaacacgtggacataggaaggggagcatcacacatgggactgttgtgggatgggggaaaggggggagggacagcattaggagatatacctaatgccaaatgagaagttaatgggtgcagcacaccaacatggcacatgtatacatacgtaacaaacctgcacgttgtgcacatgtaccctaaaacttaaagtataataataaaataaaataaaataaaataaaaaaattaaaaaatgacatttatgcaaccaacaaacatatgaaaaaaagctcatcatcactggtcattacagaaatgcaaatcaaaaccacaatgagataccatctcacgccacttagaatggtgatcattaaaaagtcaggaaacaacagatgctagagaggatgttgagaaataggaacgtttttacactgttggtgggagtgtaaattagttcaaccattgtagaagatagtctggtgattcctcaaggatctagaaccagaaataccatttgacccagcaatctaattactgggtacataccctaaggattataaatcattctactataaagacacatgcacacatgtttactgcagcactgttcacaatagcaaacatttttttaaatttaatttatttttttattatactttaagttaaaggtacctgtgcacaacatgcagatttgttacatacgtatacatgtgccatgttggtgtgatgcactccttaacttgtcgtttacgtgaggtgtatctcctaatgctaaccctccaccctccccccacccggcaacaggccctggtgtgtgatgttccccaccctgtgtccaagtgttctcattgttcaatttccacctatgagtgagaacatgtggtgtttggttttccgtccttgcgatagaacaaacatttggaaccaacccaaatgcccatcaatgttaggctggattaaaaaaaaggtggcacatatacaccatggaatactatgcagccataaaaaagactgacttaatgtcctttgcagggacatagatgacgctggaaaccatcattttcagcaaactaacaccagaacagaaaaccaaacaccacatgttctcattcataagtgggagttgaacaatgagaacatatgggcatagggaggggaacatcacacaggagcctgttgggggggtcagggacaaggggagggatagcattaggagaaatacctaatgtagatgacaggttgatgggtgcagcaaaccaccatgccacatgtatacctatgtaacaaacctgcacgttctgcacatgtatcccagaatttaaagtataataaaaaaataaaagtaagaaaatttatagtacatttgtgtggtaatgggaattacacagcagaggaaagatttgataattcaagagagggagaattactggtgcgttgtccttgaatggatggggaatgggcgggggatcctgcacacaaatggaaaggccctgacaagtgcccacattttaatagtaaggagggagccgagtgattgcccagctacaggtaatgggtgaatgtcttggtgggacttggagaagctgtctttttgtttctattttctcaataaaataggaggcaacagatttccaaaatttgattgaaaaattccttggtgaatattgaaaatcatctgtggatcacaccaacattcaacaaaataaagttatgtggctcagattgaattaccaaaatctgtactgcttgagaagccaggaagcaggatgataaacattaatctatcttattttaaaaggccacattattttttaacaaaaggatatagcagggtgtttatatggagtttgatgggcctcaagggtggttcactcactttctcaggagccctatttatgccagtatatggtttatggtggaaacatagaaagaagtcagtgaactgtaagtttcattcaggcagaaatctgttttattcacacatgaatccctaatgcctaaaagagtgcctggcaaataatagatacccagtaaataattattgagtaaatgactgatgtcaaaaccaaagtcaactagagtattctttacttaaagagatacagcaattaattttaagtaatctgtttttacattgtccaattttatcattcaagtgcaagtgtccatatggctgcaatgctgccattttcctccaaacactgttttgtgaactgactaaagaatattgttctgcttttatgggataatttcagaggattcaatccataaattcactttgcagttgaaaagctggcagaatctgtgcagaatattaatctattccttgatcttatctggtccaatctcattattaaatggttatggagatcatggtgtttaatgggtaaaatgctgggcaccatctgttgatgggctggacaccaatactgagaaacccagatatggttgtagaaattcaaaacaagattctctggtatttaggttatgccaacttgctaccatatggcagacatggtaagaatcaggaactaaatagaagcatcgtgctttgtattccagatctaagtggctgtttgtaggtgtcttttgtttgatcttctttgtaaacagcaggatcacaaagtaagctaattgtactttatttctctttgcttggcaagatgagagtcttcacataaatcaataggctgcatactgattgctgtgcaatcttgacacaaaagagttaggcaagcactttttgcagtctatcccagaaacagaaggaaggtgcattgcggtatggggtaagctattgaatcaaggagaacagacgactttaccttagtagaacaagagaatgtgttctagctccaactttctgattagcaggaattactgacagcagtgataagcaggaagtgaaatgactgtcttgatttctttcttactgaatatagcattatttaaaaggaattaccttcctttattaaaaacaaaccaatcctgataagtttcttctttcgtcttggaccctcacacttacaaaagccaatcccgttcaaaaacctttcaaatatacactactcctatggttctttcaaaagaaggaaaccttgatctcttgttgctttatagcaaggagagttttccaaataatgttatattctaattcttagggggttttttttgtttgtttaagtaaagacctactgaaaataaataaggaaagttcagaatttgtgtagaatagtcctaattagaaaactttctgatcccacaaacaggttatttatggttgttcctcctttcctgctccagagaagggctgacgtcctattcatgtggacaaacaaagagtgatgggatgggaaactggggttgatggatactccctgtgtctatcttcttcacagacttagttcaggcaaaaagcctggactccatgtctattggtaggtcacaggagacacaggactccatgtctattggtaggtaggttattttctttaatgttctataaaccagtttttcctgttttatataaaaattattctagcatagacgcagtgatcaaatctcttcactttctctgttggtatgtatcttagtctgttttgtgttgctataacataatacctgagactagataatttataaagaaaaaaagtttatttagctcatggttctacaggctgggaatttcaaggtcatggccctggcttctggggagggctttcatacagggttctaacatgaaaaagaaggtaaaaggggaagtggacatgtgcagagagaaacccaaggagcattctggctttgtaacaacccactctagagggaactaatctattctcaagagtaataatacagtcttgccagagggagaactcactaccaagagtatagtactaagccattcataagggatccatcccccatgacccaaacacctcccactagaccccacctcccaacatcctcagcacacactgaagatcaaatttcaacgtgaattttggtgaagacaaataaatgatagtagtatgtctttatctttttcaagatctctactgggttttatgtgactttaaaagactgggaaattccactggcttattggggtattttagatgtttctttatttcagttatgggcctggcccttacctcaagctaatttttaattatcattggactatttctgctttgcatctatttgctaacaaagaaaaaaatagccttctagaattttaggtgaacataatttaaagcaagacaaaggaggaggaggagaaagaaaagaagaaacaaaagaaactgctttacaattttttttcttcttggcaactaactttatgaatcagtgaaatttttcagctactgacaagtgtttttatacagccatgtattttgctgccatgtttagtttcatccaaaggtctcaaatttattaaacatacagtatgttaaatacacaacaatccccatgctcagttctcggggtacagagacaaatgaaacgcagtcttgccttcaaggaatttacaacctgttatcatctgattagtcagttgtttcaattgtgagttggtaaattgaatgaattgactccagaattttgaggtaggcatttctgtttttaaaaagtttcaggctgggcacaatgcctcccacctgtaaccctaatgcttttggaggctgagtcaggaagattgcctgagcccaggagtttgaggctacagtgagtaatgatggtgccacttactgcagcctgggcaacagagtcagaccattgtctctaaaaaaaaaaaaaaaaaaaaaaagcttcagtaaaagaagtgtgaatatcaagctctagttttatacatttctgatgtcacgttttctctccctaaaacacttccctaaacttgagcatttgctagagaaagactagagaaacatcatctttttccgattgaagtgaacagacttaagtcaaagtttctttcaaagagcctggtctgaaatggagccagacaaaatctggtttttagctccagaataatctggaactttaggataatcagtagtgcttctcaaaggtgaattagttgtcacataattacatgactgcccaagcagagaacccagctgggccatgctgggcctggacttctgacaacagaaactgtaggataatatataaatattgttgtcagcatcaaattttgtggtaatgtgttagagcagcaatagaaaattaatacactcatgataacagcattatataaaaagctgtccaaaaatgttagaatatcaatagctaagctttgaatatttgcaaagaatcaccacaaaatatttaagcctatgattctcttcttctcagagtccctttggatttattttctttcttgccatttctatagtttttttaaaactcctctgcagaagggcacatccatttgtttatggattcattcatcaaatatttattatatatcaactatgtatgtgcctggctgggcatttggaggtaaaatctgatttaggaatggtcatttcacagacatgaaagcagatcattgtatacagtttcagtgctcaaatttgaaggttattgctggacacacagggcactcaaagcagttagcaggtagcaggtaacttggtgaatttgccatggtcaggaacctggccctcagcccagtggaatcataaacctgatcatgatagctcactgcaaagggattgtctctcctaggtggacttatgtgaaccaagctcattatgactgctatatattaatacaaatccaattacagcccattgtaatacaatgagagctacatcgctaaaaccaaatggaaaggtaaaatcagtgccgtatctgactgtaggtgagtaaaattataataaccaggtgacaatctattaatttacgattaggaattaaactgtgaagttgactgttctgactagcacgttggctgtctacagataacaaactaaggagccagattatggcatcgtagtggacttaagaagtgttgctttgctaaaatagcttgatagactctgacccacagcagggatgaccttactgaggaaaatggagcatttgcccagccaagatttcctctatccttcagcaccgttggacaggcctggccaactcttgctgtaatttcccctctttgtcatacttccacacccggccacctgtttcacactatttccgtaacacagtacggtagatacaattatgttttcacttaataagtttcaattatttttttcagttcttcaaggttgctcccaagtcacgtggattagaatttggggtgttctactttttacttatatgtgataaacagtcctctgggtttgtgctcacagagaattgatcaatgggataactgcaataatagaagtgtacagagggtcctatgagaacttaggacaagaaaaaactaacatgtattgaattcctactagggaccaagtacttggcaaggattctacatgtattatcttatgtaatcctgtagtatccccatcatgtaaaaactggagattaaggaacttgcccctggttgcaaatcaagctagaggcgggaccaggatttaagcccaggccatctgagctcagagcttatgttcttaactgctgtgctctcttgcctgcctttcatctttcagtctttatacctgctcagaaggttagagaggtatatcagtctaggctcggttgcagaaaatagaaaccatcttattattttaaagagagatcaggttttaatgtaggaattggatgcttataaaatcattgaaaggcctgtggagcaggctaggtctcagtgtgctatgtctcggacctcactgtaaaactggtctgcctgaagagagctgcttctgcctgtcgagcaggagaggaatcgggatgctgccactggaactgtgcattttggcacagttttggttctctaaaagaagcttggagttgcattttggcacataccaccaccagggccctgccattcagtgcttaggatcctagttacaaaacaccacaggttattaaaaaaaaaaaaaaaatcctcccatgatttccaggagaaagagcagaaacacagcctctaacctgactttcaccttctaaatccagcttgagagtgtctgattggctgaacctaaataaaccctgcacccagctgcaagggcatctgtactgtcagatttccaagcctctgcagatcaggaaggcatgctagaaggaaagtggaatagacactgggcaccagtcccgctgtcattgaagaattcaaggctcaaaggttcagttgaagtgcttaagttcacacagtgagaaatagggctggccaggctgtcatgagattgtcatgctccaagtcctacgctcttcatgccttggggaaggaggatagacgggtggcttcaggaagagactggctcttagaagagtggactgtagtcctggggaggcaatgagtggggcagggcctgtggctgcaggcggatcctttcttctaccctgccactgaggatgtggctcctttgacagaatctctgaggaattcattcagtggcttaccttggtgaaagctgagtagtaagcttttttaccttcatagtgtagtttaaattgttaatgttgtggaaaggataggagtttttaaaattttttttaagtgtgcttttttgtatccatgttcaaatatgtaatcagtcattttcatacctttgctgctaaaaatactgcttggttctctaaaagaagcttggagtttgatgcaggtggaaggagatgctgccagatgccaatttttggagccagaaagtgcttgtgggtctcatcccctgccactttatgtgacagagagaaatctgaaggaactgctgtgctctccctgtccgatacatatccaggtgacacaggatgcccatctggtccttggcttgcttttctcactagtacatacctttggtgggatggtagttttaaaggaatataacttattctaaagaggtggccaagtaggccaacagtgtgcttggtggaaaaaataagaaaatattaaagcaaggaagtgcctaagggtacatgaaacttggagattcagatactactgctcacagtaatgaaatttaattcatttcttaaaaaatagaaatgaatgcaacactaaaggaagatggtggtttaaaaataaagattagttttgtgccagtctgactaataagcacccaactgtatgaaaatgaacaaactatttgggaatgttaatagttgagggtcattaatatttttctgcattcttagatctgctcaccagcacttagaactctccagaacaagagctgtctctattcttaaaagctttattgattgtcaacacagataaaatccagtttcacaaatgctgggactgaggaatctgagaaatcagatgtgctgcctggtggagcactggttgagagaggtggttagatgagaaatgattctgctgcaggctcctgtcctccctgcctgctgagttggaggagccagcagtggtctggggacttcaaacggtgccttttgtgtcctcattcaaggcccatccagctagagtatgcaaagaaaaggacggaatatgataaaatgtggatctaggtctaaatcttactcctggcacctgagggatcagggacctcctttgaaatccttagagattctggcccttgcatttttcttgcatctgctatttgtcctcattttgtctgctaatccatatagagaattttgagcatagttttgcagtaggagcctagtattgcaggtggtgctagattgccttgggtcagaatctggcttggccacttattatctataccactttggggaagtcactcaatttctctgttcctgagtttcctcatctgtagtatgggcatgggaatagtacctagtgtctaagattgttgtgaggatataatgaattgagtacacatagattcattctccctctctctctctctttctctcagtgttagctgttattgttaatgcagactctttatttcttcctccccacaaccatatgagttaggttttttattaagtctatttatataggaggaaactgaggctcggtgagtttaaggagttttccaagtgtgatggcgctcccaaggggctgggccagggtccagctccccaggattgcgtgactgcatggtctgtgttaaatggcatccttatctgccatgatgatcgctttgacagacttaacccttgaagacacagcctcttttctccagtcatagggaatcttcattttttctcattcagattctgccataaccccttggtgttcgagtcggaattgatctgtccatcacctcataagcccacattgttgccccatgtttgaccactgctgatgagatctgcagtaactcaccctttcctagggtgagttactgtatatttctatctaccaagaaaaatccctgttctacctagctccatcctggatcaagtcctcattctttctgcacctcttctctctagtttccgttcttatttcttccctggaaagcatctagcgctgatgacacataagcaaacgtgtcgcaagcactcatcaaatgaacattttcaggtctaattctgccatttgacaaccttttgactacgtggaaagtggctaccacattgtacattctaatttgagggaaggaatgaatgatttctttgcagagaagcagctggtacatagaaaggagcaggacaagttcattctgtctttgaagattaggcagaattataatgcctgtgctcagaaatgcctaattcagccaagtcttcttctatctcttggtaaagtgcactgccaagttagaaaggagccagctccaccacccttcctacgtctgatcctccagacacatatttgctaaagaaagagccatggtcctatccgtaatgttcaggaagggcagattggcatatcaggtgagcctggtactctgctcacctacaagtctcatgcttggtgggacacttggggccatggctgcagagctatggaactctctactccccatgtctgcatcccttttttccccaaaaaatgatttggtttctctcctttctccccagcattggctgaagtttcttaggaacttgagatcagtggttctcaaggctggctgcacagtaaaatcacctgggaaagtttaataggatcctccaggtcccagcccaccaaaaattcagcttcagtggttctccagtgggctggaacccactcaagacttttaaattttgaaaaaatattctcaggtgcttctactttgtaggtgatttggaaaccaccggtttactaactatatagtactttggccgcctttcacatctctgccttgctttctttctctgtcatatggacatgatagtagctctggcctcctagggttgttgtgaggattaacaagttaagatggataaagagcccccagaaaaatgtccagcacatagtgttggctacaataacttttactgctataattattaccgtcagcgctaagtgaagtcataggggttcaaagcaaataaggcatattccctcccccaggttcataatcctacgaggaagacaaacatgttaccgaacacagtcagcataaaacagtaagccccatagtgaaggcaggcacagaatgctgtgggtatacaaactaggggtgcagctaaatcttcagtcgagaaggaagccggcttaccagaagccggtctaacactagagcagggtcttcagtgagtttgccagacaaaagcagagtaggcagaggacattccaggtacaggaactgtctgtgcaaagtcatcttgatgtggaagagcatcagatggcagacacctggccggtagcttggcaccatctgttgttgggggaaagtgatggtcgagaagctggaaacagaccaaagccagaccttgaaggacctttgtgtctccccgaaggcatttggattttatcctctaggcatgaaaagctgctgaggtactttagaaatagagaaacattctcaaaattgcattttataaagatatcgatgaaaagagtacaccaaaagggaaaatggctggacgggggcagagctcagttcagacccttttgctgttgttgagatcagagacaatgatgacttgaactaaaggagacatagtatcaaaaggaattggcatttgattagttgcagtatgagggggcagtggcatttggagatgacttggagacttctagcctggggctgttagagtcttcgcatgctatctgtagttgagttgggaattatgggaggacaaatgggtttggagaggaagagggtgaattgagtgttgagcatgttgagtttaagaactgtaggatatccaagcagaggatgcttaaatagaagtgttcattaggcaactggggaggacagaaagagattgcagtggcccctgggcctttctggtattcccagtgaatcttcctgtattctggacctcagttaaaacattatcttccagtcagctttacaagctaaaaactgaagttgtcttcaaagacttctttgaaccaccttctgacactaatgtactccggcagtgtccagcaactgattctcctggtctgggaagcatgggcaactgcagttcctctgaccttggcttgagttcctggagggtctagcaggcatgtgctttgctctccaacttggtatattcctctggacttgatcacaacgggtgatcccaggtgggagaatttggtttatggtccctttagcagaatgcactgcagtgtgacatttactttacactgttaaagaaaaatgttagcaagtcccagttgtgagcatatggactagctgctgctgcatgaccccaaaccccactgagtcccactaattcgagttgccagataaaatatgagatgctaggtaagtttcgtttttcattatacaaggagtcattttttagcgtaagtttatcccatgcaatatttgggacatactaaaaatgattcattgtttatctgcaatgcaaatttagctgagcatcttgaatttttatttgctaaatatggctacccctaaatttaatctacgttgaacatttcttataatgcctagaatctcttctagtaagaaataagcagtcccttttgtctttagcacaggaagagaccagctaaactcatttcttggatgatgtggctgagctctggttctcccttatcccacaggcaataaactcagttttgtcttgttttctttttaatctctggtggtctttgttttatcctttgaacatacacacaaatacctttttaaaaaatggacatccaaccaaatataaaaatatggtcaaaaaagattctggttggtttaatagtattctaacaggaagacaagccaaaataaatgaaatgtatgctgttcttttatctcattttaaaagaattgaatgcctgtgttttgctgaggattcaagagatatggattgtgtatctttttgttgtctattttaacctttctcacctaagcaacctgagctgagagcaaaaaagagaggtaacttgggtcggtatctagaatgcccaaagcaattttgctgattcatgagaacctcaggggcttatgatggcatctggaaataactctggaagctggttgtgctgatcaaatgtgtcttatcctgtacttcaaggtctctagagagaaggaacttacacaatctggtacagcaacctgttccagataggaggaggctcttgttgtttctaatttaacacaaaccaacttcctcctgagctgtctccatttgaaacaaagaagggttgcttatcaccctcctctgtggctgaactgtactttgtgattcatccttccttccgtttctaggaatgctttatcacttctggtgaggccagtgctatcaggaagccaggaggatgtctttagctgtgttgttaaaaccaaccaaccaacaaacaaacaaacaaacaaaaaaatcaaaaaagggacaataaaaacatctgggcctaggctgcctagatgaagggactgaccaatattgctggaaatttattatcaggttaaaccacaacgatcataattttaacattaacccacctaagattgtgcaggcattcattctgcacaatcttactgcccagctgtgactcacagatctttcattaaacgtgctcacaatggtgactcaacaatttcttccaccacttaccccactacatcaatggaggccagtctaaaacttcttgtgttatacttttcagagggaagggattaatgttttgtcatcttgttgagtataaagaaacaagtctcatggtaaagaggaaaatgtgcctgctggcttgcatgagtgcaatgggaattttttcttgtattaataggagtactcaggcaactgaaatcacagatctgctctcctgcatagtatctttatatctgcttcagctgagctgagtgtgagcccctgcccagaacaaatggctttggatatttgcttttggtaaataattcaataaataacctgggaacacacatgatattcactattgcatatctctttagtgaacttacgaattttgcagaaccagcaaataggaaaatctgtataggctaagagtcaagaggcaactgagtgtcagcccttagcacacactcaggagcaggactgcttgcatagagcatcttgccatgatagtatttgctaactttgtgatctctggcagtttattaacctctttgtgcctcagtttcctcatatataaaatgaaaataatcaaaacacctcactgatatgtgtgggtgaaatggattgacccagagcagctccagtcacttcctgtcacatggttagccttcgtgtgtgtggtgtgtgtatgtacatgtctgtgccatcacaagtgtgttcaagcagtctatggtgacacatttgcatttgatctgtcctgtgtcacatggagcaggtagaaatatatgagttagagaagacactcatagtaaaagttaatttccaggtaagacaagaagaatttcctttggctaatctcttgaaaggcaaagtgatatgtcagataataatatgtatatgactaacttctattaaatgctgattacatgctagccactgtgctgagcactttatcagtattagttagtcctcttctatgtaggattattatccctcttttacagatgaagagattgaggcctaaagagattaagtatatgtataaggacttgcataatgtaacacagcaaaaacaagcaaattgtgtgtgtattttatgaaacctattatagaaatgttttaaacacgtacacatacctgtatatgtatataatgggagagagagaaagtataggcataaaaagtacatgggaatgatagatatcaaactcaggatggtgaggaaagggagagagagaagtggaatgaagagggaacacagagggcttgacatgtatctggagtattttacttctttcaagtaagtgtgaatattaaaaatattaaaatttgaataaatcaggtagtagattgattgttggttattatatcattctgtatgccattttgagtgtttaaaatattttgtaattttaaaaagaggttatactctaatgatttggagagtaccagcatagtactggcccacagtagacactcaacaactgggattgttcttgttagttggcttttttcctttgtattgctctgaaataaaattgttgatttcattgttggaattacattctgaaatacagatctagcaggttagggactcctataagaacccccaaaaggaactcaaaacacttttgcaaaggttcttgctagctgtctcataaatcaacaagataagtgtgactaaaaataagcaccaaataaatgttatttgtcagaaatagcacttagtttggcctgcccatgaattttctttagactttttgaccttagctttttaaagggagataaacaagtgaggacagaaatactggatttcagagtaatgccagaatcagggaaaaataattctctggatcaataataataattaaaagcttcccattgtatgcccttgggtatattttatatttttcctattatagaagtatcaattttattgacaccctagactattatgataatggagttttttattgaattcaattacagttagtcaccatgagactccacatgctatctgcactaggagttgcctcaggcacccctaagagcatagagatattgaatattttcataagggattagcaatttttcctgtatgtcatggctataataaaagtcagcaatgctgatttcatttcacttagattttgcatctgcttttggagttacgtagagctctgatgaacaaaagataaataaaataattatttaaatttcttatttatggtcccatcggaaagttgtcgtaggcactgagaacaagagagccgcttacctcctgacagtgttgtgtcctgtaattgaaagaggattgcatctgcactcacatgcacttgtgcatttaaaaaaaaaaagagagaaaaaaaaacagattggaggagggaaatgcatgatgtcagtggtagaattctggatgattttttactttcttctgtagtcttttctgtattttccagcatttcttcaactaatgtattagactcttacaagtagaaaaaaatagtatttctaaaacacagaaagaaagggctatgatatgtcaggaaactagattgatattaactctgacactttcctaactatgattttaagaaagtcacttaatctcttattgctgcttttacatttacatatgatggttagatgggcataataaacttttttgacttgctttgcctattgtgtaaagttcttatttataggagttaggtaataaaatatgaaaaaacatttaataaaaagtgttatatcaatgcaggtctttcccagcatgtagaaaaggaattgaagctgtggggcaaaattcagagggatagattaattgctctctggcaacaggtacactcacaggtaggtatattttaaggcagtggttctgaaacttgcagccatcacaatcgccttggatgcttatcaacgcatagattgctgaatctacccccagagtttctgatttattaggtcttggaagaggcatgaaattctgcagttctagcaggtcccccagacaatgctgatattacttctcttggaatcactccttgaaactattgttttaaggatgtatggagatatgtacatacacacaagtattccagagtattcagtggtgtgttagtctatttgcattgcatgaaggaatacccgaggctgggtaatttacaaagaaaagaggtttaattggctcatggttctgcaagctgtacaagaagtatggcacagtcatctgcttctgggaagggcctcaggaatctttcaaccatggcagaaggctaagggagcaggtgcatcagagcaagaggggtggagcaggtgccacaatcttaaatgaccagatctcacatgaactcagtgcaagaactcactcaataccaaagggatggcactaagccattcataagagatctgtccctgtgatccagcacctcccactaggatcccctccaacatgctaggtcacatttcaacaggagatttggatgacaaatgtccagaccatatcaactagttagaaacttcctagtgaccttcaagaatacactttcagaagagtgggaaacatattgaagttggataaggagagaaccgtggatgtggaaaagaagccaatagttacaggcttagatgtttgggaagtttatgagtgaagtaacaaggtatttgaatgggaagcagagtaaaatgaatgtttagatggataggtgaaacttatagttggggctaatgaagtatttgtttcatccacagtgaaacaagccacagtgttcaattttttaaattgtagtcaacatttaaaacttaccagatttcatatgtaaatccagattcccatctacttttggaaaatcatacaacttggggtcttcctttccatgtgacaacatcagttggagccaagtagcggctgtcccctttccttggggcatatgctttgggttaaacaacccctgtctggtccttcccttctttgatgactcaccagtcctctacgagcataggagtctgcaaccataaaatctaacaaggtaaacatacaaactcccagtgtgaggatagagaagaactgaagatgctggagtgttgtgatcataacatgagcaaggaccagaaagaggaagaaggagatgggatcaagcacacagtgcgagaggtggcttgaagaagaaatgggaacatccatccctagatatggtgagggagaaaatagaaaacatagaagtcaaggaagcagtattttgaattaaagatgatgatctttatcctctcagtaatatggacaagaccctcttctgaacctaagagaggagggcataggtcctagggaaaataagagaaagtttggtgtcattgatgtattgtaacatcacagagcagctctgccagcccatatgaggtgaggtatactgtggggggtcccctctaacaatgttgtgcagcgtgagtggttgcggtgatgatcaggactgggttttggtctcttaagggcacaaagctatttttcattttaagccactaagcaatcaaataaacataaccccacagtttatacatgggctaataaagtgagaaagtatcctccttacctgcacccccaccaaaaccaggtacccgtccatttatactgttgatccatccttctgtagagtatctatagtgccaagaattgcgtctaaatgtccatgctttttgaattgggagaggcagtagtgtgcctcaggataaacagaaccctaggacctgagcttaattttattggtagatattttaaaggagggcagcagttaaataatttacttagcaagtaattcagaatattttatgttatgtgaacaagaacatattatagaatgcaaaatctttctctctttttgaatataacaccagcttcaaataaattgtactgcgcagtaactgctctgggctacactcctctgcccagccccgacagcacacccattctgtcccctaacctaggtcaatagcaaagtttcagaaatgccactgaaagaacattcattcttcaaatttaagcttatagtacggtaaattatctttgctttaagaattgcagaaaattggtgctagctgtatttcaaatactgtttccttaaaaagcagctaattaaaattctctataatttataaggtggattacacatcagtgtatgatcaagttcactatgaatagaagtgataaactgactaaccctatgacataacctcagctgtagttgtccaactcagccgtaactactttcttagctcagtcttctaatgctgatgtgatgcagacagtggaaccaatttttactttttaatttttacaagctgttgtcttgtaagatagttgttaagcacacaattcctccatttttcaaaataacagttttttcagacttagggaaatatcagagacacttaaattttcctaagcccgtcatcgaaacagtaacataaggatcctctacttttaattggaaattcccatttccctctgggatctctatctgctggtaaatagtctccattgtttccctccaaacaaaacaagatggttccatgaagcattcagccattccaaaggtagtgacagtttctcaacattagaggtatgtttgtggcccattagagtccagttgatccagatgtcctgtgagagacattcctgaggacaggtgtatgtatgtggaggtaggggatagttcattgatttctttcacaggttgctttttagttggccttgttcctgaagaaggcatgttctaatgctaactagagaaccttcatgaaaggagggccaggccctgaatcagaagaccagggtctaatccctcttttgccacttattatacacttaaactaaggaaaggttccaaccttcctatacttaaaaaaaaatttaagaacaggtatgggggattcattgaatgtgaacctcatgatctcaggaaaatttaaacataggcttttctctcctgaagttcctaacttagggcattatctatcagtttaagaagataatttctgtatctactattgagggtcttatttctggtcttcacaccttctgaaaggatgggcaactgagaacagactgctaatatgaaatagtctaatccagatgaattcattgtcatttactgtattatttccttaggataatacctgtccatctttccacagcacattttgcctaaattcttaacagggtgctctttgtttgtggcagtatttattcatgtaaaatgcagctttcctctcatctgcttttcaattaagcagctaccttgtggctttcatatgcttatgacatcaacacttttatggcaattgcttctgagatagaatttggctttttggcctctgaatttcaaatattgctgtatcagtttcattcacaatggagagctttaaaagaaatagtgtgaacctgtgagagatgtgtggcttatgctcagatatactttgtcaaaaattgtcccattgcatactatactaactacattattattaaagcaaaactcaattatttaattttcaatagtcatattttaaaatataaattgagatagctgaattttcaaataattgaaattgctgttctgcttacatggggtggggataagaagcaaaagctgttgattttttacacaaatgtatgctcaataagagaaaataatcaacaaattgtatgtcatcacacaggcagcaaggacagagtatataactcttggaggttgtgtcagtcaagacccattctggaggcagaactcacatcttcaacagagcatgcttaacatgaattgttaactaggtagaaagttgttaattatctaaagtgtaaaacaactttcaggtcccagggaggtagaattgcaggaagcagctgccactcctaggcctggagggtcaaagagaaaaggctagaattattaaaacatggaaacttgaggagggagctgctcagctggtacttggagcagagagtgttgaggctgttatgtgagtgttggaaaaactgcgccattgaattcacctgctgtgaagagaaggcaatgcaacctctgggacgaatcccaaaaaatcaggaaacaggaagtgcacaggaagtaaaaaggaagaagcaaacctcttccttctttttcctacaggcttcccacttccctctagctcccctttttggcagaaccggaaagccaactggcaaatcaggagcgtggtttgcaaaatatcctctcaagtgtcacaaagcctgaaaatacaagagtgggtttggagtcaagaggcaagagcggaatcaatagcacacaatttttcaggcaagattagctgatggcagcagcagaaaccaaacctttaagtgcccaggaagggtgagacagcattctaggtgccaggaaggacatacagaggatagcaacatcttaatgcttgccctcaaatgacattccatttccacagtgtatgtttaccttcagataaagccaataaaactgtgattcaatggttcagtgagagaggccagtaaaaaccatgatgaggctgttgtgggtctctgtgaatagttttctctctctctttttttttttttggtcctttttataatggaaaatttcaaatatacacaaaatggaaagaatagtgaaacaaacacccaggtatccgtaacccagcaataacaattgtaagcatttggccactccatgttttctttagcccccatacctcctccctatcctcccagcttcccattgagttatatataatttcattcataaataattccagatgtttagttacagctcaatgaattttcacaaagtaacatgttcatgtaaaccccacctggattgggaaatagaaattacagacacccagagccccctctgtagtactctcttagttctttcctcactgcttcccaaaggagtagccactgtcacctattgtgaactttgcatatgtggattcatagaatatgtgcattttggggtttgacttcatttatctaacgttgttggtaagatttattcatgttgttgcatatagccatagttttatttttattgctctatagtatttcattgtaagaatacactacaatttattcatccattctaccattgatgtacaattggcttatttccagctcttgactattacaaataatgctactatgaacattgttatacatgtcttttggtacacacttgtatgcatttctgttgggtacataccatgaatggaattgctgggtcttaggatacgtatatattcaactttattaaatactgcctaagaatttttcaaagtggttgtactattttaccttcaccagttctaattgctctatatccttgccatcacttggcattgtctgtatttttcattttgaccggtctggtcagcgtgtcatggtaccccattgtcactttgagttgcctgcccttgatgagcacattttctgatgcttaattggctctttgaatatattctgtaattgatttgtaggagttctttatatattctggatatagatattatattggacataaacactgcagatatcttctcccagtctaacttgccttttctttctcttaatggtgactttgttaatataaagttcttagttttaacgtagtccaatttatcagactttttctgtatagttaatgcttatttagtcttgtttaagaaatttttgtctaccccaatgtcataaagatattcacctgtgttatagaagcttttttaaaattattaaccttttacatttagctttataatccacctacaattgacctttgtttatgacgtaagataggggtgaaattcttttcttcccgcatatcaatatccaagtgatctactatttattgaaaagattattatttcctcactgcactgcagtttcacctttgtcataaatcaggtgatggtataagtatgagtttgtttctggtttctctgtttgtatgtccttctgctaataccatcttattttaattgtaataaagattgagatatctgatggtatacattactgagttctgttcttcttcagaactttcttgattctttttggccttttaaattttcaaataaattttaaattagcttgtcaactttcaaattacctgatagaattttgagtagaattgcattcaactataatttaatgagtagaaatgacttatttacaatatagaatctctgttcataagcattttgtatatttccattgatttagacttctttgttttctgtaaataatgtagttttttgtagcagtcatgcacatttttgattagatttattcctagataaatgattttttggggagggaacagagtctcactctgtcaccccggatggagtgcagtggcacgatctcggctcactgcaacctccaccttcttggttcaagtgattcttctgcctcagcctcatgagtagctgggactaccggtgcgcaccaccatgcctggctaatttttgtattattagtagaggtgggatttcaccatattggccaggctggtctggaactcctgacctcttgatctgcccgcctcagcctcccaaagtgctgggatcacaggcatgagccaccacgcctggctagatatatgatttttatgttattttaaataaaatattttttaattttttcatcttctgtttttggcttgtatatggaaatataattgatttactgagaatttgtttgtaatagccaagagttggaaacaacctaattgtacatcaatggtagaatgaataaataaattgtagtatattcacatgatgaaattctatagaatttagttattaattcaaatagtttatttgaaaataataatgatacttttctatatatacagccatattttctgaatattatgacagctttatttctgcctttctaatcctttcatttctttttcttttttgctttattgttttggttaaaactgataccacttttagaccaacatatcacaaatccacccactgaccacaatacatttattaaagaatgcatgcgttctctctctctcgggatctgttaccctaaatgtccacttttaccctaacatcatccagcccccactccagaaaaacatttctccatatctcttgccctacagttttgaaacaaaatgtaacaacatccagatgccatgaaagtttataagttgtgcttatgttgatagtggggacaaacactgcttttccatgaaagaagactgtagtgacagaagcactaaggtaaaagacaaattaacttgacaaatttatcctcctagatagcatgactacatagattccttgcataatgaagtatagtattgactcccagtaggtctgagctttttttcctcactcatcttgcattctgatttttaattttgaagatcagcaagttattcgtaaattagcaacattttttgagtaattgtgtatgccatctgagcaatattttgcagtatgaaacaatttatgttattcttaaattttcatatatttacttccagacctaacatttgtgaagcttcatggtgattcttttcattggcatatagaaggacattccatgttagaactgaaaaagtttcatttttataaaaatatttaataaaattcattaaattttttaaaaccaaattttaaatgtcatattttcttaatattgatttaaaattttgaaactcagtaatttatttgcatcttgcctttaattttaacgtataatgttgaatattttagaaaaacagcatttttaaacctgaaaaaataattttttgatattctagatgtttcttattttttataaaaatatatcaaaatgtatacaccttgaatgcaattgcattttattttttaaccttttaaatcattactgttagtagtgtaccgattatatggatatcttattgtaacgagataaatttgctaaaataaaggcatgggaaatactttgtaaaataaatatgtaatagtggtgggttattcatgcctttgttttatgacaccatcattcacacatggccatcaacagaacacccatgcatgtttcataataattaaatataataatctttgacattttgctaattttcagtcatatataaacaataatcataattttattttgttaccatgaagatatatttgtcaaggaaggagaagaaaatatattttgacagttttcttagcttcttaaatttattaaattaacacattcagatatgtagaatgtggacctctatctgtcttcatgcccctgtccccgcaaatgggcctagatgtgtctggcaaagttcttagtgcagtgctgcaaagaggaaaaggtagcagatgtccttgtccatcatgttcttcaaatattatttgttcaatactgatttcttttgcttgctctatcaattcctggcagaagtgtattaaaatttcccactatatttgcagatttgtctgtttcccatttagttcagttaatttttgctttgtcttttttgaagctatgttattagacattataaattgagaattattacatcatcatgatgggttaactcttgcatggtataagattatttcttttaagacagggtcttactctttcacccaggctgaagtacagtggcatgatcatagcttactataattttaaactcctggtctcaagggatcctcctgcctcagcctgctgagtagctaagattacaggtgcacacgaccacacttggctagttttatttttatttttacttttatttttagagacgagggtctcactatgttgcccaggctagtcttgaactcctggcctcaagtgatctccccacttcagcctctcaaagtgctggcattacaggcatgatgcatcatgcctggcctggtcttgatttctagaaattcttatggctttaaagtctactttgtctaatttcagtattgctaaaccagacttcttttggttaatgtttatctagaattttctatccttgcaacattttcaagctcttatattcaaaatgtatctcttgtaagctgcaggtgattgggtactgattgcactgttttgtttataatcagttaattagatttaatcaatttgcatttgatgtaattttgggtatatttggggtttaaatccatcatctgttttctcttactgagactatattatttttctctcctttttttgctactctttggattaatcaagtattattattatattttgtttcccatccctattttattattccgttattaaaattgtagagaacatataatgcatgcttaacttacaaaagcccaatataaatgagtacttttaccattttccagacagcatgtactaagaatctcagaatattttaatttcacttaaatctctcccactgtttgcgttactgttatcacatattttaattctttttttttatactttaagttttggggtacatgtgcacaacgtacaggtttgttacatatgtatacatgtgccatgttgttgtgctgcactcattaactcgtcatttacattaggtatatctcctaatgctatcctcccccttccccccaccccacaacaggccctagtgtgtgatgttccccttcctgtgtccatgtgttctcattgttcaattcccacctatgaatgagaacatgcggtgtttggttttttgtccttgcgatagtttgctgagaatgatggtttccagcttcatccatgtccctacaaaggacatgaactcatcattttttatggctgcatagtattccatggtgtatatgtgccacattttcttaatctagtcttatcattgttggacatttgggttggttccaagtctttgctgtcgtgaatagtgccgcaataaacatacatgtgcatgtgtctttacagcagcatgatttataatcctttgggtatatacccagtaatgggatggctgggtcaaatggtatttctagttctagatccctgaggaatcgccacactgacttccacaatggttgaactagtttacagtcccaccaacagtgtgaaagtgttcctatttctccacgtcctctccagcacctgttgtttcctgactttttaatgattgccattctaactggtgtgagatggtatctcgttgtggttttgatttgcatttctctgatggccagtgatgatgagtgtcttttcatgtgtcttttggctgcataaatgtcttcttttgagaagtgtctgttcatatactttgcccacttgttgatggggttttttttttcctgtaaatttgtttgagttctttgtagattctggatatcagcccattgtcagatggatagattgcaaaaattttctcccattctgtaggttgcctgttcactctgatggtggtttcttttgctgtgcagaagctctttagtttaattagatcccatttgtcaattttggcttttgttgccattgcttttggtgttttagacatgaagtccttgcccatgcctatgtcctgaatggtattgcctaggttttcttctagggtttttatggttttaggtctaacatttaagtctttaatccatctagaattaatttttgtataaggtgtaaggaagggatccagtttcagctttctacatatggctagaaaacccatcatctcagcccaaaatctccttaagctgataggcaacttcagcaaagtctcgggatacaaaatcaatgtgcaaaaatcacaagcattcttatacaccaataacagacaaacagccaaatcatgagtgaactcccattcacaattcttcaaagagaataaaatacctaggaatccagcttacaagggatgtgaaggacctcttcaaggagaactacaaaccactgctcaacgaagtaaaagagggtacaaacaaagggaagaacattccatgctcatggataggaagaatcaatattgtgaaaatggccatactgcccaaggtaatttatagattcaatgccatccccatcaagctaccaatgcctttcttcacagaattggaaaaaactactttaaagttcatatggaaccaaaaaagagcccgcattgccaagtcaatccgaagccaaaagaacaaagctggaggcatcacgctacctgacttcaaactatactacaaggctacagtaaccaaaacagcatggtactggtaccaaaacagagatatagaccaatggaacagaacagagccatcagaaataatgccacatatctacaactatctgatctttgacaaacctgacaaaaacaagcaatggggaaaggattccctatttaataaatggtgctgggaaaactggctacacatattttaattctaactacatccctgcatgtagttaagaacatccctaaactgttctatttagtctctgcttaaatgttacttcctcagagagacttgcctctatcatcataattaaagtaacctcaccccacccctttcttttccattcccttattctgttttgtttttcttcctggacttattacctgaaataagagtatttatttgtttttgcccatctgtagcattagaatataagcttcaaaagtacgggagttttctaccttgttcacaaaggtttggcccagagaaggcactcaataaatatatgttaaaccacaaacgtaggtcagaggtgcccaacagagacaaccattgagtcttaagaatgagaaaatcaggggtccagaggacattggagaacttctgcaaaccacaagtaagattatttttataacaagaaaacttggaagagataccaggatcactccagaaataactaagtgggcagatttcctctattcatgatttttcattcattcaatgcttcctgaacacctgtgcaaatcctgggtgctgagcgaggtgtgagtgctgtgctagtcttcatgctgggtgcagcaagctgcgttctctgtaggcttccttcacagattgtcattggaaatcagacctgttttcacttaaaggtgtgaggaggcaatgggctggatgactgaaggggatattgtaagagaacggaaagaagatcatcttgctggtgaggcattctgggctgaagaaaatcaagagctttgattctgatacccttaggtcagtaatgttctgacaatatccaaatgatgtgaaatgcattcacaaataacaggtataccgaattgttccaagaaaattctaaatccagagcctctgaatttatagtgccctgttctccccatcattgagactcaggcaccaaagggcagtagttctggaaacttggaccaagataccatccagaaggtagctcacatgcccagcgtgtttaaaaaaaaaaaaaagagtcacatcttaagacttctaaaatgtgtcatccttatgtgacttcatagtatcattttcttctctgtagcaattgggcctgaaatggtctaagggatacctccctctagctattactcatttatgaaacaataaaacaaaaaggccacaggttaattcctaggttttactcgcagaatggcaattgaaaaatctggatttttttttacactggggctgcattattttcacattttcaattctcagccttttctccagcctgacaggcagatgggagggcagctggccctgcaatcaaaagtgaccctggcagccagtgtctctgtttcatggtctgccctgagacaggcaggcctgggttctgcatttgaaatgtgattggcaaagtggctgcagagggagaaccagcacagacacgggggagaggtagctctcagattgcgacgttaggattatatactaatgtatgactgacattgccaaagcctcattaagacattgcatatgttccttagcttgattgaatctttctacaatttatgcatagatcacaacatcacactgtgccccgtaaatatacacaattatttgtcaatcaaaaagaaattaattaatttaaaaaaataagaaaggctgccagccctgatggagttgcatgggttggggttctcatgctctttaatagccagtattgctagtattttttcaagaggtggtctcaggccactatgacattccaagctacaagtcagagttttctctgaaagctaatcagactgtggaaattaatcccacaacctctgcctcttcaatgccagccaggggggctaaaccacttggaaagttttggcagcagacataatgtgcccactaggggtcaggggctgggctgaccatagctggacaaatatttgcacctgcccttttgcagttctgtctaaaagttcaccaggaagagttttttttttaacaaaacaaggagttctttaaggtcttatattggacatccataaaaaacacagcaataggtatcatttttgagcacctgccatgtgccaacccaatctcagtgcttctcctccatgttttcaaatcctcacaaccctggtagatattgtcatactcatttcacagacaaaagagataatatttgctcaagtggttggacaaactggctcacaatgtataggttacgctgccaggcaaagtgagaacacagttccagtatgtgtgaggtcctgctaacaggttgctgtgcaaagaaaagtgtgggcagcctgcagtcaccatttatttggtgtcaaccctgtacttggtattatatttgatgttttacctatgctacatgtattagtcagcttgggctgctataagaaaataccacagactgggtggcttaaacggcagaaatctatgtctcacagtactggaggctggaagtccaagatcaaggtatccactgatttggtttcttctagctcatagatgttcaacttcttgctgttttcttgtatagcctgtgtgcatgtgcacacatgcacacacacacacacacacacacacacggagagagagagagagagaaacaagtgttcttaagtgtctctttttatagggacacaaatattagatcaaagccccacccttatgattgtatttaacttaaattacttctttatactatcttcaaatacagttacattgggggttagagcttcaacatttgaatgtgggtggggttggtacacaaacattcagtccatagcattatgtataatcctcacaagaaatgtattttacagatggagaaactgaagctcagagaagataagttatactagtagtttatgacagagacaggattcaaacataaatcataattctaaaattcatattttttccaccagctagaccaccttctaaagtttatttggggcttgatatcgagacaatatataaatgagaagaattgctaaacttgatttatcagctgccttatgttgtatactagtttgttttatgctggcttattttgaaagatgaactcaagacaaatcaattatcacttagcatttgaacaaatggactatgaagcaaaatgaactgaaaagtgtgacagttttaagtaggtcaggtgcttgaaagatgaatatctttttttccattgtcaaaaaattttattatcaaaggtaaaaaaaaaaacctaagagttataggatttaagtgtagaaaggagtaggagtgatgatttaaacactattaaatgtgactttaaatgtagtcatttatgcttagaaaatatatgcatcgaaaaatattttaagcatgtttaaatttttaatgcaaaagtaatatattcatattttagcaattcaggcaataaagggatgaaaaccattgtcaatatacatatgtgtgtattctaagcaataaaacaatgactcttaaactagatataaaattctacaactagctttttaaatttaatatataagttagatatgttttcatgttgctatgtataaacttacctcattttgtgaaataatggcctagcattcttaaggttgtgaagtcatttaactgttcgcctactggtgggcaatttaggttgttttctataatcacaaaaatataacattgaacatctttgtaattctacctctgtatacatggacagataaatatatacgttaaataattatcatatatttatgtaattatttatcctacaaatataactatgtaatttatctgtaggataaatgcaattactgtgtcaaaagcctgcacattactgatcttgatacatattgccaagttaccttcaagataaattttcacattcaaatattttccaaagactcattctacattaaaggcaatgaaatattgtcatggttctcactgcattctgtaccttctctttggtgacacttgttcagaggcctgaaggaagtgagggagacacctgtgctgctgtgggtaccctgcagccttgggtaaagtgacctggcattcattcatttaaatggcagtacttttctatttttttttaattttacgttttcaattgacaaatgataatggtacatattcatagggtacctagtgatgtttagatccatataataatgtatagtaatcagatcagggtaattaacatatccatcatctcaaacatgtattatttttttgtgttggtaatgtctaatatccttcttctagctacttgaaactatctaacatatttttaactataggcattctatagttgagatagagcactagaacttattccaggtctctagctctaattttatatcctttaataaatctctctctagccctcccttcctccttccctatccagcctcttgtatcctcttttcttctttttacttctatgagatcaccccctttttttcttagcttctacatatgcgtgagaacatgtgctgtttaactttctgctcctggcttatttcacttatcctcaagttccatccacattgctgtggatgacaggattccattctttttatggctgaatagtattccattttgtatgtacaacacattttctttatccattcacctgttattggacacctaggtttagtgcatatcttcattgttgtgaatagtgctgcaataaatatggagtgcagatatctcttcaatacacttctttcctttcttttggataaatgcccaatagtgggattgctggatcatacagtggtcctatttgtagtttttggaggaacctccatactattttccatagcggccgtactggttaacattcctactaacagtgtataagagtcactaccagcatttgttattttttgtctttttgataatagccatcctaactggggtgaaatgatacttccttgtggttttgatctgcgtttccctgatcagtgatgtggagcattttttcatatatttgctggccattagtatatcttattttgagaaatgtctattcagttcctcttattcttattcatgcaccagacatttactatttactatgtggaaggtgaaacgatgggcattaagattgttctaaagatgagtaagtcaaatatggcctacctcaggctcctgtgcttcacttttcttttcatggcaggcaattattttagcttttaatttgcatacagtaaattttctccttttggtgtgctgcttggctttttagtctcagcctcaatgcaaacaaataaaaatgacaattttttgatattgaatatgccctctctcatcagtaaataaaaccttctagcctagagttatttgagtctctggctatacaaaaattgaggagccttccaataactggagctttttaaaacaccagtctgaacaattaaacttgtttttggatgtaaaatgttggtgacagctgtcattttttttgaagcagttatgtggtctttgaaaattatacatgcctgttctgagcttctctccccaccagagttgagacccttctataatcactacaggtgtgacaggttaagattttttcattatagcaaagcagaaagaataaaagagttttaatgaaaggtgtagtctcctgagctgaaactgcattaccgacctgaagccctggaaaatgctaatactcggtatattaaaagaacagccagcttagtccccttaatgcccatttgcctgaatttatgagatatcattcctttcagcttggcatttgtgaagttatccagctgggagtgagtcaagtttttttttttttttctgtcactaattcattaaaaatgccagtcatacgaagcaactcaagtgagaccatctgcctttctgaaaaccttaaatacccaagagatagaggaactgtacgccttggtcctggagtggaactgctgctcttagaaagggcacagccttgggtaaaggccagttgtgccatggataatgtgtctgactacggatcagaaaggtcatggcctccacagccgacacacctaatcccactcccagtccccacttccttacctggcaagcagtggaagcctgtgagcctcagccatttcacttgaaaagggctgataacactgacctcccagagctgtttaggtcctcagggttaacctgctttctttcactttaatgaacttttagggatataccacaaagactggaagtagcccctttcccctctgagaaagagatagaaatgatctcgatttgtagtttctgattttcaaaagtaaataaccatgtttttaaataaatgtaaaactgatcagacctttgctgagagggatgtaaggtaaattactataggatattttttcagagtcttcttttccacacttaagataaattaattttaaaaagttctttcttctggaaaaggatttatagcaaaattacttgaatgcctaaaaaataattggagaaagagtggaagatgtcatattcattcatccaacaaacaggtacgagtgtctgccacatgctagtcattgttctaagtgtctgagctcctgcagggaacaaaactggccaaaatccctgcctgcttggagcttcccttcttgtaggggagggaagacagtacaaaataaataactaaatgatgtagtgtgtaggagagtgcaaaatgctatggggaaaaatgagttagggaagatagtggggagaattaaaactctaatgcaaaatgatcaccggcttaatgtgatgtaagttatttaaggccacttttcaaaaatttggattatatctaaaatattctttttttgtttcatgggtgatgatcaaaatatcactgtatacagatccccctcttctttggttttatccacataaaaatgtctaatatgtatgtcaacttaaactgaggccatagcattaaatgccagcagatttgcttgataggaagaacctaggaatggtagagcccacagacacagaactgctttcttttctttcctgataaataaggtgatacaatctttgcttctttaatcatgacgaagtttcagcccaaatgttgtaggtgcttgaaggaaatgggaacaagcaataaatctgggattgacttcacagaggtctctgacagtatgatgatctaacatgtactacctagggataaataaaataccatctttctgacatgaaggaaaaaacaaaatgtacccaggagcattcattagaactttaaagccagcctaaaatcctccgttggtgtaaaagaaaagaaaggctgtgtatatcacgttgaatatgccttgggatagatcaattctacagggtgcaaaaatattctatagaacagttggtaaactgcaaatgaatttagctatgttaaccatatgtgaataatgccatcctgtaatgattttaagtgagtcatatgcatgacaagtagaggatatttagtgccaaataattgtattagccaacaggaatttgataatcattatgaagagagcaaaatcacattttatactctgttcagtttggagaaggttgctgaggtctccaggagccaatcacaaccttctcttctgttccttttcctgttgtgcagggagtgctgtgctttctgattgctctttggaaccacactgcaattttatttgctttcttattaaaataaaacaagatgaacaaacaaaatcaacataaatgagaataacacaagcttatacacattcgcacacacgaaaatatagaactagagtttatagaacctgattttgtcttttacttttaccttttggttgcatatactcttgaagttatattcctttccaggcaattagaatgttattactgcagcaagaagactacctattgagagaaagtataatcctacgcaatgttctgtgtgaaatgtttgtgcgcaaagaggtgactccagggagactggtttttgaggaactataaagctgcaggcagaaatcttgatcagggctcataggccttgactccgctttcattcttcagtgaggatgtggcctcgctagagctgagtttgcttcaggaatcaggaggtcacagtgtttataaatattccttgttaataagaagcctgtatactgaaagcatactttttttccccaatgctctatacgtctggatataaaaggaccagggcagagcaggaattgggtttttctttcaagtctgacataactgtaccccagaggggaatatgggcagcagctgtgtatcctgggagtaaggaaaaagctgttctaagatatgctacattgagtgctgatctgtgggtccatattacttccattcagtgttgtgtctttagaaacattgaggagagcatgtaaactattctcaccaaattctcactcatgaaaaattgcagtcatggtggcctttatatgtatttttaatgctgcaatctttattcatataccgtctcattatattcttgcacatatttcctttaaaaagtggcaaaaataaatgtgcacataaaataaaatgctgtaaaaaaatgctgtgctgtatataacgaagccctaggaaaatagcttattatgaagacagtttacctccaactctgaaagtttttatcaaaacattcaacagagtttgtatgcatgtcatcctaagccaagatagaataaaaataaaatgttgagccaaattcttacctaaactacttacttattctggaggaggcacatttggattggcattcactcttttagctactgagaaaacaactgattgagttatatgtaattataacgtgcaatataaaattaaccacttaccagatgtacagtgtgcaggatataatcagggtttctcagcccgagcaccatttctttgttgtggggggaattacctgagcactgtggatctttagcggtatctctggtctccaccttctagatgctggtagcacacgcactctccagttgggacaatcaaatatgtcccaagacattgaaaaatgcctctaggggtacaaaattaccccactggcatgtacagtactgaataaatataactacagtataagacagaggttttggatggtgcagaccagcgctggaaaggttttgaagcacgtgagctcctctggcaaggagtgttggggaggctacaaggaagaggtgagatttgactggcgcttgaggttgtgtaggattttggatttaactgtagtttgcttattagtctccctttaatggtatctaatctaactggtgtttgtgtttgaaatacgccttattggtttcaaagaggtttgaatttctaaatatgtcaaaatttgtgcataaaccagaaattgaaagactttaaatattttttatttccctttttaaactaagaatgaatttttcctgaacttcataatgtgggtatattggaattaaaagcaactggaggtaattagattgggcataagctgaatgttctccgtttacaaatgtcataaagacacttggcattattttactgaaaaggaagtaaaatatcagaccttgtattaataatgttagcttttagcagggtctcctcccaacctctacccacactccaaaaaaggcaaaaggcatgtcaagttgtttagacatttccccagttcatcttttacaaatcaaaattgtgcaaagttgtctttcaaatatttattgaattttaatctttgaaggcatcacctttctcaaagataatgacttgctcttattgtgtcatgtttggaaaacagctgttatcacatgctgctgtgtagaagcatcattctcttcctagcattccttattaagtctgattgagcaacatcagctatgcacttaaccaagtgtgagattaatcatgattctgtatccaccaaactttgtagttctgaattatccaaaaaagaagtcttccagaaggacttgctcttaaattcttctccaaaagcattaacattctgtcccaggtggaacaaatgtgtcagtattgatatcactatataggaaattaaattatgagattatggcaaaaattataatggtgttgacattattatgagtgtagcacaaatcagattatatcatgagttaggttataaattaaaggcatataaatagttaaatgcattccaacaaatgtaaattttaataaaaaatagtatggcaaaatgctcacatcaacagagacataccttatacagcactcagtatctagtagactctcaaaaaatgtttgtccaattaagctttttttgttaactactgtcctgaagtatgatgtagaaaaaaactttttgagttgcaaattttgctataattttttttctctctttgcttctggccctggacttctattattaattattactagaaattctcctgaaattagatttcaagaagaattctatgaataagacagtaaatgacatgtccatatctgattcaactatactgggacacaaggtaatagccccgatatttcttggagtcccttctagtgttatactcgatcctaaagtcatatggcaaaaattgcttatttcacagagtctatgttaaagtcattatgagacgatgaaagacacagcttatggcttaagacggtttggtggggaaccttgactgtaaattaaatggaatatgatagaatggttggaatacaaacacctgtattaaatattttttttaaatgaggtgagagtaccagatgtcctgtgggctcattcttttttggtgcatcttatttttctttattgttagcagaaatatgaaatacattaaaactccttcacatctgtgcaacaaaaatagaataagaaagcaaatgacatgactgctagataaagcactacctaaaataattgccttaagctatttggagatttattgtaaattaaattgcaggaatgtgcatgataaaaatggcatctgtcattgaaaaacaatataatttattttaaaatggatccatgtgcatgcttagattgacaggtctttaaatgttgatgataattttatcactaccacccccaagccccaatattttatgtgctgtttgctttgggattttccttgaattaaaaattgaacaatcttattgcagtgcagaaagaatttcattactttcagaggtgaccttccagattctattaggacaagaaaatagcctttcacaacatcagtcaaaatctgtctttccatacgagcttcacctgggtctagcacctccaaatgctctagaaactctttgacatttctccttctgcctgtccttcccagccaaagtcaacaatacatatgtgctaagattgtttgggggtcatcttcttttttgttttgtcatatgatgctgacactggaatttccgttgcataggctcttcaagttaaaagttagtaccttgaagatagggattgaatatcgtggttttttttttttaatatcctatttcttaacttcccagagaacctaattcacatgcctgtgcctaatgggcatcttgtaacattattaactggttcttttcgataaataccccatgattcctttaaagattatcttgacttatcctgcactttttaggtataccatcagaattacaaaccaaatattaatcaactattttcagcttttctgtcaaagatgtaatagtgccaaaggagacaggatttttatttgttattatatagaaagtcataatatttttattttaaagtgataccaaaatatatgttgaacctagcattctcagttcagctcaattaacagctatgaagagttatatttttattacttcaagagaattgataatcccataaactttccaaaagaacactcttgaagatggtatctgatttcctctgtttcagcattctgaaatccaggttttttcacctaaggaaatctattagcacccacttcctactatacatagaactacttaaatactcttctctgtaatttccatttggatttgagcatgaccatggaagtaacatgtacgaaaactataatagcatctgacaggtagtctctaggatgctttcccctctcaggagggattgcctaaccaatggggtatgaggaatttggaaaagtattatgcaaaataaccttatattagaagatggagagtaaaagacagacaaagagagtttgaaaatatgaggtctatttatctgaaaaaaagcaatgaacctcactaatttagtgacttttcagttatgtgaagaataatgacaacgttttctctatcaatacacaaacataaaggctcacaaaggaaataaagtttatatggcaaagattaaataggatgaaactattctcaaaatgaaggctgttatgtgttggaatgattaatttaggaggaccatagaactgtttcattagaaagtcataggaatgatgtgatgaagacacataaagcatctgaaatgatggagattaaatgacactttaaagagcctcctattttaatgcttttaagatttcttttcatttattatttaatttctttattaattgccctgattttatcagatttatcatctcatggttaaagcttttaaaacttcattgtgaaaaaggaaagaagactttaatgtttagttatattggaacacatatttctgtcttctcttcttttgttgttggtgcaccagtcaaattaaagcactggctccaaaataataagtaatttcaaatacacacaaaaattcctctagccagtatcaacagagggtcagcattttagaatatttatgatgaaaagggttactgtaactgaaatccagctgaaatcattttgctctgggtctctatgaatatacagaattgatgtttcattttaaaataaaccaggtgagttgtatttttaaagcgggattttcagagttggaaattttggggattagatgtgatttttcaacttctttctttctttttagtttattctgaggaattttaaatcccattactttgaacaacagtgatttttcttaaatttataaaaggtaattgttaccatagagttaaacttatgggaagaaggatcagaaactgatattcctgtacacactccacagcagaattgctggtacctaaacagtcacttgtgtcaagcactatactttgggaatgtagacaatcaaatcttgaaaatattaacatcaaggaaatatgtgatgctggtagaagcttttagagatacaacacacacacacacacacacacacacacacacacacacacacacatcattccacatatacacaaattgttttagaactacaaaaagaaaatcaagaatatgagtttctatttaagtgtttgttattgagatgagtcagaaatacattgaatcctcttgagccacatcaaggtgattttttttgggggggggggttgtcattgtaattgttaatatacaatatgttcagtgtaaagtatttccataccacagactccaagactccagcattgaggaaaattcttaagcaccatggacagctacagctttcttctagcagttccacagtttaacaacgctcagggaccagttaggaattcattcagggctcataatccgtgtgttcactgtgaaattccaccttgaattttcagaccatggtgtctcagcactttcttctccacgccattgttgaacagtttgtgtaccatcttttgcagctctttcacagtgtctggtaaactattgtagattctaagaataagtcaaagtgatgtccccaaagccccagatcagtgtggttgggttttgtggggcacacccaggagttcttaagatgtaatattttcagcttttattttagatagtggaggtacacgttgaaattaaagataataataaattacaaatttaaatttttaatagaaaaaaggcaatatagcaaagaaagggttacctacatttcttgatcatattaggttggtacttacttttaatggtgaaaaccacaattacttgtgcaccaacctaatagtactagcaacatagcctttccggtttacctccagcctagttcattcatttatgtcacttcccagcctctgtagaaatttcattatgtgaatcatatcatagagtttcagtgggatttggaaggacttcagagttacctcagttgaagactgagaccatgaaagctactgtggtttgcttgcaatcacataacaatgtatgtatatattttgtgtgtgcattgatgaacacagtttctaggtgtgatcaattctattatgtgcaactaatggaaacccaaagagagcatgattcaaaaggataaataaaaacatgagataaaaaccttctcagacatctaggtagttatatgaagtttgtctagtttgaaattccttttatttaatcagtgaacttgctgatattcttgtaagtactcaagatttgaccttaattttaaaaatgaaactttccataaattcctaagtgcaacccaggctggttccttctttctctgctctgcatctcaactttctgggccctttctcctctatcgttaatggaggttttaagtgcaaactctcaagcagtccagttcctctcatttctcagcctcagctctcactctgtacaacaaaagtctaggaagcaatatggttaaaggcagaactcctctctgagagtgttgtaaagaactcagataaagcaaaacatgatgtggagtagtctaggtcagacaagaacaagaataatagtgctaaagaaattacaaccaggtagcaaattatcttcaaggttttaacatcttagccacactttcttatctactaatttggtgacaagagtgttgtaataagtccccagaggaataatgagatgctcctacccaaagctcaatgctagtaaccaaggaaaagagtgtcttgtgactatgagcaccaggctagcaagctatgcccccagaaaacttcttcaagcaataaagtcttagcagtttatacccagaaggaagattcctcaggagccttgcaatttgtggtattatatgaagtagaggtagaagagaggtgactgagactccttttacaaaggacttgattgctttcttctaatattcagtgtgacagcttattgcacctggattcttctttctcaaatagtttgaaatgtgtcaagggaaatgtgtcccactttcacagaccagctctaaaatctcaaacggcaagaaaccagcataaattcagagagagtcatgagggaaataagttgacaccacactttaaagttccagaagttgaagaggactgaaaatgggtcatctttcaatgaactaaaagaaagccttcccacaggaaactttacataagcatttgaacatgtatgagattcatgtcgaggtctagtcattcagtgtccgtgatgcagtgaccataagcctggctgccagtaagaaccacaggtgtcagtcaaagtaacgtgtgatgctataagagtgttaaattggctgggcgcagtggctcatgcctgtaatctccacactttgtgaggccaaggcgggccaattgcttgagctcaggatttcgagaccagcctgggcaacatggtgaaaccctgtttctacaaaaattacaaaaaaaaaaaaaaaaaaaaaaaatagccaggcatggtggtgcacacctgtagtctcagctactcaggaggctgaggtgggacaatggctggagcctgggaggcagaggttgcagtgagctgcgattgcaccactgcactccagccttggtgacagagccagaccctgtctaaaaaaaaaaaaaaaaaaaaaaaaaaagtgttaaatcagccaggcatggtagcttaagcctgtaatcccagcactttgggaggccaaggcaggcagatcacaaggtcagcagttcgacaccagccttaccaacagggagaaatcccatctctactaaaaatacaaaaattagccgggtgtggcagcatgtgcctgtaatcccagctactcaggaggctgaggcaggagaatcgcttgaacctgggaggcggaggttgcagtgagctgagattgcgccactgcactccagcctgggcgacagagcgagactccgttttaaaaaaaaaaaaaaaaaaaagttttaaatcatctagccattatatttgtctttagacatcccaatctgattagatcttaacacatgtaggattttcttcttgtaactaaagtttttagtggaattttcatttagtggggtcactgaagaactaattatttgatgaccctttaatggaaaagcctactccagtataatcactgcaagaggcttcagatgattttagtcatagcaaaaagaggagaaggtgtacaaaacaactaagaaaataatttaaaagtcagctaaaaaatttagaatctcaagcaatagattaggcccagaacaagtgaacaggatgctatgtaactttattgttgagtagtttaacattagaatgtagatggctttgtatagacttccatttttctataactcttttaaaaagacaaatcaataggattttttggttgttatgttcttagtgacctctgaggcaaccactttggcagcaactttttattgataaatgcattttatcctgattatttaaaaattagaaattcatctatagtgcatatggtaattctcggttaatcaaagaactaaacttacctaaccatttcattccatcaccatttcaaaataaactggagtgtactgggctacttgtgaggcatcttcttcctgtggaaccttagtgtatctctctttgtgatctaacattcccattttcttttctgaaaacttgagaatcagtgaaccagcacaatatgctcaagtttgcatagaaatacactgcaaaacttggagccctttggcctgttttccaggatgctagtcattaactgttaccttctaattctgcctctacatcttatcaaatattgtgagtccacctcatatgtcgggaagaactctcactgtctctggcaaagtgagctgcagtagttcattatccagaactcagatatcagatcacaaacagcttcaaacatctggaatagcactgaactatgtttgatgggggagaaaggagcagtggtggaaccaatgaatgtgtgttgtaaagaatattttacccagcctttgagcatacaaaaataacaatagtaactaagaagacctggaaactcagagattatagtagtgccattgatggaccagactgaaagcattcagatatggccaagacaaaagaaagataaaaaagcagaaaacatgtggcaaacaacagaagaataggaaaggaaaagagactatgggaatggggatgatgatagtggctataaactgtaaacaccaagagcctgtaagaaagaaagggtcagataggggaggtaggcaaaggggcttatcaaaaagctattctaggtctcagcagtctcttaagatatgattggcctaaaggcaaatataagacatcagccctaaaagaacaccaccgtgttgttcaggagagtcatatttgatgtgaggataaatcagatctcccctgggatcacaggagaatgtcactgcaaacaaaatttactgaaagccttcatacatgtagttaaccagtgaatgggagctccatgaagctaggaaccctgttctatctatcattgggacccacacaattcctggcacatagtaagcccacaataagtatgctgaatgaaataatgaataagccatcatcattgtcatgtaatcaggataaaatgcattcatcaataaaaagttgctgcaaaagtagagcttttgactgtagaatactgtgaacaggtgcagttaaataggggtgagcgtgttgcacatggtatcttgcgatatggattaggaaaggcaaaagggagaaatagaaaaagaaggaaagaaaacatagagtgacttggaatgggaaagcctggaaaacctagcctgataagtagattatttatctttctctgttctaaaataacttggttataaagggaggctcttcataaagcctctaattttgtaagttgtatattttgcccatatattgttaaagctgccatgattagctgaatgggggtacctcttttatttgagtttttgtccctgaaaagagagaaaacttttcttctcccccacttcaaaacaactgcaactcaaaagaacttgaaaagacatgtttggaagagcaaattagaaaaacaacagatttgtattagttgaataatgcatgggtattttctgctaggtactttgcctggttttaggctttgtacataatcagcatataatgcagctgtataaaaattgccaattgcttctttcttcaagagaatgcatttataagtaccctccagccctctgaggagcatgtaatggtgtgccttggtcacatttgccagcttatttgtggactgtacctgggttcaaacacaatgaggacaggttgactgtgcctacagggagtggtcttgtagaaaaataaaactttcgactttcagaaaaaaatccttagcacagaggtatctgaggagccataatgttgattccaaagaacaagctaatacacagatggatgtggaatacttcccaaggggttccatcatttttttgtaccttcagggaaatattatttcaaacctgagtcctacttgaggatactcggtccctctccagctaggcaattatgactctaatcttgaaggggcagggttaatatctttgatcatctttctgcctgtcagtgtatcaactgagatatttttcagaaagcaaaatattataaaagaaaatacaagaggactctgatattccttgcaaatactatacaaaacactcaaacttgttcatgaaaatgtattttgtaggtatctataattctgttcaaagcttgacattgggaaatacttcaaaaacaatgtagtctggcatcaggtgtttagaagtgttaatttcctgattattattattattattacggtgtttggtggtggtggtggtggtaaggatggagttagggggaaaggttgaggcaccttagaaatagacttttcccacttcttctcacataaattcttggattactttgtatcatttgacttacatctctccatttgcttcctctccaccccacccctgagaaccactgttaatcctctactctacaaagtagcagatatgtagggcaaacatgtctaaagatctaatgtacgacataaagactatagttaataagagcatactgtattcaggatacttgctaaatgagtagattatagctgcccttgccacagaggggaaaaatggataactgtgacatgatagatatcttaatttgtttcactgtaatgaccattttactctatatatgtatttcataacatcatgttgtatatcttaaatagatatacgcaaaaaaaattttttaatactcaaatgactcataaggaatgcttctcctccatacaaatagtgaagggaaaaggtaagtgatgtgggttgccaaaatggctgactgtacaaatcacaaacaaggtttagaggactactgaaaagttgacgagactctagaaacagaagtaaagatggcgatttattttattttattttattttgttttattttaaagaatcaagataaccctgaaagggaagggctgctcttggtttttgattcagcagtcagtttttttacaaggcaggcttgggatgctgcctttatggttctgcgagtgctgcaccccatctggaagaggaatcaacttgtagggccacctttggggtcctaattctgagacttgcacccacccttgtttgtgcatatgcacagcttcacaaaagggtggccataggtcacacacacacgcagagttccagattttctattattaaaaaggatagcagtgtgtgttgttgtagaaagactttcatcagtaaaaaccttgaaaatgtgaaagtagatttacttaacttttaaaaattctagttaatatatccagaagttcttagtccccggagatttttaggaactgaggtattatggaacttcatttaataattggctagatccaggttgtaggagaatactctgaccatctaccaacagtttggggattttcttcccttagtctccaaaatgtgcaatttacttggtgcttgtaatttcttttgaatatttacagttcttccagaagaaagtcagcatcttataaattcatctagtattcttgaggaattcagaaagattataacaaatcatcggggggaaaaaaaaatctcaatcttaccagtaagtaaggacttcagcacatgattaaatttcctagggctggagttactgaattgataggcttacactcagtaatgctaataaaaacctcttggaaacacattttcaatttataactatgaaggaaaatgcaggcctttcatcaggacttcttctcattatcaaaaggtcttttgctcaaaggcaaatagacatcaatgttaaaatcaggtaagaacatagattcttgatgatatgaaatgaccgcaattttaggtctcaaacttgcatactattcataaaagtggttgacaaatacatttaaaattataatttattttcgcattcaaagcataattttagagaaggtcagtaaaagtatgcccattattagaaaatgtgctaaagccttatcattgttatataacaaccaatacagattttaatagctaaattgacttacagcttttctgcttgtgacatgtgtccattctcccagaatgcaaacttcctgtctctcttttgactttacaaatggcgcaggtacttccttccttcattcatgcaataaatatttataaagcatctaccaatcaactagatactaggtgctagcatacagcagtaaataaagcaggcaaagaaacaagaaacaaagaagtatctgatatgatgttagctagtgataaatactgggaagaaaaataaaacagggaaaggggacagagaggtgtagggttttgaaaaagattccctggaggtgacatctgagtacagaactaaattaagtgagaaagtgaatcatgcagatatctagggcagtgattctcaaccagggtgactttgcctctccagggacatttggtgtctggagaagtttttaattgtcacaactggggtaagtatggtactggcatctggtggatagagaacaaggatgctgctaaacaccctatgctgcagagggcaggtccctgtagcaaagaattatccagcttaaaatgtcactagcactgaagttaagaaaccctgatccagagaaagagcattccaggataagaagaaagtaaataaacacaacaggccatgagatgggaacttgcttggtatattctaggaagaactagagggtgtgtgtcgctggagcacagtgacaagcagctacagatcaggaaaagaatttggaagatagctcagggccaggtcacatagggtaacaggcaagactcctgcctctcatttgtctgctctgcttccctctttactaagctcctattccaaactccccaaggagaactagctggctttgctggcagatgtcctaggcagctgaatgggttttggtgggaaacaaggatttcacatatgtgtttacctgaaaagtacattcaaacccatcttgcaccatgatgggagatcttatagttggctctccacaggttgcaaagatcatttcactaaagttctggaatagagttctcgagtgtggtcattactagactcatggctctttgaatttatgttagtgaaaatgaaataaaattaagcattcagttcctccagtgtactagccacatcacattcctaacagccatatggaatcctcgtcctaaacgtggaactgactgacctcagtctctggagccgttttctgtattgctcttatcctgaccttccccagactttttgtgctgagacacctactgacatcttggaagggcagccactttggtattgttcaggggcacagaaaactgtcctccattgtctccaggcctctccaaatgatgtgtggatgactaccagatttatgcttgattggctagccaactgcccttgttttttgaaataatggttcataggggatcctgaagtccttttgggttggcaacttgcgtttagagctctggttctgagtctagtttgtatcatttctcctcactgtgttattttccacttgcccacattatcgcttctattttgcttttctgcctacacaacagagattttgttctaaggtatgagtattactcagtgactctgttttccaactttaaaaataagtttaaagaagaaagtatattcagaattgcggacatggatttcatatttctacttagtacattgtatggtatgtgctttgattttgttagttggatgtgttcttctagaaatgaaatcctaggcattatctttatatcaagccagcaatggctcagatttgaaaggacaacaaaactaagataagaattaggctcctcaatcagtagagtttatcctcactcataatttttttaagcttttggtagtggatgcctttaaaatgttctttaaatgtttatggcattggttgtcaaattttgtggcttcaggtttcttttacactcttaagcattattgaggaccccaaagagcttttgtcatgaggactgtatctttctgtatttactatatttgaaattaaaactgggactaatttaaagctcaagaaaatccaagcacatacaactttagccgtcagagcaattgcattatcacacatcatgtagcctctggaagaatccactgcatgtttgtgaaagaataaaagcaaaaaaggcaaacagcatcttagaattgttatgaaaatagttttgacctcacagacccctcaaatagaaatgcagtgaccctcaagaattcccagaccttacttacagaactgctaagcacacagttattttgcttctagaaaatattttttctgctactactgggttaatctttccttggcctgaagtggccaatagatctctatggagaagaaaagaaaataggcatttattaagtacattctctgagtctgttccatcatctcccaacttccagttaatcaccaatctcatttcatgtatagtcatccatttcactggcttgagggtaggatcatttgtccctgtgttcctgcagcaccctcctagctggctgatttgcagtcctcctggcttgtctctagtctttctcgacctgtggccagagcgatctgcctaaaacccccatgagaccatatttgaccctgatctttcccacagccttttggatgaagtgaaacttcctccgcatggctgacaaggcccattcatgaccaggctctacagatccctcatatcattttccttctttctactgcccccaccttcctccccagactcatatcctagcacttttagtttgttgagcacctgaacatttgtgttctttctcatatttgaacctgtaaatgtgttattcccactgtctggaacttctcagctattcctggccgagacctactggtccattatatctcaatgtagatgtcacttcagtgaggaagacttctttaccgccaccacccccctgatagggctagtactcctcttatttgcccctgtgataccgggccctctccttgtcatggcacttgtgacactgcaggtaattgtgttttccttggttatgtccccttacctgaaagcatcttgaggtaaggaaacatgtctgggatcatttgcatcctctacccataggggcagatgatggtcacatggtacacagttgttgaatgatgaattaatcagtcaaaaaaattttttcagagtgctagggctttattacaaatggagttgacttgtaaagaggcccctctccaatctttcttctgtaccctcttctctcccaaagacatccttccacaggaggattagggaggaggaaatctggtgagtgaaaaggggcactgcttttgccaaagtcctctgaaacaaccactgagtccttctggatccagttgagaatcttctagaggaagaggtttagctctcatcttcaaggtccttcatttctttttttattttattttattattattatactttaagctttagggtacatgtgcacaatgtgcaggttagttacatatgtatacatgtgccatgttgttgtgctgcacccattaactcctcatttagcattaggtatatctcctaatgctatccctccccccaccccccacaccacaacagtccccagagtgtgatttccccttcctgtgtccatgtgttctcattgttcagcacctatgagtgagaacatgcggtgtttggttttttgtccttgcgatagtttgctgagaatgatggtgtccagtttcatccatgtccctacaaaggacatgaactcttcattttttatggctgcatagtattccatggtgtatatgtgccacattttcttaatccagtctatcgttgttggacatttgggttggttccaagtctttgctattgtgaatagtgccgcaataaacatacgtgtgcatgtgtctttataacggcatgatttataatcctttgggtatatacccagtaatgggatggctgggtcaaatggtatttcttgttctagatccccaaggaattgccacactgacttccacaatagttgaactagtttacagtcccaccaacagtgtgaaagtgttcctatttctccacatcctctccagcacctgttgtttcctgactttttaatgattgccattctaactggtgtgagatggtatctcattgtggttttgatttgcatttctctgatggccagtgatgatgagcattttttcatgtgttttttggctgcataaatgtcttcttttgagaagtgtctgttcatatccttcgccccctttttgatgggttgtttgtttttttcttgtaaatttgtttgagttcattgtagattctggatattagccctttgtcagatgagtaggttgcgaaaattttctcccattttgtaggttgccattcactatgatggtagtttcttttgctgtgcagaagctctttagtttaattagatcccatttgtcaattttggcttttgttgccattgcttttggtgttttagacatgcagtccttgcccatgcctatgtcctgaatgttattgcctaggttttcttctagggtttttatggttttaggtctaacatgtaagtctttaatccatcttgaattaatttttgtataagatgtaaggaagggatccagtttcagctttctccatatggctagccagttttcccagcaccatttattaaatagggaatcctttccccattgcttgtttttgtcaggtttgtcaaaaatcagatggttgtagatatgtggcattatttctaagggctctgttctgttccattggtctatatctctgttttggtaccagtaccatgctgttttggttactgtagccttgcagtatagtttgaagtcaggtagcgtgatggctccagctttgttcttttgacttggggttgacttggtgatgcaggctcttttttggttccatatgaactttaaagtagttttttccaattctgtgaagaaagtcattggtagcttgatggggatggcattgaatctataaattaccttgggcagtatggccattttcacgatattgattcttcctacccatgagcatggaatgttcttccatttgtttgtatcctcttttatttccttgagcagtggtttgtagttctgcttgaagaggtccttcacatcccctgtaagttggattcctaggtatttcattctctttgaagcaatggtgaatgggagttcactcatgatttggctctctgtttgtctgttattggtatataagaatgcttgtgatttttgcacattgattttctatcctgtgactttgctgaatttgcttatcagcttaaggagatttagggctgagacaatggggttttatagatacacagtcatgtcatctgcaaacagggacaatttgacttcctcttttcctaattgaataccctttatttccttctcctgcctaattgccctggccagaacttccaacactatgttgaataggagtggtgagagagggcatccctgtcttgtgccagctttcaaagggaatgcttccagtttttgcccattcagtatgatattggctgtgggtttgtcatagatagctcttattattttgagatacatcccatcaatacctaatttattgagagttttaagcatgaagggttgttgaattttgtcaaaggccttttctgcatctattgagataatcatgtggtttttgtctttggttctgtttatatgctggattacatttattgattttcgtatgttgaaccagtcttgcatcccagggatgaagcccacttgatcatggtggataagctttttgatgtgctgctggatttggtttgccagtattttattgaggatttttgcatcaacgttcatcaaggatactggtctaaaattcttttttggttgtgtctctgccaggctttggtatcaggatgatgctggcctaataaaatgagttagggaggattccctctttttctattgattggaatagtttcagaaggaatggtaccagctcctccttgtacctctggtagaattcggctgtgaatccatctggtcctggactttttttggttcgtaagctattgattattgccacaatttcagagcctgttattggtctattcagagattcaacttcttcctggtttagtcttgggagggtgtatgtgtcgaggaatttatccatttcttctagattttctagtttatttgcatagaggtgtttgtagtattctctgatggtagtttgtatttctgtgggatcggtggtgatatcccctttgtcattttttattgcgtctatttgattcttctctcttttcttctttattagtcttgctagcggtctatcaattttgttgatcctttcaaaaaaccagctcctggattcattaattttttgaagggttttttgtgtctctatttccttcagttctgctctgattttagttatttcttgccttccgctagcttttgaatgtgtttgctcttgcttttctagttcttttaattgtgatgttagggtgtcaattttggatctttcctgctttctcttgtgggcatttattgctataaatttccctctacacactgctttgaatgtgtcccagaggttctggtatgttgtgtctttgttctccttggcaaattggataaagaatcaagacccggccgggcgcggtggctcacgcctgtaatcccagcactttgggaggccgagacgagcggatcacgaggtcaggagatcgagaccatcctggctaacacggtgaaaccccgtctctactaaaaatacaaaaattagccgggcatggtggcgcgtgcctgtagtcccagctacacgggaggctgaggcaggagaatggcgtgaacccgggaggcggagcttgcagtgagtcgagatcgcgccactgcactccagcatgggcgacagagcgaaactccgtctcaaaaaaaaaaaaaaaaaagattcaagacccatcagtgtgctgtgttcaggaaacccatctcacatgcagagacacacataggctcaatataaaaggatggagaaagatctaccaagcaaatggaaaacaaaaaaaggcaggggttgcaatcctagtctctgataaaacagactttaaaccaacaaagatcaaaagagacaaagaaggccattacataatggtaaagggatcaattcaacaagaagagctaactatcctaaatatatatgcacccaatacaggagcacccagattcataaagcaagtccttagtgacctacaaagagacttggactcccacacaataataatgggagactttaacaccccactgtcaacattagacagatcaacgagacagaaagttaacaaggatacccaggaattgaactcagctctgcaccaagcagacctaatagacatctacagaactctccaccccaaatcaacagaatatacattcttttcagcaccacaccacacctattccaaaattgaccacatagttggaagtaaagctctcctcagcaaatgtaaaagaacagaaattataacaaactgtctctcagaccacagggcaatcaaactagaactcaggattaagaaactcattcaaaaccgctcaactacatggaaactgaacaacctgctcctgaatgactactgggtacataacgaaatgaaggcagaaataaagatgttcaaaggtccttcatttcttcatcctagggggcttttgtcctcttttgccttttgagctgtggctcactagtcctggctagttttggggggcttccacttccatggctgccttctctttctgggcaagctggatctgctggagaagttttctgtgcttcttcctggacagagtaatgttggtacatgcactggatgcccacttcttgaggtggtgctgcatgagcagcccctggtctatcacagccccaaccacccagtacctcagacaccactcccagttcaatacccacaggtggttgaacagcttcttcttcagttctgtttgggaccagttgatctttccccagagagtcctcatagtcacgccacaatgccagttcccaatcagtcaactttttaagtatttcctttataataaatgtcttatttgcattatgtcatttaatcattatttgcattatgtcatttaatcatcttaacttacttccattgcctaaatatcccagcagcaaagaaatagtgaagctggaatctgaatccttttcttaccatcatatgctgagaacaaagggatcacccaaatggggacaactcacagaaatgaataaagattaaggtaaattttccaagggagaaggcaggcaaagaatcattctgacaaagcagctgggtcctctttcaacttctaagtgacattgctggaatattcccaaccagaactcagagtaataccactagaaatacttgttaagggaaaccgatctgtttcatcctgaaagtactttcccagttggcagttttgaaaatgtctatgctcctggagctttatagccttacttaaaaaaaaaaaaaaaaaaagtttggtttttaaaataaattccaagagcactagggacatgaaggttacacagacctccttcacacttagtggaaaattcttatcttttaagtctttctctcttctgacagtttcttgttacattgattaaatccctgtgagttgtgagttgttttcttccagttcagcctcttggttcctgtttatttttccagaaagaactcagtaaaattctgaaaacagaaaaggaattgaaaatatagttttattatttatattttgaaagaggcatgttcataatagatgcaaatacacaaacacaggaaaaaaatttaaataatttccagtaattccaccactgttggtattttaatatgtattcttcccatctgtctgtcttgcacatacacacactctctctctctctttccctatttccttctcttatgtgtgaatgtatgcatattttttaaaatttaccaatatagtatcatatggaactaattatgaaatcaccctatttcatttaattgcaaatatctttccatgtcattaatcatgtgcctctgcttctcaaatgttaatgcatgtgcgaatcactggagaacttgttggaaatgcataatctcaggcgctcccccagacctactacatcagaaactgaatcttaacaagttccaggtataggtgaaaatattggtccacagatcacgttttagtagcaaaggttgaaatcttttttggagattgcacagggtccccagtattgatgcagttgattttatataactaagccctatatgatcaaacactggagttatttccaattgccctgctaggatgagacacattcttacaaatattagcatatatccatcattatttccttaggagaaaaagtcctgtagatagtttgctgagtcatacatattttgaaggaaataatttatttttaaggattacaaaatagtgattcattcttatgtgctatgattacatacttcatagcacataagactataaaatgtagccatagtacttcctgtcatatatgtgcattttcccctatctgcagtgaaccaagacagagctttgatatttttgattattctgatcaaagcactgttatcacttgaaatggtttcacctctatcttcaattcatctaattttatccacccttcaacacaagagttttaatcttgcttcttccagaaagtcttccctaatagtccaacttacagtgagctcacttgctaaatattttcaccattgttctttgggccaattatgtcaaaacatactttcctactttctcttgatacaacttaaatatatgactttggtccctctcatctccttgactggattatgaatgacagagggaatggatctttagtgtgcttcatctaagccctctgcaacccctctcactccaagaaggtttgagtgcaatagagaaagcacaggatttggaatgaaagggctcgtgtttgaagcccagctctgccatttactgagtattgaagaaataagtcatgtaatctctctgagccctagctttatcatctgtaaaatggatacagtatctgcactgcttactaagattctaatccatcatgtcatttccaaaaattgtaaataattcaccaaaagtctcaatgtagagtttgtatctaaatttgatataagatatgcgagtatctctctctctctttctctctagtacacacacttacacacacaaacacaaaagaatgtatctcaagctcaggaacttttacccaacaacagtatagaaaggaactgaacaatattgttttgttttcattgcattgcatttatttactttctttttaaaaattattattttttatttgcaaatataaatgtatatatttatggtgcacaacatgatgttttgctatatgtatactttatggcatgcctaaatcaatgaatttatttattttctatttatggcaagcaatatttgttttctaggtatggtagtgatatgaagttcactttttaaataaacatttaaattttaaaaggtaactcaagataaaacacttggtagttagtaccacgtaaattaagaaaatatggcaaaatatcatgctgatgttataaaaatgactgaagtttgggcaacatctaactataggaagccactgccaactataatgcaagacgcagacatcagttgttattgtagctattattatgtaaactactgaaagaccagttctgggagccctagttttaatagattctcaataaaaaatactcaaatgtaatttaaaatagagcaaaaagtcaagttttctgttatgcgacaagtcaccatgggttgttaaatcttgcagaaccccaaagtgtatcgagatcatttgtttgtgatgaagttagatacaaatgtagtgaggggctttatcagaataactgagatggctcaacatatatcagttccaactgggagaaggtttgtgaatagattgctttgcataagacattattcttcattatgaaaaacaataaacgttttaggagcaccaagtgtacagagaatgctggcatttgactaaaacctgcattcatgggaaaaacaaaaggtttactgtccttcaaatcatcatgattagtgctattgtattagaactcaaagcaagttcacagttttccatttcactctgaaatctctcaaaaaaggagttttattaattctgtctttacatgaagaaataaaatcggtcagagagagattaagtgattagtctaagatcatgtggtttttttatagccagaatgaaaaacaagagattctgactctatgtaccttgtaactttgttatcgttttccatccacggtaggctactgctagtcttggagtattagatgatttgactcaagtattctagatttggattgtgccaaagtgggattaaattagatggattagatcaaatggcaggattcagttaaattaagtgggattaagatgaggcctgatatgattgatttcagcatagtgtggaggaattttcaccagcacattctcctgtctcggttttgattataaagagaagaggaattcaagaaggctccttcaaagaataagctgaccacagtttgggtctacttgtgccagaagattggtcagcatcctgcaaagcaatagtgtactgtcttcaaacctgcgtctttattttagcccagtaaggtctatttcaaacttacggcctccagaactgttcagtaataaattcatgtttccttaggcctctttagtttttggtaatttttttacagcaacagtaggaaactaatacaacacagctcagagttcttccacccaaagtgcgggggagctggactgtttatgtatcaactcctaccggttgtggactaagtgctgcttggcatgggggtatgaattccttagcactcaactaaaggtgggtagacgctggcagttagaaatcagccagaacacagtgaagtgctaagactctggaaaaatggactgggcactagcggattccgctacaatatgtcttttatctgcctcttcctttttaatctgtcttcacagtcatggtacatgcagatcatccccttcgatcaatctactagcacctaacaggttaatcttccctaaacagggagggccttcagtgggttgttctctttctcaaaaatcttcaacattcccacaagaaaagattcttatacaaggtagaccagatttcaaatagtaaattaggactcaatcctctgatactttaatcttagctcttgaatttttaagtttgggtatacagaatgaacagcgagtattcttggatatctatttgtgtacaaagttccaggcttggcatacgaacctttggagtcttgaaatgttgatccgttaggtctgcatttcttagaatagcagtaacaccatgaggaagtgagaaaattgatttgaaaatggagaaggttaattaaaggaaacaaaatttcaaagcatgtggttgtcagttgacactacagaaaccaggcctgagaagttctgagttctgcacatttacagaatgtcacaggtatatttagataaatccagaatctagggagatctaattgctgaaataatttcagcctaccaaagcaaggacgttcttacccttcctactctgcctgccctaaaggaaagtgcttagagtttcagagctttctgtggaaaacttcaggctcaaatgaccccataaaatttgtccacagtcctcacattgattttcccaagttctgcttactttgtgtttgctgtttgtccacatcgtaaaagggtggagaaaggaaaaagaatccatacatttttaacatatcaaaaaaacaaagtaaataatatgctttaaaattagaatagaaagtgctgatgccagagcatttttttaaatccttgtttcagagtaagagtggagtggggaaagacagagcctaagaaaggaagaaagctaacatttactgagtcctgcaaaaggtgtttagttcacatccaccttctgaagaagccagtaatatctctacttgacaaattgtgaggctaaggctcaaagaggttctgtcatttaagtgatgtcataaaaccaagaagttggtcatttgggatttgagtgtgttctctgtcttatctatgtctcaggtgagacatagcttgcatttatatagtacttttcaaagcatttttcttatactgtctttaaacttcatctgtgaggcagacgtcaattgccacattttacaaatacaattacagaggctcgggactcttttgcccagaaagacacagccagtaagcagcaaaacaaatctgggtcatggagctcaggtctcaggacctctctagtgcacccgtgtgtcctaaccagaaggggctgagtcattggtgtcctgaaaccagtcaggagcagttagtttatttcagagaatcatctagtcagaaaaaaaaatttaagacttacttttattttttctaaattattaaataatggaatctccttgcagaaaatttggaaaacatacaaaggagaaaaataaaaatcatctgtaataccaccccccagaaataatcacaagtattaatttgatacatttctttccagtgtttatgatacagatatgcatccatactgtatttttagaaaagtatttttagaaaatgcatgtcatatatagtttaatatgctggttttctaattaacattggatgatgaatattttcccaggtcattaagtaatcttaagaaactgcctcatgtatcataatattgcatgaatgtaaccgtaatttagtgaaacattattcacttactgttgaacataattgttcctggttataagcctgtacataatgctgcaactttggtatctaaacacaaaatttttatttccaacagcagtggatgagaggggcaatttctccattttgagtgtttttaagacttttgcaagatggataggtagaaacaaattcttctttgaatttgcattttacagattacagccacactgaatatgttttcccatgtttactttgccagccgttcttgtccccatgcagttccacgtttgtttatatgctaacacagtactcagagacccagcagtaggtaccaagataatcagctgttacagtaattgccagaacccccgagtctgggaactgccagcaccagaacataagcacctctaggcaggaattccatcttattcatctttgtagtccccattcctggttctaagccagacacttgccaagttttcaatacatttgttgaaaatattacaatagaccatatattctgattttggccttctaacttgctctgtgactttcgacaagttctctcacctctctgtgcctccatgtcttccactataaatgaatggaagtgtgatatgccatactttgtgagcaaagtgctagagcagtggtacaattcccatacaaaaggtctctatgggtgggtccatgtcacctaggcaggattcctttccttctgcaatacagagagtgaactctgtgtgtatttgatatttggatttgtgatcccttcccacctttcatactgatgtactatagctaaagcaaatttcttttgtttctctttatatccccagagtgcacactgcatggcacataggaagtctctaaaaggagcgaacaaatgaatgactgaagtcattaaagatgaagggatgagtaaatgaaatattagagctgaaggagattttacaaatctaattttagagttcttcttggttaccattttatttttgtagacacagctatacagattgacggtcccttatccaaaatgcttggaaccagaagtgttttggattgcagatttttttgtttggactttgaaatatctacatatacatatataatgataggtcttggggattagaccccaagtctcaacatcaagtttatttatgtttcatatacacatagtctgaaggtgattttatacaatatttttgttaattttttgtataaaacaaagttttggctgcaatttgactgagaactgtcacatgaggtcaggtgtggaatttttcatctatggcatcatgtccgtgctcaaaacgttttggattttggagcatttcagattttgggttttcagattagggatgctcaacctgtattagcatctccaccttagaagcacttgctagaataaacttaaatcatttaaataagataaatttcaataactagccagggaaatttaatttcataaaaatgtttccatattaaaacatttttgttcatttttgttttgttttgttattggccatggtcttaatatatatttacatatattagaagtatagagttgtcacttttagagggaacataccatgtatgaaggaatgattaaattagaaattgttttttcaggtgaactttgccaccatatcaaaaaaatgtaaagttatttcagtttccgaaactaatttaaatgagtacttaatgatgtcaatgaaaaatggaaagtatgaattgtgtcttctttgaggatctttttctttaaaagatgaacatgattattttaacctgctaaatgtatatttttaaatgtttcactacttggtataataatacaatatttctaaaatgacaaaatgataattttagctaagccagtgtaaggaaattaaaatatttacttatagaactcactcagaactttttttgtatcacttatttatgcaattaaaaagaacagatactttttatgcttttctcaattcctaaattagttctctggttagaacaaaatagtgccaaggaaaagatttttttctcttcaacttttattttaaattctggggtacatatgccgaatgtgcaggtttgtttcgtaggtaagcatgtgccatggtgatttgctgcacagatcaacccatcacctgaatattaagtccagcatccactagctattcttcctgatgctctccctcccgctgcacccccggcaggccccagtgtgtgttgttccccaccatgtgtccatatgttcttagaaaaagatatttttaaaataatttcagaagtcattatttcaatttcaatagccattgatgcaatcacttgtgtaggttcttaatatattaattaaaacattgactaacatgttatttttttaatttcctagaattgttattgtggatcataactgctaaatatttcaaatataatcagttacactttttagcaattaaaaatttaccccaatgcttagtattaagaacacttaaaagaaaatagctcgacatggcatatgatgtattgggatctattataacattttcaaaccaggtacatgacaaagttaccttatatacctggttattagaaaagaaaaactcaattctaaaatgatgccattacggttaaatttaaattatatatttgaaattaaattacaaatgttttaaagaaagcccatacattttaattttatattttaaaacatgtaatagctttactacacattagattttcttagaagtgctatgtttgtggagttaaattcctgcttcatgaatgagacattgctttttcctggatgcaatattttcttttatctttcggatgatattaaaaataggttttatttaatgtaacttaaaacatacaaaagatatagaataatatagcaaacaccagtagacccaaaatgcagcttaagaaataaaacatcacatactcaaagttctctgaatacacatcccagttactttccttcctgccaacctcccagactcagggataccaaacacagccaaggacaagcatggcgtacagagtgaaaatggaggagctgtgcaaatggctgtactaggcccctcatcaagttgatttccctgtttttcccatgttgagtctggaggatagctaaaatgtattgccttatagatttggtagacgagtatgaatccttaaagcaatggtcccaacctttttggcaccagggaccagtttcgtggaagacagtttttccacagaccgaggttggggcttaggggtgtggtgaggatggttttgcgatgaaactgttccacctcagatcatcaggcattagattctcataaggaatacacaacctagatccctcacatgcacagttcacaatagggttcctgctcctgtgagaatctaatgccaccactgatctgacaggagacaaagctcaggcagtaatgctcactcaccctttgcccacctcctgctgtgcagcctggttcttaacaggccacagactggtactggtccacagcccagggactggggacccctgccttaaagtagatatagtaaagttgttgcatgtatttattcaaagcttgttaactttgtatagtatcttaatgaatgtggtcccctgtaatttgctttccttaagtcaatattatatttatgaagtgtatctgtattgagatacttagctctaagtcattcattttaagtgattttggcattcaaattatatgaatagtctataattaatctatccattctcatttggtgaatgattagattttttctaggttttttttttttttttttttttttgctactaacaagcaatgctgctatgaataatctgtgcatctctcctagtgacatgtacaagaatttctctgagacaaatccctacaagcagaattgctgggtttcacgtgggtttagcttcaagtttgctagatattgccaaattatatttcagattgggttgtatcaattacagtttttcttcttaagatttttaatgatttctgttttctccaatactttttttcttattcagttgtttggttgatgtttgtgggtttttgtcttgactttcattgtgagggctttcctcaagtgtctggtaaaaggcaagccaatcatattccaaagcccaaaagagcctttggaagtcctgtgtgagtaatggaggcatgggacaggtgtgaactgtgggcttcactctattacagggtttctttacagtggcactactgacatttggggctggataattcattgttgtgagggctgttttgttgttctttgcattataggatgtttagcagcttccctagcctctacccactagatgccagtagcaccatgcccctccagttatggaaatcaaaaatgtctctaacccctggggaagcccacccccgccccattccagttagaactgctgctctaggataaatatatggctggccggcctttttatttgccccaaatttaaatccccaacggccttctctctggggtcatttgcttctccccagctcccatctttgccggaggaaaaagaaaaaaacagggaaatcaacttgatgaggggcctagtacagcaatttgcacagttcctccattttcactctgtatgccatgcttgcccttggctgtgtttggtatctctgagtccaagcctcctagtttaaattctgcagatgctcagcctcctgtctccatagggtagtctcacttgcctgaatgctgtgggaaacaaggatttgtattcttttacctctgtaactaatattgccatgaagtttatctttgtgcatatctgaactctttatgataaattcctaaagtgaattttaaaatatgtgcaattgacatgcatttctccgtatatgaattttaacccttgatgcatattatacctaataatctaatcacagttctttttttctttgggcagcatttacatttagaaagtctttcgcctgctagtttccctgtagccttttctttatcagagaataaaagtaaaataaattataagtcctcgatagaattttagaaaaaaatattttgttttcctcttctccggttaacaaattatttagaaaaaatattagagaggaaatcttccattagtgagagaacaaatacttacataaatgtaatctgtaataaccttgatttaggactttccttgtataaaataccttttattaaagcgtttaaactgagtgggaagtgattgagccaattgctaagataatattatgatatctttaccctatctgttgagatttcatcatttattattttcctgtgcaaataggtaattattttcctaatctttaaaagcatgtttatttagaatgaacagtgtaagatttgggatttttttttttagagaatcctagttaaccatgttttaattggcaactctgttttagttgaactaattaattttgtcttagcagtgagaatttgaaaattataatttgaagaggatttaacatacattttcatcttctaagaaagtttctattgaccatttttcctcccccaacctatctgttttttagatatttatcttgcttgtgggaaataaccaaaaacttaatttaattctagttaatgaacaaagacaggtaaaaagaaagaaaaagaaaggaaagaagaaagggaagaagttatttttaaaaaataaataaataaataaagagtgcctcggaaatcacctttataaaaatcaaactcatcttttcccaacactgtcttctgtacatgagaagcatcttaaaaacaaaatgaaactgaccttttaggagggacagggaagatgactttagtgcttatcagtcttgtcgatgtccttttcttatttttgtcctctaaatgtacttgattggaaaaaacaccgtttttaaatctctttatattgaagatatataaagagtaagagtttaggtatataaaggcaatgctttcatctagtgatttcttgtccttggttttagacagggccatcaacaactgaaaaggaaatcattacttcctgtagcaaaattaaaattaaaaattaataaactagtaaacagtcatggtgcacctaccatggaccaaatcctttgccaacaggctgcattcatatatagacaaatgaatgatcagagacctggttacacagatagacaaaccattgatggatatttgggttggttccaagtctttgctattgtgaatagtgccacaataaacatacatgtgcgtgtgtctttatagcagcatgatttataatcctttgggtatatgcacaccaacatggcacatgtatacatatgtaacaaacctgcacattgtgcacatgtaccctggaacttaaagaataataataataaaaataaataagtaaataaataaaagatagacaaaccaacactttcatggatgttacctcattttatgctcacaaatgccctatcagtcaataatgtccccattttatggacagaaacacaacctgttagaagttatgtggttaagtgacttgcctaaggtcaaatggctaacaagtatgtattttttggatctgaagctgatgagtaaagcttgaaaaatgagacaatttgctaattgtaaacgtttggtcattaatcaacattcattcatctaacaaatttttatcgagcacttcctatgtactgagcattttgctaggtgctgggagactacatgactaatataaagtccctgccctcaaagagcttacatttggtggaggaaggagacaataaacacagcaaataagaatgtgatgcatagtgacaagtgctaggaagaaaaataaagcaggctgagtgaataaagagtgattattggaaggatgagaaaccattactccacctgaagtcacaaaataaataaagcatcttttctttgcaattcaaagagaaggccgtgtttcatgttttactgctggcatattttatccacagtgaagctaaacatgaaatttaaagaccaaaaaaaactaataaggtggcttcaattttgtcgtatggtattacagtccatcttcaaacaatatctaaattacagtctattttttctagcatgaatcaaaagaaaatctagtgaggtcattattagtgtctgtaaaattctagtggaaaaaaacctgtagaaatctgtctttgaaagtctgttcccagagttcaagtggcaactgttttgtgacttgacaacatagttcatggcttttaaagatacatgacttgttctgcttaatgtggtttcctgataagccttgagagaattttttaaattatacttttagttatgcatacataattgccattcatctatgacataagtatgacatttggtatctactgcttttacagataggttaatgcagtgaactccttggtcattctttagccctttctgaagacaggaggtaacaataatatacttacctcttgttaaaagctccacatttgaccattttactcatttttataattccagtgtttgcttgcaaacaatcttcccttgtagtataaaggcattggagtgccctgagcagaggggaggggtagagctttcaggaaagcagtgatgaaactgatatccctggacaatatcagcatctcaagggaagcaacttttatcctcatccttgttcttgacttgaactccagtccttgtcctatatactagtgttgcccaatgagtggaatccagtactgtgacatttgaaaagattttaggtggtaccacaaacatttttaatgattatatgcttattttaacatatactaggaaagtatataactggttctgtacttttaaccagagaaataaacccatttctcaaaagttattgcttagaagcaacgaggaagtgaaagaaaagtgagtcctttaaactactcttaaagtactaggttaataatcgcagagatagaacccagctatggcaaaaccatgatggtagtgcatggatgactgagggcaaatgaacacaaccatcactgtggtcttcagtcaccttgagccctgcttttccaaagattgattccctatggtccttttcttcattttctgatagcctcttctcttcacatctcttttctgcccatgggagatttcacagcctggccctgtcctgtgggagccccactagtgtgagtctcagggggctggcatgtggctacactgtgcattgttcaatccttggaggcctttgtctattgaacttccttttttggttgaggtagttaaagacccttccaaagtttcccttacatgcaggtgcatcctatatttgtgagggctcttctcatcctttcttgttcacaccttcaaaggaggatgtttcagtgttgccagtggactaaaattgagtggaacaccttgtgctggacgtctggggcctgaaattatcttgggcagcttcaaaggttttcattatttaactaattatcatatgaacctgttgtttgaatgtgacactgtctttttcttttgccaatacacattctctctctgtctctctctctgtctctctctctctctctcacacgcacacacacaatacgcctcccttagtggtggctgtactactccagctgatccacttttccattctatcgaaatccactgtgtactgtgcacattcattattcagcatcaggtgtaatctagtgaattataggggaaaaggatttggaaccagactgaatatataaaagcctacagaatcacttgtgttcatttatgcaaaaaggaaaaaagagaaaagccacagtagtttatgaaactgaattgtccagtagctacagaatggctagatctaaggaggcctcaggcagtaccatttggcctttacctctttctgtgtgtcttctgcattcaactttgcttttctgtcagttagttctattctcaggcaggttccttgtacagtaaacaagaaagccaccagtagatcttagcttacatctcatcagcttaccatccccagaggaaagacaacccctgtttccagtgcttcctccaacagtctcagcatttcaccagtttgagtcaagtatccagcttcttaccagtccctgcaagccctacagcccagaggtggggcctacttactgaatgagcctgagtcatgcatcctcgtgaagccgagggtgggatccatcccctactaaatcaaacggacccacagtaggagaaagggtgtattagtcagagctctccagagaaatagaaccaataggagaagtgtgtgtgtgtatgcatgcgcgtgtgtgtgtgtttgtataaagctacatgtataaagctacagagagagagagatttactataagatattaggttattgctcacacaattatggagtctgagaaatcacatgatctggcatctacaagctgtagagccagaaaagctggtgtctgtctggaaattcgaaaagcctaagaattggagcactgagggcagtaaaagatcaaggttccagctctgtcctctgcctttttattctgttcaggcactcagtagtttggatgatgcatacccacattggagagggctatctgctttactcagcctgccaactcattgctaatctcttgcagaaacacccttacagacacacgcagaagtaatgtttaaccagctatctgggcatcccttggcccagtcaattttatgtatcacttaaaattaacccaaacagagagagcctctaagacacttgagatgctattttaaaaagaggagaggtaggtgctgggcaggagaaaatatcagatccaggtgagggccttacacattggacatggccagaagtggaggccattgtttatgatgaagattatattagatgtgccacactgacaagccctttccccagcatgtcaatgggcctgtggcatttattccctgcaaactgtaataaacatgacgtcatctatcacactcccgtactctgtaggaaaatgaatattctgagcattagtcagacatgttgaaagaagtgcccaataattccttaatatccaaaatgctttcagcagctccccttactagtcagaatatcaaatcataggagctgtatcaatcttattgagactaaattgagttaactaagaatatggccttttgagaaaagctcaaaacagcagaattgtagaataaatggctgatttatttgctctttttttccttcttcgggagtcctggtgtaaccactacacttctccgtggagaagcgcactggctaaggagccaagaaagctgtaccatttacaacttaggccacttaattcacttcactcagcctcagttaccttatctgtaaaatggcaatgatgatatttgtcatattgaaaatgtgatgaaataataaaagtaaaacaactaggaaaatagctggggattaaagcaatgcttaatatgctggtttttctctcagcaaagggactttcattataaatttagagttttgataaatgtatattaatctgtttcatagaatctaaagtttcatgtttgggtaaaatttggactgaggtaatatatattgtgtactcaataacaatttgagcttaacactatgagactgtatttattcaagtaacagactaaaagaatttaaattctggtatctctgagcatgacatgcagggacatgcaaaataagaggcattcctctggcttagggaaagacatgtatgttggggccacataagaaacttatatcagtaaaataatattcaaaaatttctgcaaatgcactcctagtgcatttcctaaatgaaagctattcaccagcaacacattctgctttgcgtccttaaaatgaagataaaaacaaaactcattctaaggaaattttctttctaatcaacttaactgaaatgcagcttttttctttttctttgtttgtttatttgtttttcttctatgcaactcttttaaaaaagtaaactttcctacagcttttccgtataccccagtgactacttggaatcacttttaggttttgtgttcaaacaaagattaacaaatgtgtagtaagtctaccaaatgatacccagctttctatcggcaccattttcatgttttctcattgtactttgccacaatacaatgagggagatgttattctctcattttgcaatcaaagaaactgaggctctggagaagttatatgatgtgcctaaagccacacaatcagtaatccataaagccaggattatcaagtcctgttttctaaatccagggctcttttcgcagggtattagtaacatattctaaactaaaatattttattttgcacatttaatagcaccttacttcaagatttatacaagctacaagctgaacaaattgatttgcaggttatttttagaaatcatttcacccatcactgagaggagccttcacagagcttttcgaaagcatacaaaaatattgcctggcagtttaatgaaatggtaaaagaagagagataaattactggaaagtacagagtgtttatgcataaacactagaagacacacatggggcaaagggatgactccccactgaactgccttgtctgaattaacatttaagtaacgcaagcacctttgtcattgcctggatcctgaggggtcacagcacctgactggagcatttgtcacccaaattatagggttcaaatccaatcctaatgacttggggtgctaatcaagacagctgaaagtagtaactggtaggaatctgatttggactcaaggaggaatgcaaaggtcaaagccagagagcaagtaagtaccaaagtcaagtgtaaaggtaaaaccccaaacaggaaagtggtcctatgatcccaaagttggaagctcaagaagaagttgagaaacacggcgtggaacacattggtacaatgtttcagaatgaggaatgtgaacggtgtgaggaagtcaggaaacattttccgtcatagctatggcctgatatgtgggaccacccaaatggacaaaggaatttgtctgtttgctccctaattgatttcaccttcgagtctatcacacgaattcctacagagtttcataatggctcataaactttaagtaacttgaggactatgtacacaaggggtgagtaacatgccattttatacattacataccccaaacacagtgaacttgttccgttttgttttttgatttttattttaggttcggggaacatgtgcagatttgttagatacataaattgtgtgtcatgggtttggtgtacagattatgttgtcacccaggtaataagcatagtacccaataggtagctttttgatcctcaccctcctctcattctccacccttaagtaggccctggtgtttattgttcccttctttgtgtctatgtgtactcaatgtttagcttgaacttataagtgagaacatgtggtatttggttttctgttcccgtgttcacataggattatggtctccagctccatctatgttgctgcaaaggacattatctcattcttttttatggctgcatggtattccatggtgtacatgtatcacattttctttagccagcctactgttgaagggcatttaggtttattccatgtctttgctgttgtgaatagtgttgcaatgaacatacacatgtgtattagttcatgctcatgctgccaataaagacatacccaaggctgggtaatttataaagaaaggaggtttaattgactcacagttcagcatggctggggaggccttggaaaacttataatcatggtggaagaggaagcaaacatgtccttcttcacatgacggcaggaaggagaagtgctgagcaaagggaagaaagccccttataaaaccattagatcttgtgagaactcactatcatgagaacagcatgaaggtaaccgccccatgattaaattacctcccatgggctccctcccgcaagacgtggagattatggaaactacaactcaagatgagatttgggtggggacataggcaaaccatatcaatgtacatgtgtctttatggtagaatgatttatattactttaggtatatagccagtattggaattgctgggtcaaatgttacttctgttttaagttctttgaaaaatcacttcactgctttccacagtggctgaactaattaacatttccaccaacagtgtctaagcattcccttcactctgcaacctcaccagcatgttattttttactttttataatagccattatgactggcttgagatggtatcccactgtggttttgatttgcatttctctaatgattaatgatgttgagcattttttcatatgcttcttggccatgtgtatgtcttcttttgaaaagtgtctgttcatgtcctttgcccactttttaatagggttgttttttgcttgttaatttaagttccttatagattctggatattatacctttgttgaatgcttagtttgtgaatatttttcccattatgtaggttgtctgtttactctgttgatagtgtgttttgctgtgcagaaactctttagtttaattaggtccaatttgtccatttttgtttttgttgcatttgtttttggcatcttcatcatgaaatgtttgccaagtccaatgtccagacagtatttcctagattatcttccagagtttttatagtttttggttttacatttgtctttaattcatctttagttgatttttgtgtatggagtaaggaagggacccagtttcagtcttctgcatatggctaaccagttatccaagcaccattttttgaatagggagtcttttcccccattgcttgttttttgttgactttgttgaatatcagatggtttgggggtggctttatttctgggttctctattgtgttccataggtctatgtgtccatagatctatgtgtttttgtatcagtaccattctgtgttggttactgtagccttgtagtatagtttgaagttagataacatgatgcctccagctttgttctttttacttaggattgccttggctatttgagctcctttttggttccatataatttttaagatagctttttctaattctgtgaagaatgtcattggtaatttgataagaatagcattaaatctgtaaattgctttgggcagtatggccatttcaacaatattgattcttccaatcaatgagcatggaatgtttttccatttgtttgtgtcatctatgatttctttgagcaatgttttgtaattctcattgtagagatctttcacctctctggttagctgtgttcctaggtattttcttctctttgtggctattatgaatgggattgtgttgttgatttggctctcagcttagacattgttggtgtttagaaatgctggtgatttttagcatgctccagtggcgcagtcagttagcatgcagtacttatacagaaatgctagtgatttttgtacattaatttttatcctgaaactttgctggagttatttatcagatataggaacttttggagagagggtgttgttttccaggtgtagaattatatcatctgcaaacaaagatagtttgagttcctgtcttcctatttggatgccttttatttctttctcttgcctgcttgctctggctaggaatattagtaccatgttgaacaggagtggtaagagtaggcatccttctcctcaaaacatagtgaatttgttaacccaaccaagaaccagatatgaactcacctctgcaatgctgccatcttgtcatctgggttgcgttttccaggtttcttatatacctactttcttcacaatttgtctttcgtaatgaaagacccaaattccagatatcaacaagtctagatgaaactcactaccctgaaacccttaaaatgttcaagggtcacctttgcctgtcagatagactggggtttccccttccttagttatttggtgctgttatgctcacttgtagtgtgggtctttaaggtactgctctccccagccacatgtcctgaatgcttcaggaaaagcactccatctctctttgatcatcacggaaactagttttgatcatgttgatcaaaaagagcatcatcaagagtcctgaatggaagtttgctttaaggatgttaccctagttctagaagaagaacttccttgaagaggaaagaggatgtccttcagtgcagcagcctgatttccaatgggggaagggattcttgcctcttttagaacaaaccacatcgtccaaggaggactgtctgtctctttcccaggcctcagaaatttgaatgaaatgtcacaaaacagtaaaaaaaagttggagcttattggccctgcaggggcatcctgaaaagattgcccatcagttcctgctgcctggtcccctagagcaccctgtgtctactgtttttaaacccaattcttgattttctttcaatccagtgagttccccattccttacaataaattgccctttccaaattaagcaggaagtttcttttgcttgtaaccatagtattccaagggctactccccaggaggggagatggtgaaaagccagacacagggaggaactgccaggaagtaagagaaacaaaaagaggtgtggagcccctgggcccaggaccggtaaccatgaaatcaccaacagcttttttaagtgtttcctccccgcctcaaaaaaataatgtttttaaatgctcccatctcagcacaagaaagctgttctagctatataaaatttcagttctgcttatgcttagctagattttcatcacgtggtatagcggtccttgctaattcagaagctctggttgaaagcctccatttaaaataagtgggaaaatgaactaaatattgttgtgttagtgaggtttggttgaacacacatttcatgaaaaaataaatttatgtttcttggaaactgaaaaaaaaaaaaaagttcagagcacaatttccaggcaggacactgaatgtgaaatgaagatcacctgatcacaatggctaggtgtggtcagaccaaatgcccatcaccttttctggactcttccatttccataaagacaatgagctcctccatctttcaagataccgctcaacatccatgtaatctcccagaaacctatgctgaggcaatagttcctttccctttgcttcagtagcactctaggagcaaagacctgtgtttcctgctatcagttttataattgttcaggttcatccttctgtcccactaaactgcatcttgcctgtgggggatttgctttcagagttttacctcgccgcacttacagcgtctagcatacagtaagtgttcaatagttaatgtactgtcctttcaaaggatttcatagtaaacctttccctcctctccctttggcaaatgccctgcactgaaattttgcatcagcattatgctaggaatgaaatttgtgtagctgatttttcacggtgggtccctagctttactgcactcataatgtgtattttttactctaaaccttttttgaaacagctgctttcagttttgttttgttttttaatccatctcactctgagacagtacagctaatcaatacatgaagtaaaaagaatggaaaatggatgtaagtcatgacttttctggggtttccctttggccctaccttcaaaaattttccacctcttccataacttgcttagaataaagacaaattagttttcatgatgaatgtattttaatatcaactaaatacatctgtttaatcccaaattaaagatgccatgatatttcctatggatatttcttacagtacgtttgtgtatttagaggtcacctctacttaacgctgtgtttctcctgctccctgtattattgctgtgtcacactatataatgtagtggttatactttgccatggaaacaggcctttcctcagggttttctgcataccatggccacagagattgagatgttccacttctgtggtttggtgttgaagtttttcccctttactattttagttaaaatttacagaaggggaaaagagctctgaaggtgagggttgctattgctggcatctttattcctgctactatccattagcaatttaatttaaggtaatgtttctcccggttgggcttacagaagggcccaggttgtattctcagttattgtacttctgtatgcaaccgtctactatcagcaccaaaacaaacattcaatgtcatttcacgtgtgctgccttagacattgagactcttactcctggcccagggaacatttgtggatgttcatcactgcaggtgagcattgttatagttagaatcttagctctggaaaaaatgttcacataaagcacatccatgatgcaagataatgagtttcagaggctctctaggtcccagttcccattaacccatggcagagagaactgcataagaaatgtcaacgtaaaatcaagctagcaaatttggacagaagaaaggacgatcaatcaccctggcagaacccatcaatcagttcctatttctgttacatgaaggagttgtttctgcaaactagtgtttgttacacctctctcaaatattctgcgaacataatatactgcttcttagataaaggttaattgaatgagtctctagagaatgaaagcaaatgattttgccactcactaatctatagatcctcaatatgtctctgaaatgctcatgttaactaagaacaaagatgacagccaagcctgctaatgttctactagtgggctctattattgcccactgctttatttttatggattgtgctgcataaagaatgtttttcctccaaaaccttttttagctgagcagtatgaaccaggggcaaagaagatggagacatggaaatcccagggagacccagttcctccacaggaccgtgggtggtttgctttctgcactgcccccacacctcaactgggttaggctagggattacagcagggaacaaaagagacaatgttccctgcccttgtggagattacattctggaagagggagccatagtataaacaaaataagtaaatgagataggatgttagtagatgagaagggctatggaaaagcatgaaggagagaaaagagatagggagttctgcggtgcagagaggttgcaattttaaataaggtggaccggagaaagccttcctgagaaaggtgatatttgagcaaagacttgaaggaagggagggagataacagagatctatgtggatagctagtgtaaacagcattgcagagagaataatggatacctttctctccagctggagagacataagcaaggcaggtgaggtcagagaggtaagattggaagcaggtagttgtagatctggagtctctctataagggcattgacttctgctctgagatagggggccatttggaaggctttcagtggaggagaaatatattctgacaacattttgtgcagggtcactctggctgctgtgttgagaacaagctgggatgaaggcagacagggcagggagaccaataagccagaggctattgcacttatcgggcaggtggtaatagtagaggcctccagaagtggtcagattctgagtgcattgtgacacacacacacacacacacacacacacacacacaactctggtatatattttgagtttaaagtcagcataaatgtctgatcatttcttgattagaaagaaataactgtcactagttgtgaacttctcaacattgtgaaattgagttttcaaatgtttggaagccatgaatctttgccttaaaataagtaaatctgagtcatgggaaagactgtagaggtaagggaccccaaaatgaaatatatactttcataaagttagctatgaatatatatatatatatgttatagaactatctgcatttctcataatgtttaagaaagtggcgttaaagcattattgttaacagccattttaatgagcgaaagttgtacaaagaaactcggattttcagctgaaccttgtcaacagtagagaaggagctgtggcagacccaaacctccctgtggtctgcttccttcattttcatccctgacctcagcctttgggcagtgggtttgcctggctgtggtcatctgagccacactcttctctctgtgtgccctgatactttctgcatccatgcctttgcgtagactgtgagttctacctgaagtgcccagttctcctccactgctatcatccttcagaactcagctgaagggacacctcttctgttagggttggatgcttctcctattggttccactacacacagggacctcggcctactttcagtacttctcagtgttaatagagttctgtattgtctttccctgtagactgtgaattctttgtagccccagtgctggaataatattgtctggcacacagtaagtacttagtatgtgctgccaaattcatgtttagttggaagagcccataatagctaattactttatgttagatgcatttgcaatgaccagttaaggttcctttctgtggtaataagaatggcaaccatttatgtggttagggttctccagagaaacagaaccaatagaatacatacacacatagacacagacacacacacacacacacacacacacacacacacacacacacacagtatatgtgaggagatttgttgtgggaattagctattgtgattgtggaagctgagagatcccagttttgccatctgcaagatggagaacgaagaaagccagtggtgtgattcattccagatctgaaggcccaagaaccaggagcatcaatgaccaatggcaggagaagacaaatgtctcagtttaagcagaaagagcaaatttgtgcttcctctacctttttattccatttgggccctcaatagattgcacaatgccccccgacattggtgggggtgatctttactcagtctactgagtcaaatgctaatcccttccaaaaaccccttcacagacacacccagaaatgttttaccagctatctgggcatcccttagcccaatcaagttgacacagaaacttaaccatcatgatttattatgattgtccagcctccccagtactgtgtaagacacatggcaaatatctcattcaggcctccaacaacctctaaggaaggtgtgttttatccctattttataggtaggaaactaaggtgcagaagagcaaggaagtaatagaaataaacctttatgcatccttagagataaccaatattgataatgtaataaacctaaagacactattgccctttggtatgtataggtaagtattctgtaaactgtaacttgtaaaaacctgccacaagctggcctataataatgcaaactcggataacagggtgggtgactgcctcaatcccctgccaggtcccttttctcaatggaaaagtcgatgttctcatcttgagggtatcagggcaggattagaacctgaacatctggtcatcatttgcaactccatcagctcagcattcagtcagttgtataagttttactttcttcacttgcgtgtcttttgtgacagcacagactgactgaaatatattatttttcattaacctcctattcacaactccacattttacacaattgatttttttatcccacctagcatgttatcaattctgtgaacaatgagaaggtatttagaagaaacccattattgtctctcagataggcagtctcttcattccagacattttgtagaggagctttgagtgaaatcttaacataactaaaaatgccagcatgtatgaactatttagcagattcacctaatttctgttagttgaaaaggcaaaggctctgtatttattaattatagggagatcttcagatgtcttctcaacatgctatggtaaatgcttctgattttctttggatgaacagtaaaattcaagaaacgaagacaagaaatagaacctgcaatgttttttaaatagaaaaataaagggttacactagaccactaagttaaagagaaatcaaaaggctagtgctttatttggttgttttaatcatttcatgggtttgcccaggttggtaaggaggttttaaagtcttgaagtctacagatgcatgccagtgagatgcaacttcctgcaggttaggcagctgcagaatgaggtgcaaagcttcttaccagatatagatgtaggagaaggttctgtgtgctacacaaactagattgttgggtggtgtagtggaaagaacacagaatttagagtcagaataacaaaggaaagcagccatggagggcttccgttattaagcacctgctctgcgctaggcttgccacccacatcttctcatttaatcttcataacagtcctgggagtcagttattagcctgagtgatgggatgaggaaagagactcaaaggggttgagtcatctgcttaagctagatctgcgaagctactgcgacagagataagatttaagaccaggattgtctggttgaagccctctgttccttccatggcgtctgatgcctggaacctggctctgtcattggtcattgttttgtgtgcttgtgtgtgtgtgtttatattttatatgcttatgtttgcttatatatgtttgtatatgtatttgcttatattaatatagtatataataaatgtatatgtttatatagaatatttatactatatacaaatctataatatataatagatatcacataatatagaatgtgtgttatgtgtaatgtataccactttgtatattgtatacaatatttagatatgtaaatgtatttgtatagtttttaaaatatgatgcagaatgtttatttgattttaaattgccaaaattcatgagaattgaaggttttattcagtttaatttgaattttctaatgaaaaactttttaactttaaggtcaggggtacacatgcacgtttgttatacaggaaaccttgtgtcatgggggtttgttgtgcagattatttcatcacccaggtattaaacctggtacctattagttatttttcctaatactctacctccttctgccctccaccgtctgatagaccccactgtgtgttgttcccctccctgtgtccatgtgttctcatcatttagtttcctacttgtaagtgagaacatgtggtatttggttttctgtccctgtgttagtttgctgaggctaatggcctctagctccatccatgtccctgcaaaggacaagatctcattcttttttacgactgcagagtattccattgtgtatacgtactacattttctttatccagtctaccataggtgggtatttaggttgattccatgtctttgctattgtgaatagtgctgcagtgaacatacatgtgcatgtgtctttagaatagaagatttatattgctttgggtatatacccagtaatgggattgctagattgaatgatgtttctgtctttaggtctttgaggaatcaccacagtattttctacagtgggtgaactaatttacactcccaccaacagtgcttaagtgttcatttttccccataacctcactagtgtctgttattttttaactttttattaatagccattctgactggtgtgagatggtatctctttgaagaaaaacttttttattgttaaaaatgttaataaagaattctcttaggttaagaaattaactattaaataataaaatagtttctttccaaagccaaatctatccttcctaatatgcaactcaatagtggacaaaattgtatccgttttttatgtgacattttaactggaatgggattgccagatagtaaacatctccactaatcaagggtttatttatttatttgcttcccctagtctttatcttacttacctaatttttaatgaaaaactctttttaagaacttctcctaccatataagatacacatgtggaaaaaaagtgcctccattgtgggaaaaaaaatagaagatatagataaacaaggaaacaaaggcacacagtcagctgccgcagtgccaggacagagcccagctcttcagatttccaggtctatctgttaagattctggcaacggcatggggaggaaaatggcagataataggcaggactaaattgcacctcccactcagatggacagagcagcttgtggagactcacattgtgaacttgtgctccaagaactactgcaggaacataccaggaaagccaagagaatctacagaccctttgaaggaagcagattgctcctgcaggccccggtagacagccaaaaaactgtgagtgcctgaagtgtgaaagtgtgaaagggggatcatccacccctgaacacacaccatcactggggaacctgaaggtccagatcacaagagaagtatttgaccttacttggagctgagaaaattttagagagctgagcaaaatacaggggtagaagtagcagtgggaagagccctatgggctcttggtccccagggaagccatttcttagtttgtctcagagagtaagacaaagtaaagtactcttggggagtgctgccagaggaactggaaaagaccacaggaagaaggaaacttccagctgaactttgtaacaattttgaccaaacatgaagtttcctggacagaagtcaggggagggggtgaatagggagtgcagacacagcacgaagccacagcaggcggggaggcacaaaacctgaaaaccctgtttgctttctcagcctggggtaggtttccagccctgctcaccggctggctgaaaataaacttggtgcttttgtgggggcacggtaggagcgagactgattttggggattgtgtaggagctgggtgaggcctgtaactgccggctttcccccacttccctggcgaccttcatgacacagcagaggcagccataatccttctgggaaaataactccattagcctgagatccataccctcatcctctgcaacagcacagcaagccgcacccgaaaagagtctgagctcagacacacctaaccatgcttacacctgatggtctttctctgcctgccctggtagctgaagacaaaggacacaatctcttggcagctctagggccctgcccaccacctgatcctccctatactatggcagctgacactgtcttgaaattgccacctcctggcaggaggccaaccaatacaaaactagtgcaataaacaaaactacaactaaggaccctcacagagtccatttcactcccctgccacctccactggagcaggtgctggtatctaaagctgagacctgaagacagttcacatcacaggactctttgcagacacccccagtaccagcccagagcccagtagctccactgggtggctagatccagaagagaaataataatcactgcagttcagctctcaggaagtcccatccctaggggaagggagagagcactacctcaagggagcaccctgtgggacaaaagaatctgaagagcagcccttgagccccagatcttccctctgacatagtgtactcaaatagaaggaaccagaaaaacaatcctggtaatatgacaaaacaaggttctttaacactcccaaaagatcacactagctcaccagcagtggatgcaaaccaagaagaaatccctaaattgccagaaaaagaattcagaaggtcaatcattaagttaatcaaagaggcagcagagaaagatgaagtccaactcaatgaaattttgaaaaagatacaagataggaagggaaaaatcttcagtgaaatagatagcattaaaaatcataacttctggaaaggaaggacacacttagagaaatgcaaaatgcactggaaagtctcagcagtagagtcgaacaaactaagaacttcagaactcaaagacaaggttttcaaattaagccaattcaacaaagacaaagaaaaaagaattttttaaaaaaatgaacaaagcctccaagaagtttgggattatgttaaccaaacctaggaataattggtgttcctgaaggagaagagaaatctaaaagtttggaaaacatatttgaggggataatcaaggaaaacttccccggccttgctagagatttagacatctaaatacaagaagctcaaagaacacctgggaaattttatcacaaaaagatcacctaggcacattgtcatcaagttatctaaagtcaaaacttaagaaagaatcttaagagctgtgaggtgaaagcaccaggtaacctataaaagaaaacctatcagattaacaacagatttctcagcagaaaccctacaatctagaatagatcagggccctatcttcagccttcttagaacaattatcagccaagaattttgtatctagagaaactaagcttcataagtgaaggaaagatgcagtcttttttcagacaaatgctgagagagctcaccactaccaagccagcactataagaactgctaaaagaagctctaaatcttgaaacaaatccttgaaatacaccaaaatagaacctccttaaagcataaatctcacagaacctctaaaacaaaaatacaataaataaacaaataaacaacaagatattcaggcatcaaataacatgaatagaatagtacctcacatctcaatactagcattgagtgtaaatggcctaaatactccacttaaaagatacagaatggcagaatggataagaattccccaaccaagtatctgctgttttcaggaaactcacctaacacataagaactcacgtctgggcgcagtggctcatacctgtaatcccagcattttgggaggccaaagcaggtggatcacttgaggtcagaagttcgagaccagactgaccaacatagcgaaactgcatctgtactaaaaacacaaaaaattagctgggcatggtggtgcacacctgtaatcccagctattctggagggtgaggcaggagaatcacttgaacctgggaggcagaggttgcagtgaactgatatcgtgccactgcactccagcctgaaggacagagcaagactgtgtctcaaacacacacacacacacacacgcacacacacatacacacacaagaactcaccataaacttaaagtggtggaagatattccatgcaaatggacaccaaaagcaaacaggagtagctattcttacataagacaaaacaaactttaaagcaatagcagtgaaaaagaacaaagagggacattatataatgataaaaggacttgtccaacaggaaaatatcacaattctaaatatatatgcacctaacactgaagttcccaaatttataaaactgttactactagacctaagaaatgagatacatggcaacacaattaatattggaggacttcaatactcctctgacagaactagacaggtcttcaaggcaaaaggtcaacaaagaaacaatggatttaaactataccctggaacaaatgcacttaacagatatttacggaacattctacccaacaactgcagaatatacattctgttgaccagcacatggaacattctccaagatagaccatatgataggccataaaacaagtctcaataaatttaagaaaactgaagttttatcaagtactgtctcagacaacagtggaataaaattggaaatcaactccaaaagaagccctcaaaaccatgcaaatacatggaaattaaataacttgctcctgaatgatcattgggtcaacaatgaaatcaagatggatattaaaaaattctttgaactgaatgataatagtgacacaacctatcaaaacctctgggatacagcaaagacagtgctaaaaggaaaattcacagccttaaatgcctacatcaaaaagtctgaaagcacaaatagacaatgtaagttcacacctaaaggaactagagaaacaagagcaagccaaacccagaccccgcacaagaaaagaaataacagaaatcagagcagaactaaataaaattgaaacaaagaaaatacaaaagataaatgaaactaaaacctgattatttgaaaagataaataaaattgatagaccattagcaagattaacaaagaagagagaagacccaaataagctcaattagaaacaaaacaggagctattacaacggataccacagaaagacaaaagattattcaaggctactaggaatacctctacatgcataaactagaaaacctagaggagatggataaattcctggaaatatacaaccctcctagattaaaccaggaagaaatataaactctgaaccagaccaataacaaacagtgagaatgaaatggtaattttgaaattgccaataaaaaaagtccaggattcacagctgaattctatcagacattcaaagaactggtaccaatcctattgacactattccacaagatagagaaagagggaattcttcctaaatcattctgtgaagccggtatcaccctaataccaaagccaggaaaggacgtaacaaaaaaaagaaaattacagaccaatatccctgatgaatatagatgcaaaaatccttaacaaaatactagctaaccaaacccaaaagcatatcaaaaaaaaatccaccataatcaattgggtttcataccagggatgcagggatggtttaacatctgcaagtcaataaatgtgacacaccacataacagagttaaaaacaaaaatcatatgttcgtctcaatagatgcaggaaaagcatttgacaaaatccagcatctatttatgattaaaagcctcagcaaaatcggcatagaagggacgtatcttaagataataaaagccatctatgacaaacccacagccaacctaatactgaaagaggaaaagttgaaagcattcctgctaagaatcagaacaagacaaggatgcccactctaactacttctattcaacatggtgctgggagacctagccagagcaatcagataagagaaagaaataaagggcatccaaattggtaaagaggaagtcaaactgttgctgtttgccaatgatatgatcatatacctagagaaccctcaagactcctccaacaagctcctagacctgataaatgaattcagcagagtctcaggacacaaaattaaagaacacaaatgagtagttctgctatacaccaacagtgaccaagctgagaatcaaatcaagaactcaaccccttttgcaatagctgcaaaaaataataataataaaatactgaggaatatacctaaccaaggaggtaaaagacttctacaaggaaaactatgaaacactgctgaaagaaatcatagatgacacaaacaaataaacatgtcccatgctcatggatgagtagaatcaatattgtgaaaatgaccatgctgccaaaagcaatctacaaattcaacgcgatttccatccaaataccaccatcattcttcacatgtgatgtttggttttccaaacagtaaatgctgctgtttaggaaagctctttgaaacaaagatctaagtttctctttattatcaaacctccttgtaaatagtaaatgatcacagaattaaccccattctaatctgactttttaggctaattagtttgaggtcttggcactggtggctggattaacagttgttatcagggatatcagaaatgttccttagaaagccataaggttcatcgagcacagataaagcaggccttcctctaccacctggtaacctaggcagtgacagcaacttatgggacacatggaacaattatccttaccctgagacatacaagagtttgggccatgtctgcctcttcatcctaacctatatttatgggcctgggaatgttctagaggctggtagagctaggatcaaattctgactacatttatttgctatatgctcttggacaaataatgtaatctctctgtatctaaattcccccatctgtaaaatgggaataataatagcaatgaaataggattgtcataaggaataaataaaatagggcataaagtccctggcactttgtaatggtagccatcatagttattattatttgaggagcaaaatcatgcataggaaattatgagttcttttcacttcccaggttgatagactatgtggtttttgtagagttgatttttgtaagattacattaataataaatagctttaaatattttgttctatagttatatttggaagcttttgtcaatatcagcactgggaactaggatgtcaaaaaacttaataaggaataacccaggctagatgagataacatgtctccccatgaccttcattcttacttgtacttaccacctacagctacaattgaaaaggggtctcaagactgagatctgatgttcctgatggcttccattggtgccacaagagatgggaaggggtgtggaggctgtggacttgtgagacggaatgatatttcacagagtgctgaggattttactggggtatatatttcagagctctctaaatgcaggctattctctgaatgcctgtcttgaggcagacccatctaacacagaagataatcaccaaggaccaataattgtgggatgttctccaatgtgggggcactgtggtagacagaatgatggccccgaaagatgtccacatcctcatcattggaacctgtgaatattttatgttacatagcaaagggaattaagattgcagataaaattaaggttgctaatcagctgaccttgagatgggcagagcaccctgtattatccagatgggtctaatcatcacaagggtccttaaggcagaagaggagagtggagtgattctgtggaaaaaggtctcaacttgctgttgctggttttgaagatagaggacagaggccacaggccaagaaatgtgggtaacccctagaagctgggaaaggcaaggaaatggattttcccccagagcctgaaggcaagtatcagccctgcagagactttgcttttagctcagtgagatccatgtaagattctgacctacaggagtttaaagtaataagtttgtgtagtttaagtctctaagtttgtggttatttattgtggtagcaattttaaaaagctaatatctgcattgttgacattttggacagcacggttctgtgttttgtgagactacccagtgcattttagggccgttagtattgctgggttctgaccacttatgtgaatgccagcacttctccccataacccaccaccactccccacccaacccactcacacatttcctcctgcaccacaagggagctgtgttccactcctggttgagaacagtctccagagcaagggtgagcctctctttctctttttcttctcctggttttggagttcaaggactcagacctgaagacccaaattacatatgcttttccctcttattctcttcttctttcaagctatgaagaataactataccgtataagatataaatacaatttagccaaatacctgatcagatcttatcttcaaattaccaggccaagtgccgagggagcaagaatatttataaaaccttctgttctccaacagagacaggctgatgaaatatagcactcattcacttattcattcagtactatgtactgaatagtactatgtacttttatatacataacactatattaggggctatggtcacagaaaaatgaaaaagacctgatctctgcaccaaaggcacttcagtttaacaaagaagaaattcttgcaggaataactatcatatgagctagaatatggtggaggccatgaaagagaaggttcagggttgtgtatctgtgtgtgaagatatcgtaggatgcacaggagaggaaactattatttcaagctgacagaaacagaaaatgtcggaggcaggcggatactttgagcctgggaatttgagggctgcagtgagcaatgatggatggcgccactgcagagggagaccctgtctcaaaaaagaaaaatgtgtatttcaaacagtcaacagcatttgaactagaacttaaaggggaagtaggaattctacaggtagaggagaacaaagattgagcataggcatgcaggtacggaaatgttttgcgatttgaggaaattggtcccaatctactgcttatattctgtgaaggcagcagggaggagcactggagcatctgggctgtgcaatttcacccagctctggggttgaatcctgactctgttgcttactagcagtgtgatattgggaatgacttccatgctctgagcctcagtgttctcatctataagacaaagataagaagagcctggtgggatcgcaaaataaaatatattgggggatgtagagtagtggaagataaggagtaacagactgttggcaatgaacaactgagatcataatttacttcaaaagttgttgggtatctggtgtgtccacactagggcctgaggaggcaacaatgacttagaaagagcctccacatccaaggagcttccaatgtggccaaggagatagatgtgggaattaaaacattaaaaatacagtaagaaatgtacaggaatagaaagaaggtcaagatacaaaagggctgctgagatggcagtggatgagaaggaaaagtcccagaagtcttgctagaggaagaactatcagaactagcagcgggtttaagaataattttatagggtgacaagacagagaaaaacatttccaggcagagaggagcagcacggtattgttgataggctgcagacagcatggaacagctggaataccaagtgcaggctggggcaaggagtacttaaatataaggcttcacaggaggaagagatcattctgatgggcttctcatgccattccagggagctgaccctccagtctataggtcttggggccagtgcttcactggggaagaatggggcaatttagaaagctcccatggactgaagtagagaatgaatgggagagctccaagactagaggctagaagacctctaaggggctatgatggaagttcaagaacacttggtccagggagcaaacataggggtggaaagaaggaaggagctgaagcagtaattgggaggtagaactaccaggatgcaatgaccagtcagacctgggcaataagaatgaaagtgttcgggacaatatcaggcctctggttgggcaatggaatcattaaccaagataggaaatgtgggagaaaggatggacctgggtgggaaggtagaaaggataaatcacagtgcattcagtttcgaatactttttattttgagacacctgaagaaaatacaaggggaaataaccaggttgcagaaggcatggctttggcaagctctctgtcatgattttagcaacttctttctttcgttatgatccttaactcaaggttttattttctctttttatgtgataaatcattgaggttgtgtttttaaatgtccagaaaatcgagttacttctttttaataatggcatctagatttatgagtatcttagctgaaagaacagatcccagttatacaaatattaaaagtacctgatctttattaatttgtactgagtgttttgttttaaatatttcaagaaaagtaagaattattgtttgtgtagctctgataatgtacacataaatagcacttgtcatggtgggaacactgtgctttagaaaagataaaatgtcttagacaaagaacagagtcccacttaggaagcagtttaccatctgaaatcatgaaaggcaccaagtactataacctcagggaaaggacaagatgtcctgcattgaaaaaaacataatggttttagtagccctttagacaggggaaaaaaaagctgctagtcaagagaaagtgctattttgttaccagtacatgctgttcccatgagttattggaaataaagaaatatatactctctacactgctgggctttctaaactctgcactaaaaataccttatagttgcacaaacagacagaactagaaaattatttttattttcttgagatattaaagggagcttgcaccgatccttagtgtctatattccacagtttccctacacttctcccacattcaattgaggaaataaaaacaagatcctctctactttattttaaaataatgatttttttaaaacagtgtctcactttgtttcccaggctggagtgcagtggtgcaatcacaactcactgcagcctcaacctcccaggctcaggtgatccttccacctcagcctcttgagtagctgggactacaagtgcatgccaccatgcctggctaatttttgtatttttttgtggagatgaggtctccccatgttgcccacgctgatctcaactcctgggctcaagcgatcctcttgccttggcctctcaaagtgctgggattacagatgtgagccactgtgcctggccaataataaaaatgagtaagatgtatcattgaaatgctccaaaggagagcatcatattacttataaaatattttataaaagctaacctctgattatttgcataccatatgctctttacatatactaactcatatcattaccttcacttttaatgaatgagaacacgggccgggtgcagtggcatacccctgtaatcccagcactttggaaggccgaggtgggtgaggtgcttcagccaaggagttcaggaccacatggagtctgggcaacatggaaaaaccctgtgtctacatatatatatatgtgaatgcactatgtacatacacatacacacacacacaaattaaccaggcatggtggcgcgtaccagctacttgagggctgaggtgggcagatcacttgagctcaggaggtcaggctgcagtgagccatgatcatgccactgtactccagcctgggtgacagagcgaaaccctgtctcaaacaacaacaacaaataaggaaactgaaacctgtggggttaaatgattcacccgacgtctcttagctagtgtgttgcattacaggcaatacatatctacttttgcctgattctaaagcctgtttccatagagaattctaccaccaatgcatttcaattgaagtctattaggtttagatcaatcatgataaacttcctttctcacgatggcataaacacccacccagttacccaggccagaaacctgagcatcccagctgccagcccctcaccctcgcccccacatctgaagtgctagcagtcttcagttctgccttctcagcacctctcaaagtcatcagtttcttctcatctccactgccaccagtgagcgtaaaccgcctactttttccttggacaataacaacacttctaaacaatctcccatgcattcccctttatccagggccatgccttgcaaaactcacctcagatagatggtgtcattcccctgtctactgcttctcaccggctttcctcaagagcaggcggatcttactggtaagagtgagggcctgcagtatcaacagccacacagcaggcagccttgaaattctatgaggaagaggaggtatccttagaatcagcaaacctggtgttacaaggcgtatttgttttctagggctgccgaaacaaactaccacaaacgggcagtttagaaccacagaaatttattctgtcatagtcctgtaggctagaagtctgacatcaaggtattggcagagccatgctcactctgaaggctctagggacccttccttgcctcttcctagcttctgggagttgctggcaatccgtggcattccttggcttgcagctgtatcacccccagtctctgcctctatcatcatatggccttcatctctgtgtgtctgtcctctgtgtcaaatctctcttctcactctccttataaggacaccagtcattggatttaggcccacccagatccagtatgacctcatctcaacttcattacatcttcaaagactctgtgccaaataaggtcatattcacaggtactgtggattaggacttcaacatatcttttggggagacacaattcaacctgcttcaccagatttgcctgataactttgcactttcaaaccttggatttctcatttatacaacaggaatgctaatatccaattttcagggttactgtgaacatcagacttcatgtgtgtcatgtgttcctcacagcgcctgcctcacagataccatgctgtaaatggcagctgctttacagccagacttttttctttaaaaatttatttgtaagctaacttctattctaaatgcaccaatgaaacttaccatttaaagaaaccctgcatcaaagccgttgtgaaacaaagaaaaataatcttcctaatttatgttttgattctgactcctacatgctgagtgtctttatagcaggatatacagactatcacaaaacaaaccaaaatccaaactcagattttaggtttatccaagggtgttaatctatgcgtgatgtgacttcagactaagctggcagagaaactgattgaggaaacccatccatgttccctacacggtcatgaccatttcaaggcgaggcaccacagtgctcaggatggcaggtgcagctaagagcagctttgccatctcttttgctttcgtccatccacctgcttattagaaggagagacaggatattggaagggaaatcaattcctctttgcaaattcagatctgcaccctggtgccctgctgccatcaggcttgttactagcagcttcagtgtcttgcagttggtctcagcagccctgggattcctgtgatagcagcaaccatggtgccaggcatatgcatgcttagtttaatcagtgctattaggcaatgtttgggcagactccattacagagagtggcagacgcacttaatgagggagaaagcatcattgcagaaacaggagggcacagtaaagcagtttctcacactcaaaagctggagttgacccctgctctctgacagcctgaccccctgcaggacgtggacccagggcctttactgctgttctgatccattcccaggtccccaggagcctattctgttgacaagtcaggaggcatcttctgtcactaccgttcacagttgacagattgcggaagggggcaggctctgctggtggggggactgcaacagaaaagacctgtggctatgcattgtgctctctcccatgatctgtatagagactacccctgagctagggtttatttgaagcgatcggaaggcttctgctctagaactttgtgggaactgggacctcagcacaaagatcagcttcagggacacacagacatggactcttattcctctcatggcactcactagctgtgcagccttgagcaagtctcctgacctctctgagcctctttttcctaatctgtaaaatgtgggtagcagcccctcacttgcagggtgtcaggagaattaaagttctgtctttccctttcctattccaggaaatgagccagtatgttgggcagttagccatttacctattttgcaggtgataaatgcagagcgtatcttagctcagaaacctattttctttcacagttataaagatcaactgacgttttgtttagcatatgctatgtagcattcctgcattcattttatagggacagtatttggtattagtgatctaaaaccagttagacatggaatatacacataacacatacacacacgtgcacacacaaaacagctcatggggcagtgaatgaaaccaaggagcaattgtgagtatataacataaattttgataaaagatattcagaaaatgggcattaaatcaaattgagaggtggtaggggacagggtgctttttgaaaacaggtgttacttttcaaaagagaaggggaaagaacattccaggcacaggtaacaacatgcaccaagatgaggaggcctgcaatggaactccaggtttagggactacaagcatctcagtgtactctgcggaaaattaaagcacactccttcgtctctgtccaagggcttgtaaattagttgaggagatgtgtgcgtgccttggagggtaactaacaccgggcatggtgatcatttcaaactgacagaacagagataaatgtaagtaggagtaagagctgaaagcaacaagtatttgagtccacttgtgtgccaggaactaccctgtcctcctcagaacatgcggtccagtgttgcgctatccaatacacatggctactcagcccttgaaatgtgtctagtctgaattgaaatgtgttgtattaacacacactctggttttcagaaagctgatgctgaaaaaagtaaatatctcatatctcattactaattcttctattgattacatgttgaaacaataataatgtggctatattcgattatgttaaatatgtctttaaaattatttttacctgtttcttgttacttttataatgtggttactagaattttcacaatgacatgtgcagttcacattttatttctgttggacagcagttgtctagagatcaaaagatcttggccaggaatagcagagaaggacatggagcttgaacactactgtaaagaatgagtaaggctcaggtgcacataaaggtgaaggatttgccagaagaaagagaatatggtggaatgtgcaatgtctatttaggtggtctggatggagcaggtgaaaagctctcggatgtgttttgataaaacaacatattttcaggaatctacactcacataggttgataggcttcctgagggtcagtagacagacttgcccattattggcagcaacgatggaaaattacaacagagggatccctaatctgtcatttttgatggttttttgtcaagggctgcctttgagaaaaccaaaatcccaaccatgattaaagttttgaaaaaactcagaggattgattattcctgtcacaccctttatttggacttccttaacccaatgacttcttggaactgtaaatgtaaatgtgttcaaggaagatatgctccacattgatactctgcagcaagaaatattgagctgaattggtccaacattgtatttttcattcttgcttttaaaatacttagaagaaggatatccctggacgtgatgattttacaataaattctgacatttctttaaccatccaaaagatgataaagcaagaccctgcatggatatgatgctggggactttatctagtagtttatgcagagatgtcaatgatatttagggattcatactctacaacaacaatgtggttaaggactggtcattagaggtgtcggttaaataacaaatatgcaaaaatatgttaatatgggaatagataagtcatgggtgaattaacttgtatcggatgaggaagaatcacaaaaaaaaaaaaggtcatttaagtctaagtgctggtaatggcaagattttttaccgtgtttctcttaaccagcaagcccatagactcacacaggtgaagtttctcacaagagcaaaaagcaataaatcctatatgcaaggcctgtaagtatttcaaacactagctcttgtagcagcaacactagctggcaggctctggtgtactagccataccccactgggccagaattactggatgtccgagctcagacagacatgagttatgagccatttattagtatgttgccttaaaaaaattacaaaacctctccaagcctcagcttccttgtctgtaaaatggggtcataacactacctgtctcataaaagtttcatgagggttaaataagataacctataaagtgctttgcccagtgtccaaggtttgaaagctgggggtgttggttgtgctaaaagttctagaatacactttcctttcataagaggaaaaatggagtctccgaatcaggaagcagccttttcagaatgatttgctttcactccaaggcttctaaatcatccagttactaatacagtgctttccctgttactgcacaggaaagcacgagacatctgaagtagaattccctcaatctttctctttacttagctgctccctcacctgtccccctcctcaaaatgacagcagtccttcccaattttccctttcttgccctccctcctatattttgagaactttctcacttctgaagtatctggatggaaaacactttaaattatttccagagaaatgtctgttttcattggtgccctgaatcacaactgacctgtggtgcccgttaaaagaaggattaaagtacaagaataaatataaatgcactgagacataagagttaagttgtcacttagagcctcccgccccttcacccatacctgcttatatgaatgagtcacttctaaaaatagtgtcatccttaaaagaaatgttagagcagtcattactcagacagcagcttcctccacctgcttccctagggcaggaactgggatatgtagagacacaggcactgagctggtccggaagggacaacaggcagagaaatcctgtgcggcagaggaaaacgttcagacctgcatctttcatccgtttgctttctctttcttttgcatctgggagaattccagcttgtcaagtggccagtctatttgtattcaaaaaagtcttggtcccctcgtaagtctctccctgttcaccttaaaaatgagggtactgtccagtagttttaggctttgatggtaatagaggtcagcacctgagctcttgcccagctgctcttctgatggtattcatgagaaactctcaagcatgtttaaaatcctgacccttgtgggccctggatttcacttgtaccattccaagtgtgtctgtgcctcttcaggaaatcagctcacttaagagctcacttttcatcacagctctgccagttaacacagacccacctggtctgaaaatcaggcatgtcatcagtgttaaaaatacagtctgcagccctagtcgtcaggttaaatggcactaagggagttaatataagcactatgtaagttttacccatgattgttattagtattattataaaggataagcgtttgagttttaccttcacagccctgaattcagttcctagccttttcaccttaggaaggttagggacccagcagaaaacatgcagcacactcaaaaaaataattgaagagaatttaatgaaaggactatttccaaagacataagtaaatgtatttgttcctcagggctgccataacaaagtaccacaaactgaacggcttaaaacagaaatttattttcttacagttctgaagcctagaagcctgaaatcaaggtgctggaagggtgatgctacctctgaaacctgtaagggaatcaatccttcctcacctcttcttagcttctggtgttcaccaagagtcttgggcattccgtggcttacagctgcataattggaatctctgccttcattccctctgtgtgtctctctgtcttccaccaccatcttcttctaaggactcgactcatattggactaggacctccctaccccttatcttaactaattacatctgcaacaatcctgtttccaaataagattgcatcctaaagtactgggggttaggatttcagcatagcttttttgagaggacacaattcaacttgtaaacagtagagttccaggaaaccagcaagggtctacaaagcacttgtgtacgttcgttgcgtgaaggttcaagggagagagggaaactggaaccctctgatacctgtggctgtagaaacgggctgctggacagtggccttggggagagaaaccagcccttggccttttacatctagacagaagggagctaagaaaatcagtattccgagctctctctcctcccaacctctggtctcctgggtctcccactggtatctcccattgattgagtccaataggaagccccagggcaggatatcattgattcaacacctaaatgttggcctcctggagcatacagcagagtgaagagagtgaagatttgatatggaggggcaaacagagaacaattaacctaacctgttaacttatccgagtgtcagttttcctggctgtaaactggggataatagcagtgcctgcctcataggctttttaacttggtgctcaggacatagtaataataaatgttagctattgttttattatggttctgatcatcttcaaatgagccagcttccccaccactaccttatgaacttggcacaagtgaggggtacaggtatcatttttgtgaatggatacaaacacataaacaggcattagctattgttttattatggttctgatcatcttcaaatgagccagcttccccaccaccacttatcaacctggtaaatgtgaggggtagagatatcacctttgtgaatggatacaaatacgtaaataggcatttttcccaggaatgtgttctgatattttgagtcatcaacccaagtgaaagttctttaatacttgtgacctctacttgccagagggcagcttgggcaaaggctgaggtaatttccataatggaggtaggagcagtccagtgcctgatgtacattgtttgggggatgctatggtttgtggccttgggaactcacagtctagcaggacacagataactctcactacaagcaggaatcagggacattttaagactcataagaagttctccagcctgggcaacatagtgagacctcatctctacagaaatttttttttaattagctgggtgtggtggtgcaggcctgtagtcctagctactggggaggataaagtgggagaattgcttcagtccaggagtccaagtctgcagtgggctgggattgtgccactgcactccagtcctggatgacgccacaagacgctgtttcaaaaaaagaaagaaagaaagtaaaagactgagggttctgcagtgtgacatctgagaggattttgtggaaagagtagtgtttgagctgagccttgaaaaagcaggatttggggttatggagattagggataagggaaagcaacagcctaagcaaagtcaaaacaagtataactgttcaaagaatacacagggagggtgggaacgaggggagggagcgcattaggacaaatacctaatgcatgcggggcttaaaacctagatgacaggttgatgggtgcagcaaaccaccatggtacatgtctatgtaacaaacctgcacgttctgcatatgtatcccaaaagttaaggtaaaatgaataaaaaataaaaacatgaaaaaaagaatacacagagaactgtgagtagatctgagggtataaatcagattgtgggagaaggaataagacaacaaacaggatcatagaggaaataagatttaaaacaataatggtggacgatggagtgccaggttgagtttccacctaaagcgtagcactcaatacacgacagatgcaccactctccaggtcatagccgggcatctgtcatgttctgaatgtaaacggactcttcttcagtagttgtttaaaggttctcctaagattgagttgagattatagtctggagttgagaggcaattcttagaagccagagatgggggcagtaattcagccactgcagagggaagaaacccaaaaccaccagccaacaaactgtcgtcagacagaaggcaggtacccaggagcttctgaaggaccagagggagtgtcaccctagtgaatccctgaggaggtgggaggggagggatggcagacacaatggaaggggttcagctccacctggcaggtgagaggtaacggtggatgcggaacacagaagctggggatgggaagcaggaggcaaaagagaaactgacgcatttcaactaccacagttgcaaggaaggagaagagtaaagagaaggaggtgaagggaaactgtgtctccacatcagatttcaaaagaggaggaactgggaaggaaatgcagagagataagaacaaagaacacagaagcagcatgagtcttgtctgtggtgctctgaaggtgggggataaaaacataggaattttccaaataggagaagtgagaatctggaaaagagactaaagaaagtaaatacttgaggagaaggatttccatgagagtatttgggatcaagaaataataagagagttgaatgaataaagaaagacttgggatggaaagtgagacattagaataaagggttttagactggccaaacacaagagaaaataatactagagttttgaaggccaaaatgagtcacataggttgtagtggctgcaaatagaggataaagtcagactgatctaactgtaacagaattaaccacacatagcactccacatttcccaggtattagtttttagtatttccatcttcatttttttatattggttgtagccttgacaaccacaaagactttttattctgttcattgcagtgtcttacatagcaatttgacttcaataaaagctctctctatggaaatgatccattccctggtttagagagaaacacattctggttcacagtattgaatctgacagtctgaggtcttgcacaaataattctgaaagggcccacttgtcataattgcagacgaggctttagaaatccaaccgggagacagtgatttaggctctgcaggggcagttagaacaaatgactacctgtgatcatttttcagtatcaagtatggcacctttagattggaatgttaaacatgagattgtcaagccacggtgcccttctcccatacctgtggaagacatcaccagtcaatctcagcagcctctgccactgagtccagccagatatgaactcaaaattgctctcagcacagcactcaggcaacctccacccaccagttgtaagtggcaggggagttgaaacccattatccaccagccttcttgtggtttcttagaggaagtttatatgactgaattcacatcactagacaactccataaatctgtagtgaataaaatttttcaccaattagtgcactgataccttatttatccagcctcatcacagaataagaattataaataagtacattttacagataactgaaacctgttcacttcaagtgccatttctaatggaagactttccaaagagtcctcattacacccttccctgcttaggaaatagagaccattaggcataatttaacctttcttaatttggcctctcatttttgaacatattttttgctcttgtgaagatggtgtgaaagtcatctacctgccttcctatcaacgtctacgtctttagaatgcgaatggatcagcttgtggtagttttgttaccttctagttttctgtccaaggctatttaggctggatgaaatgccaccaaaaacctcgggttacaaagaatgttcaatcatgagctcacttctcacatactaccaaaacaacaggtggatgggctttgtgaagaattttcccctctggggtgatagatacttatttttccatacttctgaatttgagacagtgttacacagtgtaaggcctagaattataatttcaaggtgaatggactatttgggcattacctaaaaattgttttgttttgtctacattatctgtctacaagaaactaatatgagtcacaggtgataagtaggttacaggctgtatgcaatgagtatttgtaaggaaagtggcttttttgagcttggacctgagaaaatgagggcatgatcactcacatgcatgttgcagacatggtttattaggtcccttttgtttgtctccacagtgaacactgatgcttgcattgccgtgtgagtacggagagcctgtgccaggcatttaaatggccaaagggaataactctggactgggcaaagcagttggacatcattgcaatcatggaactaggattataagctgggttggagacaccgggggcaggttcaaagggtatacataggtaaatgaaaaaaaaggacagctactctcaaggaggtcacaaagaattaccagctggtgcaagattcccagacctgccggacaaatgttagaacaacatgttataccatcatttgccatgccccattcctttacctagaatgaaattcatggataatatatctaagggagagggaagatggaggagaacctccagattccacaatggagcaatcgaatgggcagagaagtggtgccactaaccagttgaggagaaaaccatgttctccaggtggtcaaaagtcatggtctctcacacaggagaaaaggctgtggtttaggaacccttagcttcctgggagcacacaggtgctgaagggcaaggcagccaggccaaatatcaggatcacactgaagccaaaggtccaagcaagacagagtacaaactcatgcttattcaagcagcaggacgaatgcatctcagaaacatgtggaagagcgggatatcaaaggctacattctatatgattccactacattctgtatgatttccatcctatatgaaagtcttgaaaaggcaacactgtaataaccaaaagtggatcaatggttgcttggggtcataggttggggattacaaagggccatggagaaacttctttgaagtgatggaaatgttctgtatcgtgagtgcggtggtggtggttacacgaccttgacatttgccagaactcatcaaattgtgcactaaacatgagtgactcgtatgtaaattttgccttaataaggcaatttttaaaagtcagacacatagtttggcatagatgtagaatcactcacaaaacaccttggctctgaggctgcaactttgagggccagcaggtgagactggatacagggtataagggagatttcagcatttcaagcatcagctgtcacattggaatgtttattccacaaacataccatgtacaactactatatgccaggcattgtgccagggcccaagtatacaaagatgatagatgaatgacaacgttaaagtcaggacttggaataaaagtctaaactcaactccaagctcaagattctactgatatttgatattttatatcaagcttgtcagcatagccatttgggtaacttcagtagatcaacttttcacctggaaagaaagctattggaatgaagactattgatcagcattggtaaatcatgaggatatgcattcacacacagggatatttatccttgatgagcactagcttatagttgcatccattcagcacacttcttgagcacctatcatgagtcaggcaccaaagaagacacatatgtgaatgagtccccaatctcaagaggattatgaagggaaaagacagtcttactactgtgatcatagtcaatgattgcacgtgattaagtgtcctaacagaacgtcaatgagctacagcacacaggagagtgtggacacacttctggccatgctgttgagaaagatttcaaagacaagtcttgtgtactttgttatctgagactggccctgagtgtaaaaggcctctgtcctcaagggaaacaggcttacaacttagctgtacatgtccaagtttggggggtgagcagtgaggcagcccgaggtgagccaagtttatgataagtcattttcaggtctgaagttggaacactgtgggtaaaccaaagccaagtaagatgccctatgggaagggttgccttttccttggcagatattgaaacaggatggaagagaaggttgaaacaggatggaagagaaggtttgtctcatcgttctgctcacataatcacagtgcctggcacatagcaggggcttcacgaatattggttaaatgaactgaatggatgaatgatcattgaatctggtgagataaactacaaagaggaaaagctgatttcatggatgctaattttgaataggcacgaggatctgaacaagggtgattgtattaaattcctattattaccagtataaattacaaccaaatttgtggcttaaaacaacacatattgattatgttaaaattctgggtgtcagaagcctaaaatcaagatgttggttggggtgtgtttctggaagctgcagaggagaatttatttgtctctttgcctcttcaatcttctagtgagattgagctgcattccttggtgtgcgtcccattcccccatcttcaaagtgcatcactccagcctctggtttcatggtcacacctcctttttctctaactccattgcctccctcttatgaggacccttgtgattacattgggccccaccagataatccagaataatttccccatctcaagatccttaacttaatcacatctgcaaagtcccttttgccatataaacaaacatattcacaggtttctggggttaggacaggacacagacatctttggagaccagtattcagcctaccatggtaatatcaaattctaaaatgttatcttcaccaaacaaaaagccaggagctagaggaagtaccctacctccaaaactgatgaaacatgagagtatagtagtcagtaacttctaatcacatgcagattaaatataaggtactaccaattagctttaacaataaagattcaaaaagatttgaaattcctctctatgcagaacacttagtataattttatggaacaaagtagtgtgggtatctcctgtaatcgagcaatttacttgtgaaataattcactcacagaggactgcccaaatggaagagaagaaccaagatttgcaggggaggaaacccgtgtggtcgatgaatgaaactaggaatgaaaactgagttataagagcgcagctgctgaagcctgcggcgcatgtcatagagaaacctgtaagaatcaggagcgggtagatgctgctaatgcaggcactgtcatgggtttgatgatcccaataatttttagggccctcaatcctaatcttagcttgaccctaaacctcctcatctgcaaaataaaggcattggttatattatctctagggtttctggcagcggtatgtttttgttttgccttttgacctaattttaaaaagtagtgaaagtttgcttcccatagactaacactatagggagaaaacggggaaaagagagaaagaaattgatgatggtgggcgtggggggttccccagcagcaaaccatatttccttgctgtctaatgtcatgtttttcccaggaggcctcactggctacaatgtgaagtgctgttaagaacatgggttcaaagttagactgcctgagtctcaatcctcattctattcaccatatgacctagggcgagttgtctaatttctctctgtttcatatatttgtacataaaataggaatgataacatcaccttcaccattgggttattatgagaattgaagtaggcaatatatgtaacatgcttaaaacaatgagtagtacctaataagtactattataagtattcgcatctttataattagatgtgattaatgctgacgtgctttccacttagggtgttgtagctttacttagagggcttcttgcataccataggataactgcagatgaggtaatcggggcttcagatctgtgctacctaatactattaggtctacatctgagcttgtttctgaaaaggtactaattttccagttttcaaattttataaggtggcacattatttatctgtgaggagtatagatgtcttatcaatacaagttgaccacttaactatgagatctcttcaaatgtaagctaaagacatacttctccacttcagaagcatttcaaccctgccaacagaagtgactttatagacagctatttgatgctggcatacacacacaaacacacacacacacacacacacacacactagaagctgatgtttacaatgcctgtgaattaatttttatttcggttgtgaatcctagttgctgtttgtttctgtatttttatttgtgtgtgtgtgtgtgcgcgtgccatgttttgttttctctgcagatggcctggctgtctgtgaaaaattgatccactccagaacattgctgttttaatgaggccaaggtcacagcttcaattcccatttggccagttagctttgctctctctccctttcatagccacaagctgctccctaatcatcacacccaagctgtttctctgggatgggaggctgatgggcgtgggagattatcagggctggttcacaactgcaggctaagcacatgatgggccagtggcccagcaaaatggtagctatggtcactcactgggttgttcttcttggtcttcgtgtgatccctacttaagtgtccccatgctgggtacctgcagaaatccattttgggctctgtttctcttacccagtggacaggatgatttcagcattcatcccctttactgccaacatagactcctgagacccaattagtaccattatgcttttgtcttctggaagtattacatctttggtttcttacattttcagctttcgagtctgttgccaaagaatctgccaataaaagcttacatttgttgagcatttaccaggtgccaagaccctctatatgaatgatctcctttcatcttcaaaatagcctacgaggtaaaaccccatattcctttttccctatgaggatcaaggtttagagcagtttgctgtgtatgttatgtcaccagttgtaccccgccagagttagaattcaaccccgcagtctgcttttagagcttttgctccttggccatgagacttgcctgtgagcatgacatgctgaatagaatagctagcaactggatgattactacaaattcatactgctctgaattcagacctaatttggagggatagctcctatattgtgtcattcttggagttagatccaagataaccacctggcaaactgtgctaattggacaagttctttctgtgccagtagttaaatcttatttctttccgctgtccatatttccttgttgaaccattgaaccacatgccactgggaataagtggacctaagaaatgtttgattgtaaagagaagcttgaacatgctagtactggtgaccaaatgaaacctatgtttgaggaagcctttgatccagttgtactctctccaaatgtcagtgtatactagaccatatttttggcagtgattttcaaattctgaaagaaaatccacattgaggtctaaacatagtattctcaccaaccccctacccccacccctatcatgaacatatggttctagtgccttaaaaagcagtatggtataacattagtgctttctttttaaaagtgcactagtattttctatctttctttcaattttgtaatacccaacatatttttgtgtgtaacgattcaagctacagatcaacatatattatctggaaaaaaaaaagttgaatacttcccgtcaattatcatgaaagtaaattcaaagagcctactccgtcatctcaagggtacaaagttttgtgtaccctgattatcaaagctatttagctatagttccaaacctctgaacacttgcagtttttacaagttggctaatatctgacactgatttgtttttagtttttaaattggtctgactgatccttgaccttggaacttttctagatgatgtccacttttcccatcacccatgttttccaaagaattactgggttttttgttttttttttttttttttggtttttaatcaaacatgacaaaattcactaagccctctcattttggaataaatatctttaggccaagacagtttgagtgaaatcagctttattaaataactttgagtcatttccttccctattctagctttctggatctgccaacacacgtgggtggtctgtgtgaaactgcatacagattcagtctgtgaaactgaatacagattgacccttttatagaatgttttaaaaacataaaacccaataaccaaccctaacctcttaatcttaaaagtgtcctctttaattagatgttcctccttgtcagtaaatcagtgtttacctcggttcctcctgcccagtagaattaaataatgcttatcctattccaactaattcccatttaaaaatagtctcctattctgggctttctttctacaggtgaattttattttcttcacttctgcttaagtgacctggtttagttgccttgttacctagctttctattatgttggtgtaggttctagttttagccaaattgattctttttcttacctcaactttttctcttgtgttttgaaagtatctccataagtgccatccaactcctttgggtgcttagatttcaggggatttaggggttttttaactcagtttcctcactgaatctcctgctacctctctgaattcatttaatctgactttttgaactgtattattcttatttggcagatttcccttttttattagaatcagacagatgtggcagtaccactgattaattggacggcctttgaacatgttgtttaaccttgctgcacctctattccccatgtggctaatgaagataataatatctaccttaatgggttgttagtctattgcgtaaactaatgattgcccactgcctactatagtttatgccactttagttaatgttagcaccatttttatttatgagaactagtgaataaggctgtcttggcttggctagttggctcttcatcttatcttttatctttctttcttgccttccatacatgttccctgtcactaccaccaataggaagaggaaggaagttcaaactcaggattcacaatcgttattggaatattcactataaaatagatattgtccaactcaagtgagataccctataaccttgtttattgcaggccttctctttgtgctgcttgtgaaatcaagtattttttcatctactaatagaagttaatgatttatatagaggtgagaacctatgttcacttaagggattggcattaacaattgaaatataaatggtatctaatggattaactgggtactcatcctttcctactggtaatacatcttgtttgttttcccctttcatctaaatccagaaatgttcttctcttgtatctgtatatgtacatgttgtcctgcccttaaattgccattaatgtcccatttctgcatcccctccatggcattgctaagccagtagccatgttctgggcaatgcttgctgctgtaccttgtgtcagggacacctgccacatgaaaacatagccatggatgtccacatgtttctcatctttcccagtgcttcttacttcttcagttttagagacctgtttgtagtcttgtcctctttggccaaaatttccagtgaagaagacataggaaaccctaatacagaccatctctaagttctctgagatttagaaaaaaggggtggctttgaagagttgtaacagctaaatatttctgtgaacacctttaataaatgcttagtttctatgggggatacatagatgtctgagactccttgtcaaggaagagttcacaacctagtagggaaacagaaataaaaatacattgataatcaaagaaggctatgaaccctcctacagtacagggagactctgtgtgtgtgtgtgtgtgtgtgtgtgtgtgtgtgtgtgtgtgcgcgcgtgtgtgtgtgtgtggaaagagagagagaaaggaaattaattttatctgggaaaatcttggaatgattcatgaaaatggtgagagttaaagaatggatggaaatttggcagacttctacaggggaatgggccacagatagtattccagttaagtaatgtaactaaagaattgataactcctttccctccatgtgtgtgagtgtatgtgcatgtgtacatatatgtgttttgggatgagggaaggaattgcagtgggaaatacatacctgggaaaattggttgcagccatatttttaaggctgtaaaagccacgaaaacttattttcactctaaacatgccaaggaagtaatattgtgggaagagggagagagagagaatagagagactctgtttatatcttattcctatctgcctaagcacacccttgaaagaggaaaggttgttattatccatcaaaatctttctggtgaatcagtatgtctgtcaatctattcccacccaatttgaggcctgcacacagatccgtcccttacagcaatgacctttctttaaaaggcaaacctggcctgacagcactgatattttgaattcagcattcagagctttagagaaatttctctctgaaggagagaaagtgtgtcagccctgaagtgacagccccctgcatgctgctgaggaggataccagtttttgtgataatttgtggcaagggcaatttcagggaacggaaatgatctgttgggtaaaagcacaatttctcttcagattttcttcgaggggagtctacaaacaagcaagaaactgaaatggcttatattttagtttgtgaggaaaagaagcatctaagaagatttataggcaccagaacatactgatatgactattagttacacaaagtggccagaattccttgcattctgattagctgtgtgcctagagtaagttgctttgaagcagtgattgtacagctgtacatcatttccatggtgatttgatgtgcattgtcccatttaatcttcctagcatccatagaaaggatgatcacaaagctatcagtggagaagctgtagccagaaaggccaatgcctttcccaagatcacacaggtaggaagacgcagaaacaagacactgattgaatcatctgacccaggtccagtgccctgtgcatttcaaagtcacttctctagggatccttttcttcttctttaaaaatagaggactggacaagaataactgctttagaaattgtttgcagactagaaaagtttgtagttgtgattcatagtcaaacatcagtgcaaagtcttctttcttgcagaatcaatataagaagcccaagattgcggtgtggggtgtatccagagccatggggtgcttgggccgctgggatgtcctccactgtccccacccccatgccgctctgtacttggcctgagaactgtcaccggaactcacctggaaagtgctcacccatcccacccctatcctaagccccatctcttccacacccttcattgccactatgtttttaaaacacattttttttgccacaatgtttaaaaaccacaccatgtttatgtgaagaatttactacaacatatgaaatatgtccctatttttctcttacagccataaactcacaaactaaactatgcaaaatcatagccccgaatattagttgtaactatgcagcatactatatgcagagcaaataaattttaagtctaaaatgataataataattttacaatcatgaaccaccaatacaagatattcctaaaatggcagaaattccagatagcttggtctttacaaatgaatgcgaatatagattatattcatactggagctaaggtaatctctaggagctggtgtattacaatgtccaagcattttttatgtccttagtaacttgcccctctgtccatacctttgcagtgtggagcttgaatacttaaaccattcttttcaccagtggacatgaggagcatctaaaaaaagctatacaaaatagaaagaacagagtgtttttttctcacctttaagcactgtatatttctgattctccttgtatagtttcatgcctgttcaaatttagcctgaaaattccaatttatgcttaatgcatgaaaaagaccctattccagtaaatgcacttttagatttcagaaatcacagaatgagaatactaatatagtcattcacctagaaaatttttaatgcaaaaagtagcattaataataacaaatattttatataaagaatttattttctgatatttacaagtattcattaggcaaaacatgaaaaatgtcatgtttttaaaaaaaaacatgaacttgttgtttcaagcatattgcttacataaaaatatagagaaaatatacataagccaaggtcaagcgaggaaaacagtgaggactgtaatttaaatttaaacaggctagaattggagatagagggcagcacgataaattagagcacagaccttgaatctagactgcctgagttcaaatctcagcttgttcacttacaatcatacgcactgggcaagtgattgaatatttccctttctcacttccctcatttttcccatctgtaacatagggatgaaaacaaaactgatctcataggtttactataatgattcaatctatgtaaaaatacaaagaccctgccaggcactagtaaacaataaatgttaccttcaaaaattacaaacatatctacttaggctggatgttctcatccctcagaagccagtcttctacctgcattcacatgaattggactgtcctaataactttatttattggcttccagaagagagcagaaatcagcaattctagcatcacctctccccaccaccacacatgccattacttttattggcatttctaacactccaccttattctcaacatgtaaatcttttcctttcaatgggagatgctattactcactaagctataagttcacaactgagatgttgaggtgaacaggaatgtctttagttgtgaaatgtgtcagatgcagtttattattcacaatgactcaagtgcccaatttcatcaacttacttttacaaataagagaaatttcaaagtgatctcaataccttcagtcccactcagttgagttccaacaagcttcctcaagtaggaaggaagcaaagatgtaaaattctattgaatctgtggattaaacacatcacatgatgggtacatcgatgcacaagtgtcacacatgtcaatgtcaccctcatgttttgcagaaaaaaatttaaagttgacaactgctgtcctaagcaacaagttaatagagatatattacaagttctttgcagactggagaggcatacacagatgttcatagttattttgagtaaatatatgttacagagagaaagctcagacatgacaagtctgcctactccaaaggatggaagagagttcggggctgttatcctggacacagtgtctatggttataagcccttctccatcatctgacacgtctggattaggctcacttgctggcccatcaatagcaaacaccctgcatacagagaaatataccccaaaggatctatgctcaatttgctgccattttaggtacatttccatcaattattcagatttagtggtggtacccattaagtctggaatatcagggacttgtcaaaaaataagctaaatatactttatacaaacaagattaattttaaaaaacatgaaaacatctggcctgaataatgggtcctttgatctctgcagatagttcagtgggaaagagagattatacgtaatagttttatactatagataatgagtttagtaaaatgcaggtatgagtaagacaaatatttataatttttaaatgggtaacatttagataaaatattcatattaatagggtcctgacaacttacatttgatatgcaaaaagcatgcaaaatcagtagttactaaattaaaatttactggtttttatcactgaataaatccactgattttttataaggcagacgattgatgaattcattcagatatgttaaaaaaaaaaaaaaaaaaaaaagaatactggccaggcacggtggctcacgcctgtaatcccagcactttgggaagccaaggcgggcagatcacgaggtcaggagatcgagaccatcttggctaacacggtgaaaccccgtctctactaaaaatacaaaaaattagctgggcacagtggcgggcgcctgtagtcccagctactcgggaggctgaggcagaagaatggcttgaacccgggaggcggagcttgcagtgagccgagatagtgccactgcagtccagactgggcgaaagagcgaggctccgtctcaaaaaaaaaaaaaaaaaaaaaaaaaaagaatacgctctcatataaaccattctcaaagccaaattaaacaacaaagcaaacaatgaaacaaactctatttggtcaatgtaagcaggacctgtaggcataactactctttaagtggcctctgcattagtgaacttggttctcagaggagtgtacagtatacgcttagcttggaaaattgaccctgtgatttttgtacactgccagctggtgtcagccctgtgtaggccatggatgctaaattcatacatgctgagctccagctgagctttgtcaccaaccctgtctgctctggcccctgccagactgatgactgggcacatcttcactgagatcactctgctccctctaataccaactagctgtacctactaagatctgctggcgtatttcctcctctggtcccaggtccagctgtgcagacccagctggtaggatgagagagaatgtgtgtgtaagcgtaaaagctgggacatctcctagtctctgtcccacctggagaggcccaggcatattccagctctctccaccctgcagctttcacctccccaaagccaagccagtctctccctataccctgacctgggaatttaacactcctactcacacacacttcccctccctcccaacgactgctccttccaccgagtcagactctaccctaatgtgtggaagctatacccttagtaggcctactgaggctgatgctgattttatttaaaaaaatgaaggcacattttggcaaaattgacaggatttgctggtggattggatgtgggagaaaaggagaagaaaagaaataagcagtaattttttggcttgaacagctgagtagaatggtagtgccattctctactggaagatagctggaagagtaacaggtttgggaatagacataatttccagtaaatgtgttgcttttatagcctaaacacatatatgttaagtattcaaaaatgtttaaccctgtctttgctaaaactacaaaaattagccgggcacggtggcacgcacctgtggtcccagctacttgggagactgaggcaggagaatcgcttgaacccaggaggcggaggttgcagtgagccaagatcacaccactgcactccagcctgggcgaccgagtgagactccatctcaaaaaaaaaaaaaaatgtttaagtaacctaaaataaacaagaaatgtgaagatgttttgtaatatctaaatttgtgattgaactaatccaaacagcacagagagaaagacatctttgaaagtgaactttggttttgttaagtttattatgcccactagacattcaatagaaatggtgagttggcaattggaattggatatgcatgtttggaggagacaaattcagaactagagattctgttgatggaatttaaggccaagggattgtgtgagaacacaagagggcagagttcccaagactgagaagtcagtaaagcagagggacaaccatgagagaatcaacaggagtaagacaaatgctgagatgtcacgtagatatgcagacagggaagtggccaccatctttacatctgaatggtctttggtgacttggtctggaccagagcaaaatcactagactgacgcatcagcctcctaactattctcccagtccccactttagatctcccgccaaactacacagcaaccaaagcccacttgtataacttaaatcaaatcctatcagtcatttgctttaaaactttcattagcttaccatttgaacttagaatagaagataacacccagggctggaattagggtaaggtgaggatggcactcaggcacaaaatttaagggggtacccaaaatcttggtcatcaaaataaatattttaatgcaatatttaaagaaacaaattagcaaactacagctcatgaaccagctgcttattcttgtaaataaagttttattgaaaccagggccaggattagggtaagatgagtagggaagattcaagtgcaaggtaagagctgtctttacttaaaatcttgacattttgttcattgtagattttattttgcactaatatttattttttgaaatattgcattatgttatttatctataatactgagttttttggtactgccttaaattttgtccaggagacaaagtgagacattcatctcatccttgtcctggctctgccaaccccgtatcaacgcctatactttccagtcaacttgtgtagcttttgtggtcagaaaacataaatattagtttatgctttcaaaattttttaaacaacttaaaataaacccaagtaatatgaaggtgttttttatagcagtacagagagaaaggcatccaactttaatatctgaaaagataaagattcaacttattttccaaatgaatctgctcttctttatgcagtgagtactcagcaaggcacatggtttaataacagcaggagagccatttttagataaaactgatgatgctttcatggaaaggttccaggcagattaaaattgtataagacatcatgctttttgactgcttaaatatgttatgatcataattttattttgtgatttcaacagagaaaaaagattttccttatttattaggttatcaactgaaagaaccaggcagttttaatttcttcattcatctaataaactcaagttactatgctgaagcatgaaggatcttagaaatccattcacaaacatatttttaagagggcatatggtttggggcttgattaacagaataaatatttgtaggttttccaagttaacaaaaaactgttttctttctcttagtctttcctccctctactatgccttatgtttcaaaggttggtttgcttcctctgtgactataacattgtgaataaatgaattcagcagagcttataaactattggctctcatcttagccaagcttttatactagaggagatgtgtctgtctcagtttccctatgtgaaacttgagaattgctaaggcaaaatgctgtcatcattacagatggaaataggttatccagatattactaaagtgacccatatgtccatacaagattatcggtgagaaaaacacctgggcgtgtcccatgcacatacacagccccaaaatatctgcctccctgtttagttgtaagttctgtcctctgaccagatgatggctggcatggtggggggcagctggccgggcaccccaggcttgttcaaatggcagctgggcagaggtataaggaccatctgcgggcatgcaaggcttcttgaggactaagctgagaacttccaccatattctgttgcccaaagcgtcacaagattaatccaaaacaaggggaaggaaaacaaactttacctactgatagagggacctgaaaagtcaccattgcaaaaggacttcattatagggaagagaagaattgcagccattttgcaaactaccacaattagctaataaagttagaaaatccactcaattacctataataaagtggtgctttttaacaaggttattatggaggaggagagggaatgaagatctgtgggagagaatttttgttgttgttgggggaaaaaaccacttgcaaatgcagaatagcgatcatttgataagaccatggagaaattgaagcagattatgttcccatctgggatgataatgattgacttgctctgttcttcatatttatgtgaaactgaaataaactgaaattcttggccttaagcttcagagcaattcaggatttgttcaaaggtagaaattctgacctggctacctgccatctccaagtttagatagctaattgctccagttggagattcttattttattttcttatatctgtttattgagtgcctgtagggatccaggaattttacgtatgtcatcttatttaatgtcatcttatttaatctgatgattaaacaaccctctgagatagctgtcatccacattttaatatgtgtaggtactgaggcttagagtcctccagtaactagtgagggccacagaactagtcattggtagagtcaggactctttaaaatatttccccttattctgagtgtcatcccatagctttacccttttgaattatactctatttttaatatttaatattagaaataaaaatgtcacagtctaactcattgggaaataactgttccattaccaagaaaacaaacaaaatagaaattcccttagctcccccaggttgtttaaatgcttagttgtggattttgtattcaatagagagagcaggtaaaaagaaagtgttataatcatctgccaaatgaatatccgttggcaataaaggtaaattcaacttactaaaatttgatttcctgtaaaactagtcaagaatgtgtgcattgactataatagggctcaaatggaggaaaataacctttttctccaactcagtgctctccaatggtctgaaagtctgtgtccacccagaggctaacaattctccaatctcacctgacctataacctcaagcctgcagggatgagagccagacagccctgggtatggcccccaactttacaaggtattgcatctgaggccttgggctatttactcttcttactgagcctctctttctccagcagtaaaatggattgagaatgcttatggagctataaatattaaatgaataatgcatgtaagtcaagtaatttgaatgctaagtgctattgatttctctctcactgtacatttttcaacagaagctagcacaaaataaagcacagcaagcaaactaccccccaatacaggtggacttcactggttgattgttcttttgcatttgtgtattccacacctgtcctctcccaccgcatatttataaaacaacaaagtgtgatgggaaatggcattttaccaacacaggttctaatctcagccctgctcactgagtaaacgctgtctttacaccatccggttgctccatcactttgagcttcacttccttccagctgtgaaacaaagaagctaaggagatactgatcattctaaaactagggaacaactacttaaaaacaccacgcactgtgcctggtactacttctccatgcctttatttcctttggtacttacaaggaagtgcacccatttccaaaatgaccagtcaggtaaaaaggagactttttcttatttgttttgggttcttctgcttcccccttgtgtgttttttcaaggtgaatgcaatcacagatgtaaaccaccctcaagactaccaaagcctacagaggggcaatagttagaacaaacacagtcgggcaacagttagaaaaaacacagtcgggcaacagttagaacaaacacagttgggcaccattggtgcctgatgcccagggcagacctccggcaccctgcccagtctctgcccactgaatagagttggaccatctgcagtgacattcagatctttttcctgaagagcttgaactaattgagaacttgtcagtgtgagtaaaatgctctgtgctgccttctactctgttctttgcctgtgccagaacccatttcagtggcaccaggctgtcaactggatgggctagacgggtccttttggaattcctcctttccgtcagttagcatttgatactaatgctattagtattatttggatattatttaggctttcaagatacataccctttggatgctggaagatattccaaatagtttttccaaataacattccaaataattattccaattagtattttccagcttccaaagggtattttgaaagacttaaatcaattattcttaacctttttagggtcatggacacttttaagactccgatggaagttatggacactcttcccgctgcctcctaaaagtttgtatacacacaaaactagacggtgtcagaaatttcacaaactgtccccccacctaaattcagactatagtttccaaattaaaaaccctagtactggccaggcgtggtggctcacacctgtaatctcagcattttgggaggtgaggcaggtggatcacttgaagtcaggagttcgagaccagcctggccaacatggtgaaaccttgtctttactaaaaatacgaaaattagctgggcaagttgatggctgcctgtaatcccagctactcaggaggctgaggtaggagaataatcgcttgaactcaggaggcagaggttgtagtgagccgagatcacaccactgcactgcagcctgggtaacagagtgagatgccctctccaaaaaagaaaagagaagagaagagaagaggaaagaaagaaagagagagagagagagagggagaaagaaagaaagaaagaaagaaagaaagaaagaaagaaagaaagaaagaaagaaagaaagaaagaaagaaaagaaaagaaaagaaaagaaaagaaaagaagagaagaagagaagaagagaagaaaagaaaaggacacctagcactaaatagtatttgtatttataaatgtctgtgtggttagtattgtctaccaataagccaataccaaacagcagtcagcaaatgggtacttttgtctagagcaactttgtttttaatgaactaaatgatttttgttgatttgccctcaggggttggttgcaaagtagggaaggaaggagatcttaacaaataaaacagatactttgtattacatatatttaataactaaccatggggacgaaagtgtaaacaccaagaaaattaaccatgtcaaaaaatacacaccagtagcagacgttaacctgctaaggcaacaagtcacctactgcatacatacaaaatgtacacacatggttgttatgactatatagaagactgtccatatcctgagaagataaacatatgaaacgtttaaaggcaaagatgtcgtggcatctgcagtttactttaaaattactcataaagaattattaatatagacatattgataaagccaacatagaaaatgttaaaaatgaatctaatggtggaactctggctattctgagcttttcctatgtttgaaattttttattgtaagaacttggagaatgaaatctcattattttgagagaaatgtcaatataagcacggtctttcactttgggactgggttttctttcattggcaagtgtcattttcccataggtccaggatattttttgttgtaatttaattaaatcctttccaaagatatccaatgctcctataatttagtaagtagtaaacttctggtgataatattatacaatattgtatgattattaacagcatttaagatcctctctgggcaataagcttgtactatgggacctgctacaaaacaaaatgcccaccagaaccatcttgagaagtttctaatggctaaagccaaaatttcagagccaatagtaattaggaaaaaaagctttttgatgggatatttctcatgtcatttttcccccaattctagaacagatttttaattccaacaatgaaaatagtgctgaacattaggccaagaagttggtgctgactgtaatatataatatcagtacctcctggcttcatttgacagtaacgcagtgaggacttccagagcacatcttttccatctctgtgaatgtgaggctacatctgttttcagtagtgcacaatttccgttgttctattgacagataacagataagatatgtcctaggaaaccacagctactgtctggaaccagaatttttattttaagggtgaatctccagcatcatcaatccattactacttcatcagcaaaaattgagtggtaaccttacttaatggtagatctcaatttcatctctatttttttattttatgctttataagattagataactcttgtcttaataagattagagggatgcatgacattgaaaataatcacttattttttaaattatgtactttttgttcaaagcaatgataatgattaaagctccaggtttccctaaaaagttctataaagattagatgacttctattttctgaatacattttgttctgtcccacatagagggtgaaatcagtgtgttttatgtttacttggggaatgcaaagagatatgccttagagcaggcaagtaaagtcattaagaggctgtggttttggccgggcgcagtggttcaggcctataatcccggcactttgggaggccgaggtgggcggatcacctgaggttgggagtttgagaccagcctgaccaacatggagaaaccccatctctactaaaaatacaaaattagctgggcatggtggcgcatgcctgtattcccagctactcaggaggctgaggcaggagaattgcttgaaaccgggaggtggagtttgcattgagctgaaatcgcaccattgcactccagcctgggcaacaagagcaaaactctgtctcaaaaaaaaaaaaaaaaaaaaaaaagaggctgcagtttcaagttagattgcctgcatttcaatcccagtaccttccatactacctgtattgctgtgggcaagttagttaacctcactcagccttttaccccaatctttaaaatgggtatatttgcatccattgaggtacagataaataaataaatatagggcataatagcaatggaaaagccataggcaaaaaatagaccatgacataaaattataaaacatctaggaaaaaaatagaaaatattcagctcccaacaccaggcaaggaattcttagacttgctacctaaaactgatccataaaaggaaaatttgataaaattcaacctcatcaaaattaaaaacttttactctgtcagaaaccattttttagagaatgaaagtacacattaaagacagggggaaaatatttgcagaccacgtgtctaacaaaggacttgtatctagaatatacaaggaacccataaaacataacattaaggaaacaaacaatccaattagaaaatggcaaaatatatgcacaaacatttcactgaagagatacacaaatggcaaataagcacacgaaaagatgttcaacatcataagccattacagaaactcatgctaatactgcaataaagttgatcgcctgtaaccccagcgatttgggaggcccaggtgggagcattacttgagcccaggagtacaagaccagcctgggcaacatagtgagacactgtctttacaaaaataaaaatgaaaataaacaactatgataccacaatgagatatcacggcacctttagaaagaataaaatttcaaaatagtgatcatatcaattgctactagaaagcagaaacacttcatcactcacacattgctggtaagaatgtaaaatggtacagcactctggaaaatagtttggcagttttttaaaacaaaagcatggtcttattgtatgatccagcaattgtactcttgggcatatatcccagataaatgaaacatagttacacagaaactcatacatgaatgttcatagcagctttcgtgacaatagcccaaaatggtaaactatccaaaatgcctttcaacatgcagatcattaaactgtggtatatccataccatgaaatattactaaataaaaaggaacaaattgttgatacatacaataacttagaccctaaggaaattatcccaaatggaaaaagcaaacctgaaaagtatacatatgacattattccatttatataacatttatgaaattgtagaaattgataacagaatagtggttgccagggattagcaggcaggtgtgggaatgggtgtagacctaaagggatagcacaagggagtcttgtgatgatgttatagttaattatcttgattgcagtggtggttacatgaagctacacatataattaaactgcatagaactacatacacactatgcacaaacacaaataggtgcacatataactggtgaaatctgaatgagttccatagattgtaccaatgccaacttcctagttttaatgatgtactatagttgtgcaagatgttatcattggaggaggttgggtaaagggcgcatgggaccaccctatacatatttttgcaactatttgtgaatctataattatttccaaataagaagttattaaaaatgtttcctaataatacctgccacctaagattatgaatgagcatttagcccagtatttcaactgtagttagtgctcgataaaggtcagcaaggatttcatatattaactgctgctgttgctacttaattggaagaatgtgtcttggaagtgagatctaggctagaatatacactccgtgaaagcaaggatttgggctattttggtcactgttttatccctgcacctagaaaaatgtagcacatataagatgctcattaaacatgtgatgaagaatgaatgggtgattttttaaatgccgtgaaggaggatatttggcaaatggagcaagagggaataacatggtaacatcccaggtaggcatagataaaatgacaatttgcctggactccctatgacagcaaaggatggcagatggggtgcagggagtgagctgagatgttgaggataagtttgaatcttaatttgactcactctaccctaaactgcatcagccccagggacaattgagaaggtaactgtcctcatgtcaagccccactaatgggactcctagtccttaccatctactctgttttccaggatggccaggtgtatcatggtcaacacccagtggaacggtttcttactgccatgttctccacttcactgcatggtgggcctattccattcaaccctttcaccagccaaaacagaggacccctactgcactcacctcagccattagtagtacaggtccaattggaccaccaaaagaaagactggctctctcaggttaaaggacccgtacagcagtgtctgggcacagggtcccagggatgaagccagagaattttttaatgatgccactctgtattagtcaaatggtttccgctgaccatactgtaggccccaacactggacccagtcacctcaattcttttgtgcctcatggtgagtttcctgcatgtttgagaatcctccttcctttcaaagctctagtctcaccgcttatggccagcagtcaaaacttctatgtttgcagagcatccgtggggtggcagcacactggtgggcaaaattggaagtataaagatgtgtaatatgtaagaccccctcactcaagaagcttacaagtccaacaaagcaggcaaaatggcaaacacaagcagttgggagcgttgtgaaatgatgtctttaacacaggagttcaaagaagggaggtttgatattgttgcatttccacaggaatgaggaagtagtgacctagtcagagcacacatgccagatacctgggaggagactgattcaagaagcagtgggtcactcgcagtatcaaatgccaggaggaaagtgacacaattcagtgttggaccaagacgaagctatttaccttcagcctcattatggatgagcatatgggctcattaaaaatatataagatctgatttaacttatttattattaaacatgcatttactgagcattgagcaccactatgctaggtactgtggaataatatcaaatgaaatagacatggtctctgccctcagaagggtgctcaatagtgaaaaagagagagatgagacaaataatacaaaagaatgaactagggaggaagtggggaggaggggacacacagtggaaatggaatgtggaagtagccaggcagtgcttgaaacgaacttgctgcgtcccacttttataactcatcttcgtgacatgaatgagtttagcttcctcttggcctctcttgggaaagaagagcagatcaaggagtgagactggttctcattatcagtgcattttcaacggaaagtgttgtatgcttgatatttgtgccctttatttttccccaagtttacttagatttgcatttatattattaaatatttaaattgggtttatatgatgtttttgcttcctggaaattccaaaactaaattcagcaaatctggcatctctatttttttgcctatatggaaattgtgccagggtccttttggaatcaggtactgatatggtaccgttgatatttctgagatcggaagttaaaacgtggtgaagaattaatctgctatattaatgaggctgcattgtttgtagctagaagactataaatatgaaaagttatacgtataaaaatcactatattacattcaaattgtggggttttgttctctttgaggttcaaagtttcttatttttaaaaaatctaatcttttttaaaataaaagattggcaaaaaaattttgttactgttaatattatcaaaaattaaattatgtcttcaattatatcagttttaaaatgcattttaaatatctaatgccctttgctcagtgaattctactattaatatatgtgttgtttataattttatagacacaagcttgttctttacacttttatagtctttgccagcttctctctaaacaagaatagatgctaaatctagaattaataaatgtgtgataaaatgtgactacaaaagtaatgattaggccacaggtaatcctcttaagtatattcttaaatgtaacacttaattttaagtgatctaataatgactacctaccctttctatctagttaatttaatgatataacatatttattctgaaatgcaggttccataaggacagacatttttgccagtttgggccacacctaaatcccaggaacctagaagaatccttggccatatataagtgtgtgataaatattatcaaataattactgttaaatgaatgaattttctttattcaaaacttgccattcacactctcccactgaagctttaaacaccaagagtgactattttcattttttgagcttgttctttccctgaaacaatgaaatagcactagtccttgaagtgtcagaaataaatcaaagactgagcccacccgaacttccaaataaactaaatatagaatgtctcatgaccgcagtgataactgggaccaccaggggggcccttttttcccacctactgctgagctatcaactccttaatacaagtcaacttgatatatggagcaactcatttgcagttttacttaaatctatgccgttctgaaggcataaaaagtgcccctatgaccttcaagagacagaaataataatagtaaatcatgacaatagtaagtgattctaagtaatgatgctggaagagacaaaatagcctctgtaactttctctactcccagatactagctttttgtacaaaataaacacaaatcaaagctttcattctaaattcacaacaatcacttgccactattttctcacctccattggaagtcagagctcataacagttcttaatatatgtgaactattttttactatatttgaagttgtattgtctgcagcctcctcacaggtcactgcaaggaaaatgccactttctcatttccccagcacttaggaaggctctggagcccaactgtctgagttcgtatctgagctctgccacttgctggctatgtggccttggaaaaattgtccaactccatcagcttcagggtcctcatgtgttgaaagggggagtatatgtttataatacctattattgtgaggattcgatgagatattatatatataacacttggcacacattattactgaaatctgcctcatttgctacaaagtattctgtagtttgttgcacaccagcatttgttagacctttttaaaaaatcacatcctccaagcttgcccaacccgcacctcgcagggcacaagcagcccaggacagctttgaatgtagcccaacacaaattcttaaactttcttaaaacattatgagttgtttgtttgttttagttcatcagctgtcattagtgttagcgtattttatgtgtggcctaagatagttcttcttccagtgtggctcagggaagccaaaaggttggacacctcctgtcttagacccgttccttaaaggaagtaaggcaaccaggacttaatagatgattgcatattgcattctttactagtcaaaggaaattcgtgtgactaataccagaacaccactagcagattgtgtttgattggcatatcaaaattattcattagcaattgtgagaattgctgaaatggtacaacaaagtaaattaggaacatctggatttttcaggggaaggcaagagatagcaggggtagtcgggttgttaattcctaaattaagtgaattaacactggtgcttagtatcctaagtacagaaatagcctgaggcccttcttgcctctctttctccatttgtaagatgaggattactgtcttctatgtacatacttaataagaaagattaacctttaattgatttaataggtagacattaataggtagacttaaataatcaccattactgttaatttagccagtgacacaagcagctgaggagctctggtaactgacccagaagcacacagttctgttctgccagggtgctctcactcacccaggcctcttaattgcattttaagtagccacagttaaggaccatggaaggcaaagaggtgaatcctgtcctcaaggatcttacagcttccagtattagggaggctaactgaaggagttgggtaaaagatattaatacattccatatagcttgtcaattctgtgagaggcattgaaagaattcatttctaaaagtttgtgctaatgttccagtggagtgcacaagataattatttggaatgcaagaaaaaaatattaagactactatttgttatcttttttaaaagagggaataaattagtccatgtttttacaatggttgccagtagcacatagatacataagtagataggctgggaacagtggctcacacctaaaatctcagcactttgggaggctcaggtgggaggatcacttcagactaggagttcgagaccagtctgggcaatatagcaagaccctggcctctataaaagaatttttttttcgtaattatctgggcatcatagtgctttcctacagacccaactacttgggaggctgaagcaagaggattgcttgagcccaggagtttgaggttgcagggagctatggtcgcaccactgcactccagcctgggcaacaacagagcaagcctctatctgataatggtatatgatcaagaaattttggagactctgattacaattgtgtagatttaacttgtcagttagattctgcttaatgaagtcaccctggcccccttgccttactgagtattccatattccaaattgttctttaactgtctctaaacaatttctcttctactccttccatattggcgaagatatctattcttctcaaaaaatttttctactatctcaaatatttcatgaccatgaagattatccaaacaaatcatcaaaaggctttgcttccaaaatgtgagctttcattaccgcacttcttacttagatcatttctaccccttctgtccatcccagtgtatttctttaaaccggattgtaaagtgggtactcctgcaccctgggctgtcatcttcagcacttcattgttctctgagattccttctttgcagaagggccatgattgtcagataattaccagcaaccagtcaaagtaatttgaatttaaatttttctttctttgtctaggaatttatttaatctcccctcccttaatgttttagggactatgttaagacaaagtaaaaggagggagaaagagatgagtttccatctgactaagaggtagtagggtgtttttccttttatatttcagatttgaggactttgcaccttgtatctagtcttcccaataggctttgaggtttattcatctttaacaaggagagacattttgaatgtttttatttattacagtagtgtattgaaagaaaaaggaaacatcattttacactttcatgttaattttttaaatgaaaatcagtcattcaaatcattcctcaccagatcttcctgaattctaagacattaaaattcatgtccattggaatattggattaatattctaatcatgggcatatttgtttcagattatatttttcacaaaataatatgtttaagtttatttctatagactttataatgcttccaggtccttggcataatgcattttaggcccattttgcaggacttggtggaatgttaaagtggtggaagtttatagctgttacttagctttagcaacgaactgtttattgttcttctatatctgatgccacgtcattgaccaaaaaaaaatcccttagttacacacttgtcttttgtcctatgaagtcttcatggtgacccatttgatatgtgatttgtaagtagataattaccagagtgaaccatggacatgttagtatcctcttactgagtggccctgaggcagctggactgcagtattggcctaatttttatgtgtgtgaggtgggactaggggcctgtatgtggtgaaaggctatgtacaaagatccatcaaaactacactttatagtcagcaaaatcatttctcgctttcaaggatcaaaggaagaaagaagatttaaggacttgggactgatttatagcatcaaaatgctatccaaatgggctatgcattttattatctgggatgcaagcataaatggacaatttcaaaacacctatcaaataagtagcaaaattcctataaagaaatgggatttccagcagggcgcggtggctcacacttgtaatcccagcactttgggaggctgaggtgggtggataacctgaggtcaggagtctgagaccagcctggccaacatagcaaaaccctgtctctactaagaatacaaaaattagctgggcgtggtggcgggcacctgtaatcccagctactcaggaggctgaggcaggagaattgcttgaacctgagaggcagaggttgcagtgagctgagatcatgccattgcactccaacctgggtgacaagagtgaaaccccatctcaaaaaaaaaaaagaaaagaaaaaaaaggaaatgggatttccaccaggaaggacaatagagattaaagtcatcttccagttgctcaatttaagtgcagtcaccatatgactaatttgagtcattgagaagggggccagtttaattgaataaaggtttgaattacagaatattttctcataagtagatgatggcctgccaaagtcttgctgttataaatggtgaggggagtctgcgttggcacaccaaagccctgatctgagaccttcaggatgtagtttatgaattcttttaaacaatcctcaaagaatagttgtgtgtgtactatagattggcttaacagactttttctacagctataggaaatttatttataaatgtattcattaaatttatttatttatttatttataggaatttgttaagccaatccatagcatgctgactaccaggaattgggctttcatattaatacagcccaaatgagtggtatttttgtgtgtttaaaattaagggggttaaaaagcaaaatgcatcataagaatgccaagattaatccttagagtcatgttagtcttcttttgaagaagttgtcttctgtaatatcccatgggttagaataaacttgccatgtatttaatggccttgaaaataaattcacaacactaggccaacccaaaacccactggctatacacattaaaatcatttctttgtcaccttcactagttacttcccgtgtaattaaacccctttaaaattgaatttgtaacgtaatcagctgtatattgtcaggactgtgaggctgcttcaggatgcaattagagcaaggctaagtcaggtgaacttcgaattatcagtagatgtgggtgagcccctggaaatgggcaattaccatcatatgtcacacttcttatctcttttgcaacagggctacataaaaggaaagtagaggggtgttttaatggcctccgctgccatttgtgtgtatacctaaatttacatattataccctgatgtatattcatgtctgcagattacacttgaaagaaaacgaatgatgtcaactgcagacattaaacagtgggatattttatagagaatttcaggcctgtctctgcactcagttttttctctgaagaatctatgtacaggcattttccttccactttttatgttttatgatcctccttgctgtgagagaaaaaggaagtcgatagagtagatatttttttcttcttttcagaccaaaagacaggtttggatttttttttccttccttaatcatgtatttagatatattttttaaaattcaaactctcagctggtgacgtttctgcccttataaagcccacctttttctctccctgctttcatcctgttccttcatgttctgtgtcaacactgtggtatcaattccagctcataattattggtctcccatttagccacaaggtgtaaatttgttaactgaccaggcgtgctctgacggttaatctcaatgtatgtctaaaggctgagcttgctgccctggaaaatttccctaggggattgccctgtagactgtgaggccatttgttgagctgtctgatgtggaaggaaagaaaaggagaggacctgccagagagaagcaggatcatacagtgccgttcagaggaaagtgggaaatcaaaggacagtttcctgtccactccagttctgcaagcaggctcttgggaactagggcatcaggatatttccctattagcgtttttagagaagtcattgagagagagcccccaacccaagggttaaggcgaatttagtgatgcccacaggctgtgctcagaaattaccaccaacgcagaacccttctgtctatgtctgagacttgcaagttcttcaagagcctataaaaatgcttggaaccagaagggggaaaaaaacacattggtattgactccagaatccaaaaaggtgtctacaaaaatcaaaattattaaatgtctaattgaatgtccacaaaatatttaacatcaacctcattaagtgttgaatttcaccttcttaaaaatccattacatgtgaaaacaaattgtagatttgattttttcactttgcaagattttgagcatgctaatcctaacttaaatgattggcacatagcaaataatttgaaattcaaaattataagaatcccttctattttttttacacaaaagtgtatattttaggtaattgaatattttagatgagatgtggggacatcttaatatctttacatggtaggtgtggtagaccctaaaacagaaagcctagagcacatgaaggttttaaaactgttctgcatctggctactctcctccaagtatgtgattattcctgaagacagacgtctgtttagaccctaatggggaggaccagaaggccagacaggggaagggttccagtttgttcttgctgtctgcacctgtagttgaggtgaagtgacgaaggtgctgtctaagtatgaggaactattcaccaggcacctgtatctcgttggaaagatcccagggtggtccccggttctggcgaagaaggagagttgccattgagttaaggaagtaaaagctgtccaggtgggtcatgtcggtagaattccactgcccccttgtctgagttgcgttcgcttccagcagattaccaggcctttatgtgcccttgtgttctaatccacatttctcaactggacagagacttctctttttagaatagaaaacttgaggtgatgggaacagaaggaaagatgggttatctgatttccatatgggatgatcctagtctttaatgcagtggcctaacttctgtgagctttattttattcataatacatggagcaatgaatgctgactccccccaaaacatatagaaaatgacatttctttgcaatcccatcccccagtaacaaccactaataacagtttggtatcattctttcagaatttttttctttatatgcactaaaatattaattattttcctttatgaaatgaaacaataaatatttataaatgtttaattttttcagttatcaatagatattttccatgtcagaacatgtgaattacctcattcattttaatgatcacatagtattccactgcatggctgggccacagttgacttaactgctctgtattgctggacattcgggttggccattcaactttgacctttcaggagaatgaaccatgtacctaaataaaccattatattttggctaaaaatatacatccttagtcccctgttttggcttaactcatcccaggagcagaaagaatgaaatcttcccctatactgatgcttgttattaaatgtaaatgccatatgtgattcttcatttatttatttctttgtcttttgtctttgcctttttctcttatgcagccatctgcagccagggacaaggatgaaccaactctaccggtaggaagcagtggctttgtctgtacctgtttgtgtgcctgtggagagcgtggggcaggggtgggagtgagacgggtttgtgtgctcaacacattactctctcccttggaatacttaaataatctaacccctgatgtgtacttctactccgtgctacaattagtgatgactgaattctggcattcatggacacatgccttctgggactaggtttcaaaagtttgaattttctcttccatttggtatgaacttttgtagaagttggaagagtgagatatttccaaattgcattccaagggatgttgaactaatatttgggggtagtgtgggatctaatgctcaatatttgttttctttgtgtatctgcatgcacatactttgattggaaatttcttttggtctcatcaaaagaaagaaatgctgcatgagacctatatacttaatgtatatataatacacaaaagaatgctttcagtacttctctagatgtaatctttttcaaatgaagatctccacaccagagttcttccagtttcgcagaataaggaccataatagttatgacgagttattattgataaacacattttcgagttcctatttaattaacacatcacatttcagattttgcaccatcgtaaagaaacaaccttcagaattattgtgttcagccatcaaacagtgattacatttccattttattcaggtctcctaagtttgctcctaaaatgttttgaaccgtaatcatctgaatcctctataactaataatacaatgcattaaaaaatgtttaagactttcaaggccaaaagagttagtaataaagatacatatgaccctgtccttcctcctgtaatgctcagggcaaagacataacattcattgagagcccatagaatacacctgatccagtaccagaacacggatacagactcaatctcttctattaaggagccataatctggttcaccattgaggcaccagtaatccccactgattcttttccatccctattgaattggcaatgtgatttcttctggtatctcatagtgatattttactcatactttctacgggtttcatgtttgtctccaaatgtgtggaccatgattgttaacaagtgttttacaaaataagatcctatggataatagtttggaaacactgcccaagttaatcaagttaaacagatttctttagtgttagacttagtggtctaatgatgtagtttgaaaccctgaggtgagttggtctaggatatagcactttccaatatatatccaatatgtatttgatcatggggtctcttatgggacatttttggggaagcccccttgtgggtctggagtatgatggaatattttggaaaaccctgttatgcagaagtttgaaagacatagtggagaatagtattttatttttacctgccccagaaaatttacctgtcaaacttttacgctgaaagttcaataagaaattaattcccttacattacgatacctttcaactccttaaatctgtctgtctataaagcttggctgcctcagagagtcttctcttgtgatgatcaacacaaaatcaaccacggggagacagcagttcctattcaggataaaaacccatcaaaatacagagggtttgggagtttttaggttgtttgcttttgaagatagaagaaaaagagtttgtcagtaaccttatctctagatactcattcttccttgtcacgtaccagttccttttatttggccaacggatcacaactagtagtttgtgcaaaaggagcccccctcaaagtcgggagagttctcatggtttcatgataagagcttctgctccttgaatctcacttaacacaagctatgctgctttctggattagagctgtagtcccagggtagagatgaggtagcccaggagatgtgcaagactctgggaagcaaggagaaaatattagcacttcgtcatttactgtgttattcttcttaacttgtatttttgaaagtgtttttatatgttcatattttagtatgtgtatctatgcagatatgggcatagatgcctatttatatacatttaaacattttactgataggatgcatacttcaaaaatgttagagaccacccactggtttagagaatagtcattgagaaaagcagacctgggatccattcctccatcctccacttcttgtcagtgtgacttgggcacctcatttcacttgtctgagatgaaatgtcctcatctatctaacaagaataaataatagcatctagttcatagggttcattttgcaaataagataaatgaagggatgtgaagcatataacacattgtctggcatttacaaagctctttttaaaaagggaagcaatgcattcatttagtaggaaagaatgtgagagagccattccctcaggggctttgaaatgtgctttgaaaatctttggctcaatactgtgtgatcatgcgacagaaatgagtggccaccagactaggtgaggatcttgtctataatgcacttgtctttcattcctgagactaaccatctctttggtttctctgctcaggctaagccgcgtctccagcgaggtggaagctctgcctccctccacaacagtctcatgaggaatagcatcttccaactcatgatacacacccttgacccactcgccgaaggtaaacatcaagctttggtttgggaacttgtttggggggaaaaggatgccaaaaggcttctctgcataaaacgtgtttgtgctgtcgtcatgcacgcctgccagcctcctcttgtttagcttctgccagaagcagccctggccctttgacgtgctttatctgcaacagctcagttcaccatcagtgttttttgtaccaggagtaggatgtgaggtccgtgtgctgattctatcttttgatgcctccagcataaatatagtttgttatgaagcagagaggacaaaaaggtttccctcccttccagctgaagtaacagttctcttttgtcatcatttctaagtttcaaaacaaaattgtgtgtgaagataaattgtgcaccttaaaaaagagagaaaaagaactctatgatttaggaggtccatgagtggtttggggagtgatgttcatggcagaacgttgagagtgtactgatcctttggcaattggagggtgggaggtgagcatctatgcatctaaaaagccctgtctttgagaactgcttaggagctgtcattggagacccaaaaagcctggctcacttcccagtgtaatcacatgaaccatcacaaacaacccattattgtgtacttccagtgttactcagtcacaatgaggccaaatacattgtgtttcttcagctgcataaatattccccaaaattattttcaagttgatagatatcggatgtgtcaaataaatattagttttgtcactagtaaggggttcaaatataaccaagtatgttctcccttcatccttggactttataattgggctcaatgttacacaggagctaatacagcctaggaaatagatacgtgccactgaatgaagccaggggatctgattgtcgaatcatgttgtatgaatcagagatcttacccaatataaggctttgctaaataatttcaagaatataagcaatcaagaagttcatatgaggtaaagaaaaatctgtgacccaagagtggctcccaaggacctatcttccttcattggacatgcacctcactcagaataataggtaaggaacacagggtcgcctctccttgcagagcatggggcgtttcaatcacaaatcatcttcctgttataccacagagagttgtatagctgatgtgatattctccaagaagccttcctccacaggtcctgggatctgtttactagaggtaattcttagccagggacatcctaaatatcattactctatctacacggaggtccatttgacaaggatgttagacctggtcatgagccttcttttctttcccctgggatatacccccagagaagggagtaaagagattgcaggccgactgctttaactccttcctcccaactactaagcagttgtgtgactttgggcaagttagggtctctctagtatttggtttcatcatctatagtaatattaatagttatctttggcaccttacagttgacaaagcattttcacctctgtaaacttatgcttcacaataatgcttcatagctaacattattattctactttcacaaaatatagcaccaccaacatggatctcaaatgtatctactgctctccctcctgcagcactttattccaaaccatctccatcgcttgcctgcattcctgcattcctgcagtagcttcctagctggtctttcagttcttccattgccactgcctagacatatgttccatgcagcagcccaagtaatcttcttaaaaagtaaatcaggttatgtcatttctacttataacattcagtggcttcccagggctcttaggaaaattgtgaaatccttgcacaactagtagtttgtgcaaaaggagcccccctcaaagtcaggagagttctcatggttctgtttctttgaatctcacttaaaacaggccatactgctttctggattagagctgtagtcccggggtgaagatgaggtagatcaggagatatgcaagacgatcctttgggaagcaaggagaaaatatcagcaccttcatcatttacgttgtcattcttcttagcttctatttttgaaaatgtttctgttcatgttttagtacttgtatctatatataataggaatatagatatagatatgaatatagatacctatttatatacatttaaaaattttgctgataggatgcacaattcaaacatgttagatggcagttggagggtgggacgtgagccaaatcatggtctatgacaggggtccccaacccccagaccacggactggtaccagcaggaggacagcaggcattaccgcctgagctccccctcctctcaaatcagcatttgcattagattctcacagggggccgaaccctattgcgaactgtgcatgagagatctaggttgtgtgctccttattcgaatttaatgcctgatgatccgaggtggaacagtttcatccccaaatcatcctccttgacctggccatggaaaaattgtcttccccaagacccagtgtctggtgtagaaaagcttggggaccgctggtctacatgatctgcctcttgctccaaactcaatttcactctgttttagtcacacagacctttctgtcttcagacaaacaccccttccctgccccaggtttttccataggctgttctctccactataatattttcctttcccccacccccttccatttttccctgcgttactcctgcccatttttcagcactctgtgtaaatacttcctgaccattcagcataaatcagggttcccaatcctcatctgccaatgaacctttaatttttctttactgcttatatcatggtttctgtgattgtttatttattgcctgtttctgccaggatacaggaagtttcttgagaccagggactctattttattcactagttacccacaaagcctagaagaatacctggtacatactagcgatgaaggctcaggaagattaggcaacttgttcaaagtcatgatattgacctgatattgaccatgcgagagaagaaaggaacaattttatctactccaactcaagtatgataaagggcctgagtatgtttattttgggcaaggcagtattatgtagcaattaaaacgacagactcccgaaccagactctgggtccagatcccagttctgcatttactagctgtgtgacctcggacaagtcacctaatctttccgtatctcagtttcctcatctgtaaaatcaggaaaatacataatgatgtctgcatcatagtgttattgtaaggattaaaatgtgaatatacacaaagcgttaaatacacagcctagcacatcttaattgccatatgcaggtttggaattattctacttcattattttgaaaagtaacacaatatatgatttttaaaaattcaaaatattccaaagattaaggtgaaaaaaaatgtcttcttccttcatcaaccctctaattttctccagttccccaattctccacagaggaaaccacagtttccagtttcatgaagctccttctagagatgtttaatcatatgcaactgtgtgtgtgtgtgtgtgtgtgtgtgtgtgtgtgtgtgtgtgtgcacgcctgtgaatgtggtcatgtccttgcccacaggtctcaataatctaaatgttcctggtttttgtttggaagaattcagtttctggtagggcttgtttttgttttttctgtttggagaagaggttatgttttgtttttgtgagataagggaaagtgaatctaggttgtctcagagttgggccatcagtgattttccaaaacgcctggcccttgtggagctgtgctacaattaaactgtattcctgctgtagcaagatgtgcctcctgaatccaggcacctgctttcaaggtgaaacctctccctgaaagatgtgggaggctacagtggtgtgaatctgagagatgctgagagccataatcagctctggacttgagtgattagaaaatatggaaagcacttcaatgctttaaaattgctccatagcaggcggccaagaaaacagattgctctggtatttttcccccaaaattcacaatcattttccattccgagaacagccaaaaaattaacccacagctctcagaaatagtcatctctcttagtttgcatctaatcacttgaattcacatgtccttgtgccaaactgtcaccttctaacaacaaagagcatgctagttacatcaccaagttgatggcatgaacgctgcagtcagtagcttccttgtagcactaaagaacagttcgttcatgtcactggtgttcacctggctgggtagtgcattggcactactggcatttggtgtatgttcaaaagggaactattcaaattcatttgaaagcagcatctaggacagatggcctacagaaacacattcccctttgtctcatctgtgccactcaggtgttgttgtcttccaaaatccagtgaatgagcccttgccaaaagccttcattagtggttggttccgcctctgagcctgagtcacaagagtccagcagtgtttgcgttttattatctgttgatgtgtaacaaagcaccccaagacttagtggcttataactgccaccatcttattactcataattttgtggattcgaaatttgagcagggattacctgggtgagttttctgttccatgtggcatcattggaggtcatttgatggtatttagctggtagatgggtaggttagaaggtctgaaaggacctcactcaagcttaacacctacaaaggaaggcacagtggaaagctgggctcaactgggtcccctgattccccctgtggtctcaggacctttccatgtggatagactaacatgttttatatggtagttaagggttccaagagcaaaccttccaggaagaccaagcagaagctgcaaggctttatatgacctagcctgggaaatcccaggatgtcagttgtactgcattcaatcagtcaggcagtcactaagtccagcccagactcatggggacaaaattagacttcacttctcaaagggaggaataccaaagaacatggtgaaaccaccttggatgtgatccagtctgtttcagtgacatacattgtttattggttccactgttcattgttccttggtgtgctctggatggaccacattatgtaggggggacaaagttggcctgactaggtgaaggtttagttcaaacatagctgaacagtgccttttcagggacacaaaactctgaacaggacattgttcatgaaaagatggaatctgcttaaggcagatgaatggttggaataaatattttctttcttttataagaaaaccttggggaactagaattattggtctttgagatcacaggatggctatctgaattgatctttctaataaattcagtgtcctatattgattttaacattttctctaaacaagcctttatatttgctcaggggtacatcttcatgaacctaaaaacaaggatgctggatgttgcagttttgcagtgagaagtatcttctcctaccatttgtctcaaaatgatagcaccaaccaacatttgcagagtactttctgtaggccaggcactatgctgagtgctttatataaaccatctcattaatccttccatgagccctactccatcattcagaggacactgacatgtaaagaggctatggctctatgccccactaaggcaaggtgacacaagaagtaaatggcagagccagaatttgaacctgtatctgcctgactcacagtctgtgtttgtagttcttttctgctactctgcctccttgtgtaaccccatgtccaacccagcattccttgttctcctggtgtagacaccagcttaaatcacaagagctctgacctatccctggaccagggatggattttattattattgttattgatattattattactactactactgctaccacttctacttaggaagacttaaagaacctcttttgccagagagggttttttaaaagctctctcttcctctggtttgggacaaggagaagaaaatagaatgctgggaataaagatgtttaggattgacctttttggggaaagaggagcgtagagaaaaaatggtgatatcttcctctctccaccttcatgtcctcctcatcctgtgccttgatggtttcagttcaaagaagtgaaaattgtaaaatgcgtggtcttgaactgcttctaaagcttctgcagcccaggctgccatctctagacaggaactggcaggttgtgtttggcaggcatataggcatatatgttctcccaaagacttcagagaaaggaataccacagtcttttctggtgatcaatcacagtcaccacaaggcaaatgactagtagaaattcaggggtgaaaattaccaccttgaacaaagagataacaaagttgttaaaaagtgagggtctactatatggtagtatttttactgaacaaagtgtagcattatcactattggcaatagtagcttccacttattgaacacttgtctcttatatatctcatcatccccacttcatggataaataccaaggcccagagcagcttggtgacctgcccagatggatgttatatctctaccgacattgatctggttccaaagccattctctccatctgctgagtagtaggaaaccaaacacagaagatcccatacatgattcaagatgaaaattgttttttatcagttgtttttgtttgtttttagaaacagggtcttggtatgttgcccaggctagacttgaaatcctgggctcaagtgatcctcccacctcagcctcctgagtaggtgggactacaggtacaagacaccatacccagcttgtttcctgtctttgataaagaactatgagcagtgaatgagcagagaggtagtctagtacagcatttaataagagtgaggattgactgaaactagacccccatgggttctagtcccagctctgtccttcactaggtgtgtgaccttggatgatttgtttatcctctctgtgcctcaacctcctcatttgtagaaagagagtaataatacctacctcatagggttgttttaatagtatgcgagctaatatacactgggcatgttggcacacacctgtaatcccagctactctggaggctaaggcagaacgattacttgagcttaggagtacaagagcagcctgggcaacatagcaagacctctgtctctaaattagaaaaaaaggaaactaaaacaaatgaagagtatgtgagctagtatatgaaaagcacttacaacaaggcctggcagagaataagtgccagttaaatgctaaatgttattaagaaatggacagaaaaggacctcagtatagaatcttgcttgctccagagagtaatagtgataataatagtgtttggttttcacatttgagcacttactaggtaccaggtactgtgctttgcaaacattatctcactcaattctctcagcaagcccatgagagagaatctgttatcctcattttatagatgaagaaactgagaccccaagtggttttcttacctgcctgaagccacagtcctaggatagtagagtcagctttttaatgcaggttgtcagagccagccctgctgcttaatactctctgttccccccacctctcatcagcagttcctcacaagtgtcatgcttctcagatgagatcgatttggggaaatctattttcccaggaccacattatgtaactccatagtagagcccagttagagtcaaatgtgttcaccttcttcttcccatccctagtaactttgtccagtcttcttgagttctcaatttatagggaagagatggaagttccccttttccctctttctgaagggctgtctgctgacccatgagtccaatttatttcacagtggccctgaatctttccccagaaaaggcatgccccaaacttgtccatagaagaatcctggatcccctaaaatgtaagtcagatcacaccccacctctgctcaaaaccatctcaccaagagcaaaagccctagagcgtacagcggccccagaacccctgcaacttcccactctacctccttccgcctttcccctcccgcctcctctcttcctcctatcctctcttctcttctctcacccctccttccctcttctctgccctcgtttcccctccttcccctccttcctctccctcatctctctctgcccgtctctcaccttcctcccttcctcccctgctttgccccctcgtctcccctccttcctgtctcctcatttctctacccttctctcttttctctcacatgtcatttcccttgttctgcttctctgactgcctagcagctccttccaaatcccaagcacactcctgcctcagggcccttacacatgttccccctttttctagatatccagttggctcctggtctcccctccttcaagtcagccttcacatgtcacctgatcagaggccttactcagtcaaccttttgaaaatatcagaagcaaaacaatgaaagtgaatccgagttctcactctccctctccctgctctgcattctccttaacacttgtccccgtgaacgtatgtatttgttgtatgctgcctgtctctacccttattcctccaacagagcaggactcagggcaggcttggctctatccctagtgtctggcacaagtgggccccagtacatatttgctaaatgaattgaatgagtacttgcctttataatttttctgctagggaactatatgtctctagccatgtagattttcttaatccatgccctgtcaaagggctctgttgtagtgaccaacaaagttctatttacttgatggttctcttgcagctatgaagagtgatcagatctggtttggccaccattgtatagtaccagcacagcaatgatgttattatgtaggtgcttggtcagtatttgctgcataatggaatatatctctctctagtcctggagtcactgctgcaatgggaaatgtttgctgtctgcctcacaccttcctgatgagttcttccatctccttgttcctctcttccatccaaatgctttgttcttctctcgtttcctttcattttcttctctttaatacactgttctttcctttattacattccccaggcctaattttatatgttcagagaattatcatcgcaacaagaagctaagatgtttattgttttaaccattcattccttttacaaaatcaaacacctgtaaaataacatccacctcaatttggtgttgagtttgagaaggaaattgcaaaaaaaatgaaggttcttacttattttctgtgggctcttgtacactctcctacaattatagtaatttctccttccttgtgtagattcaaattttcatttacattttttcattgtaacaacagttgtattactaataccaatatttaataaattcatgcactagacaccttaagaaacataggagtaggaataattctcacctaatgcacctgtaatcgaactaaagcaggggtccccaacccccaggccatggactggtaccagttcatggtccattaggaactgggccacacagcaggaggtgagcagccagtgggtgagcatgaccgcctgagctccacctcctgtcagatcagaggaggcattcagttctcaaaggagcgtgaactctatggtgaactgtgcatgtgaggatctaggttgcggctccttatgagaatctaatgcctgatgatctgaagtggaacagtttcatcctgaaaccatccccaccactcaccccacacccacccatggaaaaattgtcttccacaaaagccaatccctggtgtcaaaaacgctggggactggtgaactaaaggattatttaaacatgaaagcaatgaagaccccactcacaaatgcaacaaaaccataaaataccaaagattaacccaaaagaaatatttaagaactttatggcaaaaatcatcacaatcatcatttctgaagaacataaaagatctaaataaatgctattataaagatgtcagttctctccaaattaaactctaaatgcaactcaatcccagtcctagtgtccaacactttcaacaaagaagtacaaaaaagcatcatcaagagcagcttttagatgttctggctgaagtattcaggaggctggtgaagaggctggatcagaggccaccggggtctcctctgaggtggccctggaggggcacactgccatagggtataagcaccactgccctggccagattcactaactgctcttggtgaggcaccaagcggggcaggagaggggcttcctggagcatttgaatccccaactgaagggacatggccctcattcctgaagcagtgagagcgcacattcatgtaagtggccttctggcatggcaagcgccctggtggatgtacagcaggcacggcactggacacagtgagcactggctgcaggcaagcaaggcttgccagaccctcaggaaatccagatcattgtgtgaaccctgaggaagggccttcagggaagtgttcctggagaaagtgagttttgaaagcaggttcttgaaggaggtaaggagcctggatgagcagaggaaccagctggctcagggaaaccccaaactatgtattgtcccaaccaaaacgtggttcctttgagatgagcaggcatgtagctccttgcccactgaactaacgctctagcagtctctcctgtcgaggggtgctaggtatgtgcgagtgtctatgcgtgtgtgtgtgtgtgtgtgtatgtgtgtgtgtgtgagagagagagagagagagatttcagtgcaggaaactaagggcctcagagatggtagagaaggaaaacaagaaagtggaacttttgtagtacccactctgtgccacacacccgaaagtcatctcatgtaattctctcagcagtggctatgggaagtcatatgcatgttttacctctgagaaaactgcggttccaaggggtggcatgacttgttcatagtcacccagctcccaagtctgacttctgagcctggagacttcactcacacaggactctatctgtggccacacatgttcacacatctgtctgttctgtaaaggctttccaagtctttaacacagacacttaatgttaacttgaagctgacactaagattaaactgtcacttgcttgctgggtttgctttttgtctcaccaaataccagagcttatttctcttagcttctatttaaaaaaaaaaaaagcttcaaaatgagctttcataaatttttgtttggtcccaagagaaagtcatttcatgcccccttttatccaaaaagtggagaaggtgtctctcaaaagcagttttgtaatctttctatcttaaattttagatcagcttatactaccaagatgtttgcgtgcagcctccgcctggtaaatgaataggcaaatgagtgaaaatcttcactggagaaaaataaaatccaatctactggccgtggtctactaatatgacagtagtatcaatccctggatagaggaggacaggccattaatgcctctcatagagcaaacacaggacaagttaaatagctcctctctttagggaatagtaaagcattattctcatatttgaatttgaaacatggttgaaactgaatctctctttgtgttgtacacattataaattaatgttatttgagccataagggaatgtgaattgtcttactgaaataaactgcttttgagtatgagaaaagttccctctctctttctttctccaatgaaaaggttggctttgaagcaaaggccacaaggtatgtggccaaaaagttgatttttttttttttttttttttttgagacagagtctcactctatcacctaggctggaatgcagtggcacgatcttggctcactgccacctccacctcccgggttcaagcgagtctcctgcctcagcctctcaagtagctatgattacaggcatgcaccactatgtctggctaatttttgtatttttagtagagacgggtttcgccatgttggccaggctggtctcgaactcctgacctcaggttatccacctgccttggcctcctcccaatgtgctgggattacagctgtgagccactgcaccctgcccaaaaaaaaatgattttgatggcatttgagctcaaagatatcatgaagaaggaaaaggacaatgaagtatccataaaattagagcttcatctttctcctctggaacttatgctcaaaagggaactccttcagaagggaggactcagagttcccagagataaaaagcagctgtcacagatgcaattacttgggggaccaaaggatgggggcagtcactgaaggtgaagaagcactttcatttaccaaagacttcctattcgaaatgtgtattgttatataaacatcatctgtgatatgagagcatccagaggtgttttctcccaaatgaaaggcatttacactaaagacacctctgagtgtttaataagtagcagggcctcacttcatgaggttgaatgacttgcattctgtgatgagatgactttctctgacactagggaacacattttctagttgactcttccatctgggatttgcactggccacaacactcatgtgtacatgctgatcatattgtaaactcaatcctcaactggctgtcaggatccatttctctcctgacctcacattatcagatccaccaaatcttgcctctttacttcagccattgaaaagaattctcccacccacaacaaacggtccttcacaggttgtccccgggctcaaaggaggctatgttatacacacgtgcacatacacatttgtaaagagtcaatcagcattgttgcttatatagtttacaggtctatatcagacttgtttagtgtgtgtgtgtgcgtgtgtgtgtgtgttctcatatattcatttacgaaacatatttccattgcaagctgacatatgagtggtaaccccattgggaatgttctcctttacaggcccccactgtagacaagactctgggggaactttagccagtgcttgccccagactagttaactccctgaatgccagtttaagtgctgttgttgaacctgcctttagatatgcagttgcagtaacctatgtggctacttctctttgacctcccagatggcagcacttaagcccaaaacaccaatagtgaatgtagctttgctttctactctaaggccctgagaccataacaaccagtattggcaggagttaaattccatagtaaatcaatctcattttagaaaattatttatgatgaaaattctcctctgccatttctgagaaaaaaccttttatccagttatggatttttttttcatgcaacacatttccataggtgatgcagcaggtcatgcaaggtttcctatctggaataggttacaactattttcttgacctgagagctaaaccccatcttgtcaatgctagtgaggattacaccatgaagacctgattctaggagttcaaaggtgacatcacacaatgtgcccatttagaaaaaccctctctaccctgcttggggtgtgcatggtgacctcttcccatcagattcttgggagaagtagcagagttagttactgagcagacacaatgaggagccagccaccttggtttgaaccccagttctgcctcttactagctgtgtgcccctgggcaagttacttaacttctctgtaactcagcttcctcctttgtaaaataggaaagataatggtatctgtcgtgggctgttaagtgtattcaatggaatgctatttgtagggcacatagaacagtgcttgccacatcattagttctctgtaggcatttgcccaataagttgctgtcagttgttcgttttttcttgcagccatcaaaattttagacagctttcagtggttcaatcataagaccttgaattatcttttctatattttctttcctgaaaaagaagcctatttaccatgtgccatatcttcaggtcctggtatacctatctataagataacatgggaaccgattttctattcatcagcttctcattgagcaaaagttatcccaaagctgtataattttaatctctgtatttacagagttctcctgtcctttgtacaatgagaaggaaatcatgtcacatgatacttaactcatttccttccaaaaggccagatttcatttgggttcatagctattgagcagacttgaaaaaaattctacctggggtccataggtgttcagcagactaaaaaatgtatctttccaatatattgataaaaaatctacagaagcatttattctctctattaattttttaattctggtgaaacattcttaggccaccctttgggtgtcacttgggggtcaaaagataatggcatgccctagctcctcctgcgtaaccagatctctggtttactggcaggcatttgctatttaatctaagatgcataactatttgggaaagatatcttaatcttccaccctttctttgcatcctggattttaaactgacttatgtaatcccacttatacagtctagtatttaataggagtaatggtacatggatttatacttacaacagatggaatttaaaggattgtatgaacattctactttaaatttattcctgtaaattattcataatttggagtgattgtttctattgtggtaaagaaccaagtattcaggaaaataacatgccagacaatactgtagtgtagaatatatcattgtaaggaggatttttaccttgaattactgtcacatcagtggcattaattttatgtcttccagtcctttttcccttaatttcattgtgttctcaaattcccttgccctctcatatttctcttatctcttgcctttttcccttcttggatggctggagtttttttgtttgtttgtttttcattttactggttttcctctcctcccttggatatttttctaatattattggatgctttcatgcaccagagggtagaaactcggctttgctgacccaatagctggatataaattagcactgattctctttgcctagcaaaaaccactgaatccagccaggccacaagatgggatccaggagtatatccaagttgttctctagccagcatgcagcatctattctgtgcactggtagtttccattgccattttttaaagacagtgctgctgttttgtcttttgtgtgctgaggactctcctgatggctcttctgcatgatgtaagtcctcctacttcactgaagcaatgaaggggattccaagagtcaagaccaccccatggggcttcctccccatagagacactataagccagaatagttgaagctgtggaattagaacactaaaatgggaagaatcataggtgtcagtaccaaaggtaataaaggtgaggaagattaacagagcactttaaatagatatttaattcaacttagcagcatttgttgaacgcatacagagtgcccctttactctgctgggtgctgaaattaacaaaatgcgtacaatgactctttgccttaaagggcagaaaacaagtaggttaaggtacatttgataagatgagcacaacaacaaaagtgtatagttggaacagacacacaggaggaaagtgacttaacgttagggatgggggcattcaggaatgctgcatggaggagggaacctcaacggggttctgaaagattcagtaaattaggagacgtagtaaaattccaacgcaaaatcacagtatgtgcaggattgagaggtgttatagtttcactttgtgtttagaaatgattaccttgataatgatgagaaagataggtgaaaggtgctgggggtagacaggtggtaagaaagataagggaagaagagtgcaaataagaccattgcagtagtctaggcaaagcctcagaataaggccagggcagtggaaatggagcagaaaagacagaattgaagatatttaggggtggaattagactttgtgactggttggattgtgagtgtggcttacagaagcatcagcatcaccttagtgcccccctccctcccctcaccctgtggatcttagtcacatgtaatataaccaagctcctgtttctatgaaagaaaccaacaggcctatctgtacacagcacttcataaatcctttttaaaaaaagcagaggaagataatggaatattttgccacttctaagagtgggtaataaatgtgtttgtaacccccagcccagaattgataggatttaatgagaaagtaccttttgcttgattttgtaaatgtaatctttcaatttatagacaagcaaaaatgtacccaagatgatagatgtcattaatgaaaatgttagtttcctaaccccccatccacctacccccacaaaaaattaagaacacattttagaaatactctattagaagagctcaaacagattttctgaaattagaaatgaattccaactgttgcatggatggtttcagatattctatgttctttgctattcaaatcatattttttcactatctttaatattattttttcccttcaaactagagctgaaaaagggaccagagaaaatgttgaatattcagctcgaactctgaattgatgcatggggaggcaataatagtgacaacaggaataactaatatttattgaatatttaccatgtgcctgccagacactgggctaagcattttatacagattaacttatttattttccacatcaatcctataagataagaacttttattataaccatattacagataaggacattgaagttcagagtagctaaatgatttacccaagaccacacaggtagaaactgatggagctgggttcaaacccaggattgttggaccccagaacacactcttttaaccactggacaataccactttcctgaacagctgaagtcccttttgagcttccctttcaaaaaccaaaacctaatatctttatgtcatttctttctctgagttgtacattctttaaataataccaatgtaactgacatcaggtctcaatgtacctgatgttagattatacaaaagaatataaatgacattcatagacttcctttggcatgacatcattggtcattatttttgtcattctcattttacctgcttcttctccaatataaacttgtgaaaaggatgttagaacaaggttcaaatcctgggtggtcacttgtgacatattatcttagtctggacaactcatcacttactagattttggcccaatcatagaatgatgggttctatatgtatgagcttgagcacttccaatgttccaggcatagcacaaagctccttacaacaacatattgagggacgtactagaatgagccccattttacagatgaggaaactaaggttgtgaaaggctatcttactacaaagtcacactggtaataaaaagcaaagtctggattagaacccatatctattgactccaaaatttccactgtgctacaagatctccttgttctgcattataatgataaggtctcttgataccaaagttcactctgatttttgaagatcagaagagtactatgtatgggagcttcctaatttgaaggaaaaccaactgatgcactaaagtcataataatacctaccatatatttagtgaatattatctgtcagttacaggttaagcacctgtaattctcaccacaattctagaatacaactagtatttttctcatttgcataagtgtgagaactaagtctcaaatacattaggtaacttgcccaaggtctcatggctagcaagtggcagacccagttgtcaagtcaaggtctgtaaggctccaaactatatatgcaaccctcatgctatatcatcacttatctcctggactttgtgaaaaaggaaaaaaaaaaatattctaacagtgtcagtgtttaaaattatcttaagattgttattgagatttttaattacacagtaaaaatgtatccagagttggttctttccggtgggttcgtggtctctctgacttccagaatggagccgtggaccttcgtggtgagtgttatagctcttaaagatggcatggacccaaataatgagcagcagcaagatttattgtgaaaagcaaaagaacaaagcttccacagcaaggaaggggacccaagtgggttgctgctgctggctggggtggtcagcttttattcccttatttgtccccacccatgttcgatttctgtcctatcagaatgctcttttttcaatcctccctgcaattggctacttttaggaccctactgattggtgtgttttacagagcactaattggtgcattttacagagtactgattggtgcaattttacagagcactgattggtgcaattttacagagcactgattggtgcattttacaatctcgttgctggctacagagcactgattggtgtgttttacaatccccttgctagctacagagtgctgattggtgcgttttacaatggagctacagagtgctgattggtgcgttttacaatcctcttgctagacagaaaagttctccaagtccccactagacccaggaagtccagctggcttcacttctcaaaacaatactcataaaaggcagattgttttgggttgattctcttgtctaggttgcttattgtttttctttaaaaatccttttcagaaacctgcatattcaatcctacgctctccccctccccagcccacctcaaaaggacagcagcagaaaagcacatctaggtcccatttttcttgcttgatcatccagagcatgtaaaataaggtgaaatatggcctgagtcagctcctcacaagacagaaatcagtaaccactgatattgctaagcaacaccacagagaagcaaggctgaaaatgaagtggcaaatttataagaagttgcagaatctggggacttgcttgggcatttcattatgaaccatctgcatgatccacagtaatgaccacacattattgttcactgttcgaggatgataattcctacataattatattcagatctccctctgtgattataacctacctttcaggactttcaccatattttccataatcgagatctgtccctgtgagacaattgggagttgttacatctaatgggcaactttcattcctccccaaagtaaagtttaaaacaaaacaaaaaagtcactcttttggctagtgtgatacagagttagaggggtagtaatatacgtaagggagaaaattggtcatgggatcatcacatctcagtaacgtgggctccaccacggtggcatgaaagcaagtgtgattctcataatgggcagcatttacaatcggattacaggctcatctcaaacaccgaccacagggttctggaatttcttctccatctgtgtggcttcttagagaaatgttatagagaagaggcaccaggtggtacccagaatgacattcacaggtgatgtatggctcttccaatcctagctgcctcttgcttcactgatacagcgaacagtgctagataatgttaactaatagactcttgaactcccttacttctttcctcctatccccaaaaaaactaaccttggattagccccagtttgaatcctaatccaattatgttcaaagtgccttagttattcattatggagagtgtgctggttgcaagccacattcctatgccggtgagcgcctcccgggtcctctcagcaagactaggtcttgccacaggctgtcaatagacagtgggcaagggtacgttccaggaggcatcatgggctgtaggaccccagccaagtgcatgatgagctctggtttatgcatgcatgctttttgtcctagtcgcatgtcatttctctttctgcacctcctgagtccctgcttcagggaggagggccttgtggctcctggagatgctgcccaatcctccttaggatgctgctgctgagttcaccatctcaccatcctgttgctgttagtgctaaagaccgtattctagcaggctggtttccatctccattcttttctgacttttcttcagtaaactgtaaacatggttctctttgtttgggcagataccattcccttccactgcttcctcagtgcgccttgagttgccacaacacctgctgttattcagcttttcactactcttcttccttctcttccaccatcattagactcatttttgttatgttctgcctagttcttgttcttcagtctcattcatcatatccaaggaagcagctaagaagcgatctagacattgccacgttgtcgagaatgtgtgagctttgtccgatatgaacagttccaattccaactatgtacaaataaaatgataattaaacaatatgaatgtatttatttatacctgattctgcaagagatgaggtgaggagtaatatcatctgccacaagcagatatttgaaagttgggattgatatgtgaaaataagtgtgtgcatacagaggtttgcgtctacaaaaatggatccataaaaatgcaatggtgtattgtcactgtgtagaatatagtttacatccaactttgcaaacacagagccactcatattctgtttgctgagcaaatggtagagaatgccagctgcttattccactgcttacctcagggaaggaagagaggtcacaaaacagttagttggctgatgtgatttgttaatctactccaagattactcacacatgcaaacacatatattatgtgtgaagccactatgaacatatgttttatatttatgtgttttatatttatgaaggtatttaggtcatttaagaattccgaagttgtgcaatgtcaaatatataatactgttcttaaaataccagaatatatatatatacatatatatacacgtatgtatatatttttttcactgatggcaatccccagaagtcatgaaaaaaattttctttctatttatacaaaattcaatttctttttgaagcacctgcatcttttgtaatgtgtccagaataggcagctcttcgtagaaacataaacatgtgatttttctccccaagatataattttgtgctggcgtattaaaacaattttagatagaaatctaggcacatgaaaaaatgtgtaaatgatgtatcatacaaatatgaaatacacgaatatttattattgcattttaagctagatccttcatcttgcacacaaaacccatcaattttaagtttattcatatgaggattcccagcagctggcccagttaatgggccatgggagcattctgcagaatcctacagaactatctcttgagtctaattaatgtcttgaagtttattgggagagtggtgttatgaccagaaaatatatttttaacctgctcacaaaattgcttaaaacaatctagaattttcagacaaacaaggataaaagttgctattttaaaactgaagaaaacagaaatggtgtatcccactccttctctcccctcaactgcagctgccactcccaccagctcactcaaaacagctcacattctgccaggggtttccattatagggggagtccattgatgatgtgtacacagagggggagctgatggtccttgccctgcctcctgctgtttacatagcagccaccaatgccttagtcctggagctgtggctgccctgtcacttatctgagctggtggtcttccctgggaacatgcctcctttttcctcccagagcactctgtgttgtctgtctaaaatataagaagagaaagggaagtttagaacgtggtttttcatgttagattttcctaggtaggcttcctttttctctaggaaatggttctgttggagaaaagctgtgaaataaacttcttgaactgctgttctgtggcaaggaatcacagtgtctgcaagcttccatgagcctggacgttgtccttgttcagtccctttctctcggagtgtcacctctataaaaattacagggttacaatagacctggggtgaagttatctttgccaaatactctgtttcattggatgttaagataactgtgccctattctgtaatgcagggcacactctacccccggtagcataatatatttaaagtgatttctgaaaatgggccgtgaaagctgtctgccacatggcccatgtttgcacatctccatatagttacgattgcaaaatttgacagtataactctgaatctgattaattaaaaatgtgtaaaaacaaagttcttgcattatagctcgttccttatctttgtgtcttttactgtgatgttgtagaacttggatcatatggaaaactaaaatattatgacacaatgactgaagaaggtaagaatgattttagaattgtatgcattggcttttttacatttatggtgtctgttgcttgcccattttttattcttttttttcctctctgcatgacttcagtgacattgtgtgacttactattctttctgcatttttgtctagtttttgccattgtgtttatttggaattggagacgtgcaataccatgggtaatcatgttattccattcagacaattcaaaccatcataattatgtaacacactcagagaaatggtgtcagtaatgtaaacacaaatacccactgcgccagtactttcccccacatgctcacaaaacatatagaaacattcatccaataattttctaatatgtcctttatttcagagggggatgtattttctggtggttttctgatttatgcaaaggaatgaaagatctgaagtatcttctatacccagaaccagctagacacctgattctgatgtggaggactgtaggctcatggcctgtctccctgcagtccctattgtttcagataggagcattactctgagaggctgggtccaccattccatccagtagcattgtctacatgagggttcccactccatgaggataggcatatcattttaaccattttctctgagtagagatttatataagatgtatttattaatgaattccaggcactgtcccagaacatagccttgtcccaggaagaatctcttttctgatgtaggtttgccatggaacagcaatgtgaagattttgaattcttggaaagggagctgtcctattgccttaacccctatttcatcccatacatactgcgactttttaaaaatatataatatttgtaagttatgaaaaacatttaaggttttttacatgacttttacatggatactgacaagaaatggaaaggtaccctcacagaggaatcagttcatcttattcttcagcatgagagagaaactcccaaatgtgttgcatatcttgctttcagcttctaatattctaagctgccttagcttgccaaagatctcctagttgctttgcatgcaagaagtgaaacatctgacaaccccgggcaagaggaagccccttcccagcccctctccactctggcttttgcacaacacctaggcccttctcttttgctagccctgtgctttaaattaaccaccatgatattttctaaagcagcagaccactactaggatctcacactgggccctaccaacagcttggggaaatgcagacccatgggcagcaagaggtccaatgacagaaccctacatgtaggaataagtacctgctaccaaggggatagaaggagccatttatacatttaaggaaggctcctgtcccagttattattttattcttggcttaggagggggagtttgttagcatccacctgacctgtcaagccctttactttctctctttcctccatcctgtccattaccttctatcattaatgtcctacctcctacgtacttttgtttccctgccatccccttctcctttccttcctcttctcacattcatctgagcaaatgttgtccaagtgttccctttctttcctccctacaccagacaatttaagataagacgaagatgcaaattctacttccaatctgattctatcacttgataacaaccgggctttggaagcaggaaaacacagtcaaaatcatgtatgaaatgagaaccatggctggccctgagcaaaactgtcaaattgtgtttgggggccctccctgggtcaccctcaacatactttatccttctcttgattttcccatcccctcacgcatatccctttgtgtcccattcttagctgaaaatttatccccattacagtgatgggtaataactgcaaaggcagcattttaaaagtgaaatgctggtttcataggatgtcactaagaatttttcaacaacaaggaaaaaaagaaaaagcaaaaaggcaaggctgattccataaataagtgggagagcttctgagttaagtttaatagatctctttatcacgtgacttctcagagttttcattatgctgctgtgtactgcagcatataataaattgtaaagagggatggagtagacagtgtttcccagactttctgatatggaacctttgtggaaacgctggttgaagttaatccttcacctagaacaggaacctctgaaagatttttaaattttctaaatacatagcaatccctctcaagtactagaaaaaagaatattttggaatagcagctgtccatccagccatgtaaagttgcatccttcgacaggtacctccatgacaagccaagtctggcttaaacctaattctggtactccatctaaaaggctcaaagccagctcagtaacctcagatctggtagaagccaggcatggcctcttcaaactctcaagggtctctcccctcccactggaaaataagaataatatatgtgatttatgtcactttcatgttgtacaatttaaggaagtataataaagacaaagatgtttggggcaataactgtggactagctagctagcctttgagaaataccccttccagttaagcatttgcacaattttagaattgtgactagcttttgagcagggctttgttgtgattgtccatgtgacaagtccttatttataactgtttccagggaattctctggatgttgtgtgaggtcatgacttgcaatgaagcctgggtcatttttttgtttgtttggttggttggttggttggttttgttttgttttttccctaagtggaccaaatggaaagatgcattatatataccaccctgtatccaaaaaagaactgaaagatgatttctaaatatagagaattgtgctacatatattcagcttattatttttaagcacctattgtgtacaaattattctgctgggtgctttggggaaataagagtaaagggtgggcagtttgaccccatggaatttacagactggggggaaaaaataacacacggcaatcactgagacaccaggaagaaagtggtaagtaccacaggtgttcagaagatgacaggctacaggggaggaaagattgctttccatggaagttgggcgggtgaggtgtgggaggagattttgtggagaaggtgatctttaaactgggccctaaagaattagtaaatatgaggtaaatcaggaaagaagggtgaactactaggctaagaaaaggatgaagggatagatgcacaccaacgttcactgggtgtctcccactgctgggtgcagtgctgtgggcttatatatattctatatcatctatcataatgatcataaaagtgtattttattgaagaggagaaaaccaaggctcaaagagttattttattagatgaggaaactaagactcagagaagcagactaatttgttctgggactcagaggtgataagtggtgatgcagaccctgaactcagcactgtgtccccccaaagccccgccctttgggttccactgcagcttgttgtacaagatggggagtggaacaggggcagatggaattggctacagcatagggagtgggaagaaatgcttgatggataccatagactaagaatgagggcatcacggtgtggacaacaatgagctattgaagaaagcatttctttctacatgaacactgtgccatgaaaaggttattttaataaaacaatatacttactctcacacgcaagacaaaatcatgacgtttgaaaagtttctccttgccctccgagccctttccccctcccctgtctccctcagccctaagatgctctagaacctcactggagcagctcccgaggccacacccaacctcctctccccaccccaagccaatccaaattttatctacttttttattcattctttcatgaatttgttcatcaatagccagtatgtaccaggtgctggattgggggcagagcggaggagattaaacacagttctcctaaagaactcatgaccttgtgggagacacaggcatgagatgagtagaccctaggtgctggaacagcccagtggaaggcatctttcttatcttgggaagtgagggcaggcagaattcataaagctcacagcactgtgcctggcaggcgatgtctccactgccatgttcatgtgtcccaagatgacaacctgtcttacctgccacctgtactagcacattcacttaataataactgagcaccttctctgaatgagacattttgctagacatgataaattagtgagctttactcctcccagggactttgcccctgtaataagatgtttctagggacaaaaatgtcttttggtaacttcagctacccctacacaggcagcagtcaccttatcttctcatacagtgatactgcatatttttggaagagcaatctccaacttttaaagttaataatgcatagcttatttctcatctgcagatacccaaatttcataccattcttactctagaaaattctcaataaattgaacgtggctcttttcctaaaattattctgaataataatatagaatgctagttcaaaagtaggcaagtttgtgtgatgggacagatggattaaaaggagaaaagacctttccaccaatggcagtatatagaattagtaatttttgctcttcaaaggtaaatgtttcacagagacatgtaggtagataggtagataggtaggtaggtaggtaggtaggtaggtaggtaggtaggtaggtaggtgggtaggtaggtaggtaggtcggtagatatcccaactaatatcttgcaatgaagcaatatgtggggaaagctgtctccattgtattgtcctaaactctctgccatttaaccaaagacatttccagaaaaataatttcaccactatttaaaaagtcaatccttgttcatttgtataagggagaaaatggtagaaaagttgtgatatcaagggcaaaaaaattataaagaccttttccataattaaattaagcttactgtttcatggcaaccaactgcccctttaccaagctgaaaaactaataatgtcttacatgaatcatggggtcctaaattaggcatgtggctgttttgaaaacccccattatttcaaagaaacaaaagtatcttaaggtcacattgtctagccaatcatttgatgttcttagttgcagtgaaatagtctaattattttcaaagagaaattaagttttggaataccattcagcaatgtttttcattgcccaggatatatcaactaaataatgttactttaaaataagtccttcttgttatctgtgaccttcataggacattgtaatccttgcatgaaaggatgagattgtgtcatacacactgatacatcaggcaaaatagctttagctatatatagcagaaaatccaaattaacagtgacttaaataagatggaagtttatttttctctcaagtgtaagaattcgagtagcagacaagacatggcagctctagcagctccacaataattcaagacccaggctccttccatccttctgctccaccaccctcgtatatgatttgtaacctcaagggcacctcatggtccaagatggtggctgttgagctctggccatcacgtctgtattcttggaaggaggaagggtcaaagtgattttctctagatattttgtcttctttttaaggagctttccctgaagaccctctcagtaaaatttgctcaaaactcagtcacatgactacctagtttcaaggcaatttggaaatgtagtttgttaaactgcatgaattgctgtccccaataatttaggcattatgtcattaggaaatgaaaatggaatagatattggataggcaacttgcagtctcttctcaacagggacatctcactttcatataactgtgtgttggtggagaagactgagaatagagcaagctataagagggagcttgagcactcatgttaaatttaagatgcctatgagacatccaaatggagatgttgagaaagtggtgggtgtaggagtatggagcatgggatagaggtcaggcagagctgtagatgtaaatttgggggtcataaaatatgcgtgttatttaaaagctacagaactggactataatacctagctaattgatagagaagagaaggccaagaattgagccctggggactccaaagtctagagtccgggaaaaaaggggaggcccagcaaaggagactgaggtgggaagaaaactaggatagaatggtgtctctggagccgagtgaagaacacgttaaaggagggcagtgaaaaggtgaccgcatcaatgaattgaccagtaagatcaaagaacatctactactttcttgtagtagaaagagaaaagtgagtggtggacagaaagtgggatgcttcaaattgggggttttttgacttgccaaaaacttaatatcaaattggggttttggaagtggtgcagttattgctagtgatgaggtgtaggcttaccacaggagtgggtgaatgaggacaaaacgagctgggagtgagtaggtgaaggcactaaggtaaggagccaggtgttgcagggctcacctaaaaaaagtcatcacagatgggaacagaagtaaggacagagaggaaaataataagctaggttctacgatcttcaggaatgaatggagggagaccaggaagtccgcttgggtagaaggggtggttattgctttgtactcccaaggagggaggaaaagtgggctagaagtaataaggaagggcaggatggagagcagggtgtttggaggagcaggcagctgccacttttcaagggctgcagaagaaaaggggccttcaggaaatagtcaagtttcagtaggagcaagaagacaaagagaattttcagaaaaaaaaggtgaaggatctaggagatttactgttggcaggagtgggagattgagtcagattggggacattcagggccatctggatatgagggtctggaagttgatgaatgacgtggaagctctgctaaagtgaacgaggatgtagcatgtagttaggaaacaatttgaaaatgttttagaagttagttgttaccacagcctctttcttcaaattggtcccatgggcagtttgccatggtaaagtagggtctgtctttccaggagaggggagttttggggaccctcttaagtctagctggtcaggaaagcacatcagccttcctaaattcagagaaagagagttcagcccagcataggaaggcctctcctacagacatatccaaagatggaatggcctgcctcagaagggagtgagtctctttgtctagagaagccagggaagcctccacccaaagagtgttcagataatggatgctttgatgccccttcttttgcaatgctcaagattctgtatcaagtgtaatgatagacattgatctgcagtctacttaaaccctatgaaaacttgatcttgcattttgagtaagctgccaccaagactatggtaggtaggttcctaggtcacagcatctgaaataaaaggcttgtatattatttgatctagttcatatccaaagtctttattaatatggttaaatatagcaaatagtacattagatagttcctaatgtgtattacataagtgaaacagacctttaaaatgatgaaaaaatatatattcccttttggttacaaatccaaacgtttaccacagtagaaatcttaaatcatggattaattttaactattttttgttataaaaacattacatgcacacataagtaaaaaagcaaacactacataaggaaagacaataagagtgaatctctttcctaccccagattccatccattccctagagatgaccacttttatcagtttcttttctaacctggcttttgttattaattgcatcttggagatctttccacatcagcacatttagactttcttcgttcattttaacaactgcttagtatttcactgcatggctgttccatggttggttcaatcagtaccctgttgaacatttaggatattttcattccttgttgatttatttagttattacaacaatgctacatgaatatcctctttggccattgagcaaattctactgagtagaagacatatacatataaaataaatttctgaagatagaaatgccagatcaaagagtatacacatttcaaaatttgaaagatatttgtcaaattgccctccaaaacaattgcaccaatttatgctcacactaacaatgaattgcagagcctcagacagcaaatttttttttggagacagagtctcactctgtcacccaggctggagtgcagtagcgcaatcttggcttactgccacctccgcctcccaggttccagcgattctcctgcctcagcctcccaggtagctgggattacaggcaggcgccaccatgcttggctaatttttgtatttttagtagagacggggtttcaccgtgttgaccaggctcgtcttgaatccctgacctcaagtgatccacctgactcagcctcccaatgtgctaggattacaggcatgagccaccacgcggggcctcagatggcaaatttaaataagtcctttgaagagagactcagattggcttcattacaaagcacataagcctttgtaatataacaactaccttctaatttacttgttttagaaacctgagtttttaccagagttgagttaaatacagagtgcagttatggtagaggtatttgacctctctaaattaaatgacaaggccgatttcctacacagaatctccaatttccactgcagtgtgtgcccttcatacctcaagatcattgctatccctacagaaagtctgagaagcacactgcaagttgactttctaccttgcaattaccaaagcagagagcccctactgtgcacagacaccatttccaatatcgtgctatctttcattcatcccaagtttatggcttaactcatacagttcaaactttcataaccagaggatttttctgggcacttgaatagatgttctctgtaaggctgggccttatccagaaaaaaaaaaaaaaaagaaaaaaagaaaaaaaactgtattgaaccagtactagccacattactgcttcagagatgtattcttataagcatctccctggggctggatcttaggaagacagcaggctagtctgtgtgcataaccaggctaaccagctagcaaccagcatcaggtctgttagaaagaccaaaccagctatgtgggtaaagccacagtcttcctgaaaaccaggaccaaggaattcttctaattagaatacatccagcttttcaaacttcattgcatcttattttcatgatctaaactgtcagcagtaaaagcagaaagattggacttggcaaagaaaggcagattttgtcacattgcatatgtagaaggtgttaaatggcagcagaaggcaaattgtggatgcttctttttgtgtgttactgacatctctagagatgaagatttaagttgccttcgtcagtcaaacttgaatctgttattataaattaataatatgattcccctcaaccatgaagctctttaaaaaaaaaaaggtgggaatttgttatacttggaggctggcatgttcaattaggcatggtaagtttctcttttgattagatctgaagtaaacctaatcatctcattttagtcataggcctctaagcctttagttaaggactctcagcatgtgccagtgcttctgctgctaacccacgtttcacatgagatttacaggtaccagattacaatgtaaagttgaggactaaaattaaaatataaactaagaactcagattaagtgaaaattcatagacatatgaaacccaggggacaatacatgctataagttcacaaaataggggcaactactgaatacatgttagccaaatataaaatcttccactttacaataaaataaatgattgggtaatatataggttcctcaaaagaaagaattattttgtttgattctgttttttatatataggtcatcataatctttcaacacctatttcttgagcacctactattttccagatacggtaaatcagatcaaagctctccccaaatgaataatgtcacaacccacttgcagagacacatacccaaaatatgggctttgacaaaacaactctgaagagaatttttatgcccattaggaggtagttgggttaaatgctggcaggtcttaggatatgtggcctgcctttttagtaaagtgattcttcattcgtttacctcttagacattcagagttccagggatgggaacaaaagaagacatttaaagcttctgtctagcagtctctacctggctcagaaatcaaatctgagaataaggcaaacctctgagaatttctttgtgtgagccatttgtatctgtatatatgagattgaaatgttcaaaagattaagttcctaaaacaatgaagcaggtgatctaaaatgataaagaacatcagctctcaagcactgtcagaaacggccacgatcagtaagttggcccttttcctgaaacatcatattctgcagtctgatacctgctgggagtttttttggtttgtaaaatgccaattacatctgaactcaattagattatctttttataaaaaaagggagggggtattaaaataaacattaattataaacactattagtctttggaaacttaacttaaccacagcattaatcaagcagaaagtctggcaagtttcccgcaatgtgtttctaggcttttcttccttctgtacccctaaaaaggaaggtaagcacagaatatcatttcatatagcgaaaaatctgagcactttctcacacccacagcccccaatgtcatattctttgttgtttgtgttaatgttgctatactcacaaacacttgtgaggaccagcctaggcagtgagcattgagggcacagatggagaacagcatccttatccttaacagccccacaggctagttggggagagcgtcagtgaaacacttctgaggctctatgacaagtgccgtgataggataggtatcaggtgctatgatgggggagagggactcagggaaggcttccagaaggatgagatgcctaaagcagagtcttgaaaaggaataagacaaattccttaagtttcttaaaaagaaataagacagataagaagtgtggagaattccaagccttgtgaagagtaaatcaggaggatgcaggagatgcaattgaaaactgggagaccaattacaaaagcacgttcatatttctaacgataaggtgaccctgctaggaaagatggtagaacaaattcacatttgggctgatccatcctttatgggtggccacaaaggtcattcttatagaacattattaaagaaagcctgaatgggcacacgtgggtaaccatatgaaaagacagcattggatttgtcatttaccctttgcatcaggatggctctcaaatggagcaaatgtttaaatggaactggagggcaaagctgctagaaaaacatgttagttacttctattacaattaaagtccaaaagtcataaacagataaagacagctatagctacagagataaatgtagatgtagatatgcatgattcagtatacatgcatatctttcttagctctgtccactaagaaaggctaggagcaatgacatcttagtagccataagcacacatagttctcagatcttggtttctaaataccattttccaataaaaggagtcattgcttctggagaactgattacttccaagtgctgaaccaggaaacatacaaaatgatattgaaacatcttgtgatgccagaaaataaagaaatgctttgaaaaggatgaagcttgttgactgaacacagaagccaatctgaaaaatatcccagtggtcaagattgaaacaatttaattaactgaataaataatgggcccacagaataaaagaaatatgcacacatttatactatgtaaataaataattgaatactaagtaagagagacaagacaggtgttactttcagaattccaattaatgagtgtagaggaaatgaggaaaaaaagtctttttttatgctaagcagacataagtggggagaaaaagttcttaataaggaaattccgctgcctcatttcattgtataatgggtttggtcaccacttgagatataattatgtatatattctcattaattacagaaattactcctatgattgtgtctgtaaatctaatataattaaatgtcgttaatcatctctattatgtggttcattaacaaaatatttactaaagacactttacaaaatactttattacagagtaatttaatttttactaatatcagtgtagccctgtaataagtagtttgcatcatgcttcacaaaaattagaaaaaaataatttagaggttgtacttcaaagacagatttgggaataaataaaattctgtttttggtggttttgtttaagatgaaattattatttttaagaaataaaaatttctttaaaattttcatggcacatgtatacatatgtaactaacctgcacaatgtgcacatgtaccctaaaacttacaataattaaaaaaaaaatttttgcttttaagaataaaaattaagcctgcctctattaggtaaattaactgttccagtaagatagttggtagaataaaagaggatttgtttcttctagttgctaggtggcatctcttgtggaggaactttcactcttattctctgggcctccataccctcgtaagaaggcctccaccatccatcagagcacaaatatgaagtctcttcctcacttcaggctatggactctacaagggaaccagccagatctgtcttattcaccaaatacagcccagtacatagcacggttttttgttttttgtttgtttgttttgttttgttttttgtttgttttttttttttttttttttactatttgctatgtgttagtttgtgacttgtactaacttgaaaggaagcttgacttcccagaggagctgatcatagtgagagcttcactgcaagacagtgtaggcctgtgatgggtgaggcatgattataggacacttgtcaagggatactaaagatggcagagggaagatccctctcccagagaagactgctctctgctggggaaagcaggcatgtgggcagcaagctgaaataaggactgtaacatgtacaatcaaagtgccatgagaatgttgggtttccacttcgaaaagaggggtgtgtgcagagaaaccttcaggttggacattgagttaggccttgatgaatgaggggcagcttaataaaaaaaatgaggagccaaggcccagctttccctgccctgatctttatggtgttcacctaaccttctgtcctatggaaagggctcctttgcacatgcaccttattgaccttggagatgtgcagagggggacaactgatgtgtctcccctgccttccaccactggagtataaacacctggtacaccccatttttctcctacttacctctagaaagttcctggggccccataggtagacactcagttccactggggccatgggcttggaggtcctaaagacatttactctgggtcattggcgtacaggaagcacatcacagagtcataacctcatctacttgcctagaaaccatgaacacaaggatttgttgcacccaatctgatactggagatataccagtgaacaaaaccagtgaaaaaccttgcccttttgaagcttgtctgctgccagtggaaagcaccaaataatctgtagtcataatgatatagtatattagacggtgataactactttagagaaaataaacctgggataagaaatgctggagagagaagctatagatttcaataggctgctcagacaagcctcaatgaggtgacatttgaacaagctctgtggacctctgggggaagaatactccaggtagaggggccagacaatgccatggcacagaggtgagattgtgcacagcgttttcaagaaacagcaaagagaccagcgtggctggagcagtgagagaggagaggggtagcgtacaagatcagggcagtcaggatgagtttcactgcacagaatcagtaagactttggctttcactttgacctagggacccactgcaggattttgcagagaagtaagtgccatgttctgttttactgatcactaaagatgctgggatgagactggctggggcggagaggggagggtagaagggggagactcagaccagcagaattattcctatgtgacttggtgctggttgggtgggtgtgcggagtggggagtgggaaaggggtggaaggaaaaagtggtcagattctgaaaaattttaaaaatagagacaccagatttgctggtagatggcatgtggggtgtgagagaaacaggggagcccaggataacttcatgatgccacaccagttctgttgcaagccttctgagagtgatgaaggcttaactgaagtctatgcctaacttaagtctctgcttccagaaaaaaaaggaaaggaataaatgggaggaaagttcagacacacttttgctttttaagctacctggcaagccataaacttcaaagaaagagacaagaaaggcagaaccgaaaacacaaaaatagattttaaaaggctgatttctagtttttcctcctgtgttattttttcctttcttctcccaagccatggtctgttcaccgagctgtgtttggccactctctttgcatctttttctctcttttgtcccatcgttgtttctgtgttgcagatgcttagaatgttctgtagcagctggaagttaatctgatcaccaccccagtaaccctgcctattatagacttggtgggaaagatgggagggagggaatttccaaggggctgttttaattaacagcagaagagaaacaaaattcatttcctttgagtgaacagaccctccaaacgttgtttttccatgcagcatgaagcttctgttttatgtcagaatgatctggtcaaggattttgattgctggttgtttttcgaaattcacattcagctcttatgcttggatcttttacttccgcacttccctaccaccccctcaacatacactcctctgaggacactcagctggtactcttttgcaaatttcagaccaagctaaactatattaaaattatatactaggttttgacgtaggtgcctcacgatttgagcagtttgctatttctgagatttttaactatacaaatatctgtagctatgtaaaaatacaacactttaagggtttagaccacaagagaccacaagagagtatattttttaaagttgccttgaaacatgttaaaaataactccttcactcaccttgaaaagtactcaaaaatatcataattcatttttggcaggctcaatgttacacagtcatttcttagattcgttcctctatgccaccctttatggcaatttggaatctgtgcctgaaatatctgagcaatccctttaccaccaaggtctgcacctgcaggtgctaggcatcaattctattttaaatatcaatcttcttttcagtaatttaggagaagaatttcctgtcatctacttccataatgatagcaaccctttctgaatagcagttcctaagcacttgctgtttatcagaggccattgaaacatgcaatgggtattaacccattggaccttccaaggactgttttagctggatgctcttcttagctccatcttacttattctgggcctgaggtggagaggggttaagaacctggtgcttcatgaggttcttttgagcaaatccattttgctgcagcagtagtcccttggtctgaattttggacctgcaggtgatgagggaaagctgatcatcatgtccccattttaagattgcagaggtatcaacttttaagcccagaaagccagctctatcaccttgaccttctcaattgcagaaagatctaaaatgatcctttttctaatcaagtgttgggggattcactgaaacttgaacaccagtccaacaaggccctgtatgcttaaactcctgggtctgaatgtggctgattctccagctcggcctgtgtggattgagagaagagaggatggcaacaattctcctacagcaactcaggactacatcacccttagattctgtttgattctctttttcctctaacttacagagttctttcaatgccacacaatgtgataagccctttacacatattttctcacagaagacccctgcagctcagcccttccctggatgacaggcagaaaatgagcccctcttccccaagtgagtacaggacatgtatggacatcgtatgtcactagtaactctaccaataccactggaatccctgcttaacagatcagccaataccactggaatccctacttaacagatgggaaaactaaagcacagaaatatgtagaaactcaccacaaatcgcccagcagagacagtgagagagctagggcttgaactcagatctacctacctctcaatcacatccatttaacctccatttaagcatgaaattgtgctgtcccgacacacacaccttgtttgctgttcttcacagtttgtgacttgggaatgaacagatcctgaaaatgccatgtcttcctaccccaaggcagagaggatcacttcaaaaatcacaggttctctgctggcttctgccccaggtccttcacgctcacatatatcctgttagcctcatcctcacagcatttctcaaaaggtgccctgtgatgatctcaggcgtatccagtgggctggaatcagcgaatctggtttgtcaggctctgccccaccaccctgaaggattacacatgtgtgccacattctgaaggtgggccctcaactgcagcctttctagaaactaatctttaacggaaaatccttctagcctatggcgcagccattgtcagcgcttaggatgtggaatggctgccaggtcatattagttgcgacaaagaatcatctaggagggaggttgagttgcagaagttgaagaggtctgtggagaagacagctcccaagcagccttgctgctttggcttgctgcccctaaggcagcaagaggacacaaataacgctaatccctcttactgttcaatagcacagaaaacctgaggtgctgctgcagtgggaaaagagtaacatgcagtctcactggcctgtaagatatttgagaacctataaaattccaattctagggttatctcctaccctgttctcctagattttccttggagatttggggaaaaccagcccatgagtgccagtggccaacactattctgaaagatgcttcctggcagagggcatggctccccttccaggcttttgggtcccttttattaccatttctctctggcacacacctaaactctgaaaagattcttataaccacaagtgatatgtcattagcttgtttctatccaatattttctgtgtcatgattcatgactttaggacattatttgagttgagttattttaggttttatttccacagacctatttgttgccgcttctgaatgctttcctgctttattattatcttacagataattttccaatagcaaatattgatcatctatatttcttagagtggcaggatgttctgagttcaaacaataaccctgagaccatgatgggatgattttattagaagaagcatcatctccaataaagtttcagaacctccttttttcctcttctgggtggaaaaccagatgatttgggactttttggaattgccttctgcaaaaagtaactcctctttaggctgaggactgcagagtactcaagctcactcttattatctgtttatctagtcctcaaataagactaggtttggcagccaggaaagtatcttgcatccacacagcctggaaaaccttcaggcaatcatagaccctgcctgcctcctccatccttgcatttctttttctctatttttcctttctgttcttgttcttctttaccacctccttttcctagtctccaggatttcttttccctttttcttcccagagtttcccttggaaattaaatagaaacaaccaaattcaagctaccttccagggtggtgaatctaatgctgaccttcaacattcctcatggatggagtcgtgcctatcacctcatccttctttctcactccttaggaagcccaagccacacaccaacctccttttctccatgaaatatttcctttcctacttcttttgagagtgtactcagtggtgcacattcattgcctagactaaggtacttatggcctagagattgcctttgcctttgttgtggcaaagagaccaggcttgtgactaatggagccgtgagcagaaagggtcacagctcgtgtcattttcaccattggagtccattggtctgactctagtttacaggtgctgtcactcccagccagtcacacaagtcatcaccatgaccacacgccatgattccaaaccatggaggtgggcagtgggtgccaatctgccatgctttatcctaggaaaagaagctctccaggagaaacatatttgtttggtttggttctaaataaaaaagtagaatgagatcccctgttaatatgctgctagagaacacaagccggaaaaaaaaaaaatacatcgtgggaaaactgtaggggttgtggtgttttgagatactcattatatctgaatctaggcaataatcagtttaaaatgagaatttttttataccttgaatgttcccaaggaagaaaataaaggataaaaagaagaggaatgtgctgtttccctaatctctgcacttttgcttgcttttttttttttttttttggcttattgcatgcatttacttattatgtcaataataaagaagaaatgaaacatcgcacttgtgttacagctgtttaaaatgattactttgagaatggcaattttctagtaactttttttatgtttccataagttattggggtacaggtggtatttggttacatgagtaatttctttagtggtgatttgtgagattttggtgtacccatcaaccatatgtacactgcaccatatttgtagtcctttatccctcgtccccctcccactcttccccccaagtccccaaagtctattgtattattcttatgcctttgcatcctcatagcttagctcccatgtatcagtgagaacacacgatgtttgattttccattcctgagttacatcacttagaataagagtctccaatctcattcagatcactgcaaatgctgttaattcattcctttttatggctgcatagtattccatcatatatatatgttggaatatttttatatatatattttatatatataactatatataatatatatataacagtttctttatccactcgttgattgatggccatttgggttagttccaccactttgcaactgtgaattgtgctgctataaatatgcatgtccagcaccattcccaaagcatctcatcaccaacattacttgctgcactcagttgatccttccttgccctaaatccacaaatggaatcagttgccttcttaatgccttaattgcagctgactcagctaatttggaaagctgtgatgcatgttccttactcgtttagaaacagcaatgttaattataagacaggttgagtatcccctatctgaaacgcttgggaccagaagtgtttcagatttcagattttggttttttcagttagggatactcaaagtgtaaatgtttgaaaactgaagtcaaatcagaggacccctgggcttggctttccttcccagcccattgtcaaaatctggtctggaatgagcatttaatttcagagaaatggccatgcctccagagcagctctgtttctctagacctgttttggatctcagcagtagggaagctttagtgttgcttggtgcttttgttaattttgtgagcaactgggaagggagggaagagattctcaaatagagaattgggctgaaaaatctacaaaggcaagaaagtacccttcaggaaggtcctggtgcattggggttggacagaatggagtggtcacgctattagtgcagcgtgactgaggaggccacatacctgcttggccctgagactctcttctttctcattgtgtctccttcctgccactttcttttgcttcagggaggttcagagaaaaggcttcaattctccacaagatcgccaagaagaaatgtcatgtggatgagaacgagaggcagaatggggctgccaaccacgtgggtgagtgcagggaaacatccaccccatacctttcctgggggaagcgaggggagcagagagtcaggaccagtgtgggcacccctgactcagtgcagacacacacaccgctgcagcacagcccttccctgtgcaacaggaaatgagtccctcttgccctagtgtgtacagggtatgcatggacacagtatgtcaccagtaactctagaagtccaagaagagtaaatttattctctgaggaacctgaagtaaaaccatctcttaactagtcatctccattcaagaatagaaaatcactgtatttcagggattccacataaacaggatacatgcacacgcatacacgcacacgtacacagtgtcatttaatgtttaatcaaaggtgagagtcccctttctgtaagtcttgactggtaaccagatttttatacctgtgatattgcttatggcacacacttggtcactcctgaactgagtgacagagtccttttgagatgatgctgcctctcgtttttaagaattcagcagtaacagcccccaggtctctttccactgacttttgcagagctcctgtatgacaagattgtgacattcaggcatcttattttaaaatggaacatgatgttccttctctcctgtctgtaactataatatagctctcttattctaaattcaaactaaatttaacctgatctggatctatgctataaacgaagctattacccaagtaactaaaattatctgcagacaaaattcaacagcattgctctcaaaatactgacactccgtagaagagtttctgcctttcctgttatcccaacttctacctcagggaaaatttttggctgagaaacagttaagatgcaattagatacgaaaagaaaaactggaaagaagtcagctaaaatgttaacaatagttacttcctaaagctgggattatgagttatatatatatttttctgcttctttatgcttctataaagtttttcagaataagcatattttggttttgtactataaaaatgtaaagccacaccatgaaagtctaccgcataggttgagttttgtttgtgatgtttagattcaactacacaagctattttttctgcttcacatgttgacttgtcttttatagaatgaggtagcttggagtaaaagaattagattcctgggctcagtcgcagtcctcctcctcctaatgactggccaaccttagacttggatttaatcttttttaaggaggtaggacacttaatgccaaggattcttctaatgttattggggctctcaatgactttgaactagaaaatgttattgggtctctgaatgactttgtaactagctaatgcttttcaaagtaagtccaagatttattttcatattttcttttattatgaaccttcagcctgctgtgtaaaagcactttataagctaagatgtgcacacacaggttagatattatgcctggcaggcagtctctgctcatctgttcatctctgttcttggacatgttaactccccttttacccagtattttgtgttgctagggtcaatttgaccattgcaggctaatcctaaggttttatcacatcagccaatagaattctccaaacagagttttattcacccaaggttcttcatgattttttatttaaataactgaatcaagcatactaagataaactggcatagccacatgcagcacatcacatacgtatcgctgtcactactaaaaacttggaaagataaagtaaatttgagtttctatggttttccgtatttaaatctattcatgtgtctatattccacaactaaatacataaataaacataaatatttccctatgatttccaaaatttggctgcttcaaactccacaatttttatgtaactctcaaattattttcttaagcaccagtgatggaaatgtctagtccctctgaagttgctaggaaaaaaaaagcacattcttatgtttgatgagcagctgatactgctcggatctgacaatgatgagcattctgatacccccagaaaccctgacagcatactacagcctcattccatcccaaaatccatgatttgacccaaaacagccagagtgtgtgctttcaataggaaccttttaatttccctcgcgatgaagttcagcagacctcagtggtgctggaacattgatcacctgatggtactcctctttgtcatgacaaaaaaaaaattattctagtgaaaggcaggcactataataaagatccaaatagtttatgcttcttggttgctctgtacaaggcactatgctacagtgttttatatgcattttcttatttaatctttacagaaatactctttgatcatattgttgttgttagtggtagtagtagcaacagtaatagtagtagtagtattgttaccatcaccccagttttacagatgaagaagctgaatttcagagaggttgagtcacttgcaaagggtgaaacagcacaagttgtagatccagaatatgaagccaggcctgtctgattcccagtgttacagactcccagtgcttaaccattaccctagagtcacttctcaagtgtcaaatctgcacttgctgaccctctggctttactctagctaaatgttctgattcaggaatgacacagcctttggcctctattacttgtcgagctcccccttgccttgcctgcagtaggatgctcaggtgtggagtgtgctaagttgtattcaccaggctgccctgcccatggccacctaggcactggaagagtttccactcacagagtctgaattacagctgaacataatgtcccttggaggtcaacctgtcgaaccctcttatttcacagataagattcccaagtcccagaggaagaagggaactagcctaagatagcaacccgatcaaagcagggtaaagtctaggaccctgaagccctagctaatatcctttccagagtacagtatcaaagaaacgatattactgtaagaaaatatctgaagggtacagtccagggtgtaaacaatagtatgtagattgcgtgtggttttggttttaaaatgtctatgttcatgtttcctgagtagctagttggtaaatttgcctaggctcaagaaaggcatatcatgggagctgatagggcacccaaggtaaagtgtcatgccagagcaggaagccagggcgctattaagggggcaggccgtatactgaaagacatggggaagaacggtaaaaatcctttcccgcttggctcaatatcagccctgggccttatcgcccctgggacaccactatcctctgctttagcccaacattttaggaaactcttttcaatattgctctttacccccattgattccatttgctttctctctctctctctctctctctctgtgtgtgtgtgtgtgtgtgtgtgtgtgtgtgtgtgtgtgtgtgtttaaattatatcacagaaaaaattgagcttccaaacagcaccagcacagatgttgaaatgacaccatccagtgatgcttcagaacctgtacaaaatggaaatctctcccacaacattgaaggtgcagaagcccaggtatggcttttctccattgctcttctgggctgttgttcttaactgatatcctagcgtggcagcacagaccctatattctccttggaagccccagctctcagctgggcaggaatcaggtagggccttatacatccttgtgtgtatttcccagtgccaccccagggtcccacatgcagcagcctctacatttattgaatgaatatgaatattctctaagccactgtttctccaggtgaggttgaaggactcatgcatcagtatctcctggggatgaaaatgtagatccctgggccatataccaggtgtggtgaaacaggatcactgggaagcagcacgtcggaattagcatttttaattagcatccaaggtgatttttaatgtatgataaagcttgatacctgctgcagtttaatcctttctctgtgtctttaaggtctgtgttaagtaatagagaaaccacagccatcagactcagtgagccccctttggctttctctgtccctgtggttgaaattaacactctctggcccaacccattattcaatggcacaaccacttgaacttttcagtctagtagttgtaaaacctaacatttatcaaacacctactatttgccacagcttcggtactaggcattttacataggtattagtccattttcacactgctatagagaacttatgaagaaaagaggtttaattgacttatagttccacaggctcaacaggaagcatgactgagaggcctcaggaaacttataatcatggcagaaggtgaaggggaagcaagcatgtcttaccatggcagagcaggaaagaaaaagagggaatggagatgtgccatacactttcaagcagccagatctcatgagaacccactcagtatcacgagaatagcaaaggggaaatctgccccccagattcaatcacctcccaccaggctcctccccgcaacatatggggattacaatttgagatgagatttgggtggggacacagagccaaaccatatcaacatatgttatcacctttaacctcacagctgaaggtgtaggcattagtagctccatttttttttttttttttttttttgagacggactctcactctgtcacccagcctggagtgcagtgactcaatctcagctcactgcaacctccacctcctgggttcaagcaattctcctgcctcagcctcctgagtagctcgcaccaccacacccggctaattttttttttttgcatttttagtagagatggggtttcagttgatcaggctggtctcgaacttctgacctcaggtgatccactcgccttggcctcccaaagtgctgggattataggcgtgagccactgcgcccggatagtagctccattttatagttgaggaaactgaagctcagtgagatgaagtagttaattggggttacctagtttgtagatggtagagctgagatttcatctcaggaccgtccaactgtacaatttccaccactctctctagaacacagttgctcaaaatgtaggcagaaccacctttggtgcttgttagatttctggatctcatcctgatcaggcgaatcagaatttctaagacctggagccccaaacttgcatgttaattaggcattttaaaacttgcattttacctagctcagtgtttctcaaactttaatgtacttacaaattctctggggaggtcatcttaaaattcacattctgaatttgtcaggtctgccatgaggcctagagtctgcagttctaatgagctccccagtgatgctgatgctgttggtccaaggaccatacttggagtagcactaccctaaagtttgaaagcactctctagacagaacttcccccaatgagctgaaaagtgatacagtgcctgcaaatagaaaccagactacagtcaatataacctagcagccacttcttaagaaaaaaaaaatgctaattgttgcctgttacccttattctctgatagaaattacgtatttctttcctaaggaaagtttcttcatttaacagaaagaataaggagcctgccactccttctgcccttgtctcctctgccttctatgctccttaccttcctgcccagagccctgtggtccctttgcattagctcaagagtgagctggcagagcagcttatgtccacatggataagcagcgtgtggcagcaggaggcaggccccaaggacatctggctgcccttggggatggcacagtcataggtgtgcagagggcagcctcatccccatgcctctccatctggctgacagagggacatctgtgcccctgcaagggaggaccttgctgcaggggagcaaaagagtcccagatgacccctctctgagcagagctgtggccctaggtctccacaaaggggaacaggacagatttgtgcaccaccctgctaggctcagagttcaagagcaatcaggtcttcacttacaatcagatgacctggacctcaagagcaatcaggtgacctgggcctgcaggtcaccatggcccactgtaggacagcctggtagtgaattctagatccaccagggtcaagttacctagcttccctgagctttaatttagttgcctcatctgtgaagtgcagatagcaacagtacttgcttcattgcagctatcataagggttaaatgaaataatgtacataaagcccttattacagagttagatgctaaatattgatattatgtattcatatttatcattaaaacaccattcgaggtgtcctttccttgaaagagctcattgtatgtaaagtgaaatggttttatgtatataatatttggggagtattcagggtataaataatgagtgaacgtttgtgttaggtaaataattatgacctggtatgatcttagagttctatacaaagtgctctgagagcctgccaaaggaagaagttggtcctaaatagaggagatgtaaaaactccatagaagaggcaacattcaagctgggtgttgatgggtgagtcggagtttgtccctcaaagaatgaagaaataaccaaaatgacaacatgtgcaaaggtgtaaaaccttaaaagggaaagtcatgtttagtgattggagagaaagaggatagaactggagcctaaaatacaaggtgaggagtaaggagatatccactagaaaaggtaagttggctcaaatttcttccattgtttatctaatcagaaaattttgattgtttacctaatatgtgtcagacaatgtactgggcactggagatgcccatgtgttctagcaaagcagagaatgtaaacacaacccaacatgattatacatggccccaaaggccatgaacaaaacaaagcagtgtgataggatggaaggaaaatggagaggctcctgtgagttgggagatgagggaaggcctccaaggaaatggcatttgaactgagactgaagttcaagaaggagccagccaaaggaacagcacccacaaaggcagaaataaactcagcttgtttcagaaacagaaaaatcagtatggctggagagagaggagtggaaggaggaagcatggtagcaatgaagtcagagaggagggccaagcagagctggtaggtcttgtagatcatgatagggtagctgacttctgtctggggcagcaagaagccattggaagtcagcagatgtgatttgcacttgtaaaagatccctggcgccacggtgtcttagaggttgcatttgagggaaggagggtttatggcaatagtggggcaaagaggttgttgcaggccttgagggaaagagctgatgatgacacgtactggtgtgatagacgtggaggggaggagaagtatgtggatcatgaaggacattgtgcgcactgccaaccagtctggacttcaccctcctcttgggagtgggaagctgcagaagatttagagggagcagtggcagtgtcagatttgttttatagaaagacaattctcttagaatggtcaagagggatcagaatagaaaattactagacaaagggaggtgaggtaagaacctgtggttccaggattggcacactgtggtccacaggccaaatctggcctgcagcctgtttctgtacgacccatgagacaagaatgggtttttacatttctaaagctttttttaaacaggaagcaatagcagcatatgtgacagagaccatatggacctcaaagcctaaaatatttactatctggccctttacagaaaacgtttgcccatccttagtttcaaccatctgtcttaaaaaacagaaagaaaggaaaagaaaaggaatgagaagctcttcatgtactgctatggaatgacctccaatacatgttgtttagtgaaaaaagcaacatgccaaattgtatccagtatatttgtacacggaaagaaagggggagaagggaaatagcatataaacatttgcttggaatgctgtcaaataactagtcatgttacttacttccagaacaggggctggggcggtaggaaactgggatggaaaggaagctttttaatatgcacccttctataacttttcaatgttgaaccaggcaattgcattaccttttccaaaaaaaatgcagcaacactaaaaataataatgggttaaatgaatacaggagcaatgtgctttggtcactatcacacagactctgaggatggaccacctgaattcaaatcctagctctgctgcttaccagctgtgtgaccctggaaaagtgacttaacctgttatccattttccctctttgtgaaacagggataataatggtttctatctcatagcactgttgtgaggataaatgctcttagaaccattcttggcacattataagcactgcttaggtgtatgctattattagcagtactgagtaacatttttaatggctattgaatagcccagatggcaaggcgtctattggtagaccatgtatgagctgcagtatgaacggcaaggctggatttgagagtcctttctgagccagaattgggaagatttggtattgacttggtcatagaaagtgaacaagaaaaggaagctgcagatgatgctgaggtttccaggctggaaagtctgggtgatggggtgaattagggctgggcctccagagtcagtaggaaaatgtgaacgcgggatgatcaggccacctgaagcacagtttcatggacatgattcaatggcttttcattttgttagttttatttccttttgagttgtatttttagcaagttccgttaagagtgaggtgcgcatcctgactttattagcggaaattatgagccccatacaccacactgttattctcctgagactttagcctgccttgtgtaattaacctgctgttttaaaaaccctatttacaagtgaactaatttcacattgtcacctcatctccgagaggtttctgccatacagtctttaccgtggcaatagagagcatttttaaaatactctcacagaggaatgaagtttttgcttcatttgtatattctgtggaaccaagaaataatatgactttttaaatggctgagcgatcactagcttttcccaataactgctgatccattgttgttgattccaacactgagaaatctgatctgggatgccactgagaatttatcaaccttctcaaattttttttttttttttggttattttaaaaatttactagcatttacttagtatggtttatggtatataaattaatcacattatgacgtttgtagttgctgtgttaaaaaggaaagataaaattataagaacatattccttaccttttttttttttttttttttgagatggagtcttgctctgtccccaggctggagtgcagtggcactatctcggctcactgcaagctccgcctcccgggttcacgccattctcctgcctcagcctcccaagtagctgggactacaggcgcccgccaccacacccggctaattttttgtatttttagtagagacagggtttcattgtgttagccaggaaggtcttgatctcctgacctggtgatccacccacctcggcctcccaaagtgctgggattacaggtgtgagccaccgtgcccggcccatattccttacttttacttctcgttttttagtatgatggcaaagtgtttggtttttgtttccaaaaagcagattttcttttttttttttccagattcttttctaggtttattttttttattatactttaagttcttttatatatatattttttttattatactttaagttctagggtacatgtgcacaacgtgcaggtttattacatatgtatacatgtgccatgttggtgtgccgcagccattaactcgccatttacattagatatatctcctaatgctttccatcccccctcccccaccccacaacaggccccggtgtgtgatgttccccgtcctgtgtccaagtgttctcattgttcaatttccacctatgagtgagaacatgctgtgtttggttttttgttcttgcgatagtttgctgagaatgattgtttccagcttcatccgtgtccctacaaaggacatgaactcatccttttttatggctgcatagtattccatggtgtatatgtgccacattttcttaatccagtctattgttggtggacatttgggttggtttcaagtctttgctattgtgaatagtgccacaataaacatacgtgcatgtgcctttatagcagcatgatttataatcctttgggcatatatccagtaatgggatggctgggtcaaatggtatttctagttctagatccttgaggaatcgccacactgtcttccacaatggttgaactagtttacagtcccaccaacagtgtaaaagtgttcctatttctccacatcctctccagcacctgttgtttcctgactttttaatgattgccattctaactggtgtgagatggtatctcactgtggttttgatttgcatttctctgatggccagtgatgatgagcattttttcatgtgtcttttggctgcataaatgtcttcttttgagaagtgtctgttcatatccttcacccactttttgatggggttgtttttttcttgtaaatttgtttgagttcattgtagattctggatattagccctttgtcagatgagtagattgcaaaaattttctcccattctgtaggttgcctgttcactctgatggtagtttcttttgctgtgcagaagctccttagtttaattcgattccatttgtcaattttgacttctgttgccattgcttttggtgttttagacatgaagtccttgcccatgcctatgtcctgaatggtattgcctaggttttcttccagggtttttatggttttaggtctaacatttaagtctttaatccatcttgaattaatttttgtataaggtgtaaggaagggatccagtttcagctttctatatatagcgagccagttttcccagtaccatttattaaatagagaatcctttccccatttcttgtttttgtcatgtttgtcaaagatcagatggttatagatgtgtggtattattagtgggggctctgttctgttccattggtctatatttctgttttggtaccagtaccatgctgttttggttactgtagccttgtagtatagtttgaagtcaggtagcctgatgcctccagctttgttcttttggcttaggattatcttggcaatctgggctcttttttggttccatatgaactttagttttttccaattctgtgaaaaaagttattcattggtagcttgatggggatggcattgaatctataaattaccttgggcagtgtggccattttcacaatattgattcttcctacccatgagcatggaatgttcttccatttgtttgtatcctcttttatttcattgagcagtggtttgtagttctccttgcagaggtccttcacatcccttgtaagttggattcctaggtattttattctctttgaagcaattgtgaatgggagttcactcatgatttggctctctgtttgtctgttgttggtgtataagaatgcttgtgatttttgcacattgattttgtatcctgagactttgctgaagttgcttatcagcttaaggagattttgggctgagacaatggggttttctaaatatacaatcatcatgtcatctgcaaacagggacaatttgacttcctcttttcctaattgaatacctttatttctttctcctgcgtgattgccctggccagaacttccaacactgtgttgaataggagtggtgagagaagacatccctgtcttgtgccagttttcaaagggaatgcttccagtgatgttgagaatttagccaggtttgaaagacaattcaaggcaatatgctctcccacccagaacccagcattttcttacatttcaattttgccaatctagatgggtgatttgcacttggcccacatacactgcaaaactgcctgcctgctgcatcataatccctgctgctgtgacacatcaaaaccatttaaatacgctcacaatgagggtagaagggggagagacttgcaaattccttagattcgaaaatctaaaaattcaacttttaaaaactgtgtcctacattttcatgtagcatgagacggctttttatgtgttgcagtttttatttcatttcacttctaagatttccttctgtccttagggaaatcagaattgtccctgctttggctaagagcttcccaaatgcacctgtgggcaaacagatttatataagaaaatgacattcctaggaatgtgattgattgatagacagatagatacagagagagataggtaggtagataacagatgactgaagacagagaatgtgtaatatgcaagtgattttattcttactttacaattcaaatattaccttgccatattaagctctttctcttcttaggaattcagctctgacttatttctccatactgttatctttacctaaactcagtggagtttttaagatctgcttttataaagcctcatggtgctgataaaaatgtttgagttttatgtcactaagtgaagaatgagtaggggaaacatgatggaagtgagtgtggttttttaatttctctttttaaaaagagaaatgctcaaaaatatcttcctactattaaatttagttctctgaggttgattttaaaaaacatgtcatggccaggcatggtggctcacacctgtaatcaatcccagttttgggaggccgaggcaggtggatcacttgagctcaggagtttgagactagcctgggcaacatcacaaaaacactctctctaccaaaaatacaaaaaattagcagggcatggtggtgtgcacctgtggttctagctactttggagtctgaggtgggaggatcacttgagcccaggaggcagaggctgcaatgagccatgatcaccctagtgcactccagcctaggctacaaaggagaccccatcgaaaggaaaggagggagggagggagggagggagggagggagggagggaggaaggaaggaaggaaggaaggaaggaagggtcattataaaaaccaacagttttgttacagatgaaaggaaggaagggtcattataaaaaccaacagttttgttacagattgttggaaaaggaagtaagggagggagggaggaaggtcattataaaaatcagaagttttgttacagattggcatcgtcactgttgtttaaagttgcagctatgattttagaccctctttggaagatttcgtaataaatgttggtcaaaaaatgttagctctgatagggatttctaagattatccaagcatacggtacctgaattcatatgatgtctttcttcctaaaatattatccttagtaagcaaacatttaagtgcttagcagtggtgaggtttaatacagggtttgggaacctccaaagagaaagtcgcctttctaaataattaattaaggggtaacagtcaggtccaccattttcaaactttaaaaataaataggcaagaattgcatttccctggtttttcaatctcctggaacatcagtgaagtataataagaggttctgccacccaagaagtagaggcattggtgaaaagcggtgtgtgtgtatttatgtctgacaccactagaacacaagagcagtgctgggggagagatgccaaagctgaatagtgaaagaaataagaatatcaaaagactcttcatcagactgtttatttttatttttttagagttggggtcttgcaccatcacccaggctggagtacagtggtgcagtcatggctcactgcagcctccaacttctgggcttgagtgatcctcccacctcagcttcacaagtacctaggactacaggtgcaaaccaccatgcccagttaattttttaaaatcttttgtagaaatagttcttgctgtgtttcccaggctggtctcaaactcctggcctcaagcgatccttctacccagagctccaaaagtgctgggactacaagtgtgagccaccataatccagcctagattggatttttcaaggcctgaacagtattagaactatgactgccttaaaaaagaaatccactagtgtcagagaaaacctaagacaaattataaaacaagcaaaaattagggatttttttactgaccaggccttggcacatgggttccattttctgaaggcaattttttttctgtcatctgtacatacatatttttttaggaaaaactggggtccagttcctgtatgtgatgacctgaaaaatatttaccaactgcttaagatgcactcagaggcctttcaacacatttaaaagatgaaatagatacagatcagactctagagtttctgccttaatttgaatattgacaaagaattatatattcgctgagaatctcgctggtaaaaatgccacttgtcattgggctttctgaaggagtttgaagaatgtctattaattgttcccataagatacattaagggctattaataaaaaggaaaaaaactccattaccactctggaaagaaatactatcattagtatttctaataattttaattttaatccagttgataagatgaaatgatttttgaattattttttatgtttctccagttagcttttatgttagcaaatcacttatggattttatcagcaagatttacaaagcccatgaaaacaacaaaaaccaatttactacagcaatatggaaagaaatcagtctcatccataagttgcacctcagaatcgttggagcaaaatgcaaagtgagggataacagttgcatttcaccagactcttcagaaaccattttgcaggattacagaatggtttcttggcctctcggaaaagttaggtccagacagcttcatcactcacaacaaaatattttgaaaccttgatttcagttcagagtcttgtccaagaagattaagttgttttcaggaggccattactgagtgaaaccttctcatgttgtgtttagggtgccaaattcttgattttttccatctatatataaaacaaaccatatgatggtattataaagggagtatactattttctaccatcaggcaagcaacgatttatcatttttaagaagtctgttttcggccaggagcagtggctcacgcctgtaatcccagcactttgggaggccgaggcaggtggatcacaaggtcaggaggtcaagaccatcctggatgggtgaaatcccatctctactaaaaatacaaaaaattagccaggtgtggtggcacgcacctgtagtcccagctactcgggaggctgaggcaggaaaatcccttgaacccaggaggcggaggttgcagtgagccgagatcacaccactgcattgcagcctgggcaacagagcaagactccatctcaaaaaaaaaaaaaaaagtctgttttccacttaactgttagctctgttggtttaggatgttcacacagaaggcaagacaaatgtttcagatggcattgccttccaataagaaacacgtaaacttacctctttttcacttatcttatggataagaggtaagtgataggaaagtagaggataagaacagagtagagagaattagttggttaaaaaatacaaatacaggccaggtgtggtggctcacgcctgtaatcccagcactttgggaagccaaggtgggtggatcacttgaggtcaagagttcaagaccagcctggccaacatggtaaaaacccacctctactaaaaatacaaaaaaaaattagccaggtgtggtggctggcacctgtaatcccagctactcgggaggctgaggaaagagaattcctcaaacctgggaggcggaggttgcagtgagccaagatcatgccactgcactcccacctgggtgacagagtaagactctgtctctctctctctctctctctctctctctctatatatatatatatatatacacacacacacacacacaaatgcaaagacattgagaaattaaaagaacaaagatagagatctttctatggctcaataaagaatgagtggaaaaaagggacaatttaaaaataaactaagtgaacacaatgatttatttcaaagcaaaaagatctattcaaaaatgagacctttgaaaaagataaacatccttatgggcattgtattagcctactggggctgccagaaaaaaataccagagacttggtggcttaaacaacagtttattttgccacagatctaggggttggaagtccaagatcaaggttctggcagattcagtctctggtaagggcttccgttttggtttgcagatggctgctgtctcattatgtcttcacgtggctttcccttggtgcatgtgcaccctgaggggaaagagggggacatagagacagagagagagcacaagccttctggtatatcttatgatcctattggatcagggccccacccttattacctcatttaaccttaatcacttcattagaggcctcatctctgaatacagaggagtgtagagagtagagtttgggaatatgaattgggggtggggggcgggctcataaactttcagtctataacagtcagtagggactgacatcagagttgagtaactgaacttttctgaatacagctctctggtttctatcatatggtctaacggtttttcttcttccagactctccctgttttcataccttttcaaagaagaaaagcaaatgatgctttatcctcagccttagagcccttaggaaagccatccctgaactcggggtttgctttggaagtgactcacagcacaccttgtttggcaagtcctaaactacagtttcagggtcccaaaagttcattttccatgtgtcacttagagattgtgaggtcaggtgtttgggtcggtgagaccaaaatgatccacaacccagtagtgaataattttatgggtcagtctcccatatttcaatttcaagtataatgttctatttttgtagtccattgacataaggaaggtcattagtatgctgatcccactaattaggcaatatgtttaggaaacaatggaggtgagaataacttactatttctgagccagccactgttttgggtgggagtttataggtatttcctttgtgaaatgtgtagtgtgatttaaacttacaaaatggagagtgttctatggaatgtttctgggggggcacctttcatttggcaaatagttgttgatttcagagcgtttccctgtttcaaagtgtgactatgcacttttggtaattttaccttcaagagttccaactctaccattgttttcagctctgcacaaaacacagaattaagatgtcacaatattatgagtcttgccccctgcttagaagctttgtttctgatagtaagtctacttaaagcttgcctactggaataaaatcgtattttctccttagtgctgtgaaattttgcctttcatcttatttacaaaggctttctatttattcacattgcctgagagaataagaaattattgatatcactaaagtcaatgaatgcttgataaatattgggtaagtggatagatggaggtacaaaatttttgcattttccaccttcaaatcaaataattatagaatcatattgctggaaatgttataattcacctagtcaagctttttttctcctacatgtctttgaagaaattatttttctaaatatttactttaattaagtaacatttgtttgaatgtttgagtgttcactatgtgccaaatactcttgtaagtgccttcctggattatcctagttaattttataacaaccatgttgtaaaagaatgggtatttaagacagccttgggcttgacttcctatttagtagaaaaccatatgaaaagtgggtctttgtctctcgatcccttctccaaccatccctgcaattaggtaagacactctcaagatgtcttctcctaggagcctcccacacactcactatataggcacatacctttttaccagtttccaaggaaacctaattggaaaaataaaacatgccgcctttgtcagtgagagtattttcaatgctccaataatgaaagaggagggaggtaggaagagaagcaggatagttccttgtttaaagatgatgctgtttttgttgtgcatattcttctcatggggctctgttggcctttgaacactgaatgttgaagtctgaaaattatctcctatttcagttcttgctaaagttagccccaggaaagtttattgttataaagggcttaatccatcttctacagtgtcccccagatatccattttagaagtagccagaccaagattatccacagttatgggaatcaggggtgccatcagcaatgaagtgcacataaaatcacaagccctcattttggccatagtgcacttggttgccacctcctccctacatcagactgagctaaatctctatacctttttcttgggtagagatgctaaaagacaagtctttcttcctaacttatatttgaggtcctgatgttcattggtgacttagcacctgcacttcatttttaaatttgcacctaggaacttggagatgttactcagtaagctaaaggagagaagagggcatctcagtggcccctactctccacacacccccaggtctgcccttcatttcactttcaatgctgccgtggatgttatatgactctgagaaaaggaaaagaatacaacattcagatgtttcttatcagctttttaaggaaatgtgaggcctggaacagtagctcacacccataatcccagcactttgggaggccaaggcaggaggatcacttgagtcagcctgggcaactaagtgaaatcttgtctctacaaaaaataaacaaaaattagccatggtggtgcatacgtgtagtctcagctacttgggaggctaaagtgggaggattgcttgagcccagggagatggaggctacagtgagctgagatcatgccactgcactctagcactctagtctaggtgacagagtgagaccctgtctcaaaaaaaaaaaaaagaaatgtgagccatttagaccattagaaattagttttaggctcaagaaaatataaaaaaaaaaaaagtcaattaaatgtttcattactggggtctgacccacagacccaggctgcacgatggatgaataacatactcagacaccaatattcagtgaaagagcagctagggggctgggccactcagagctgtggcagctgcatgccttgactagctggccctgccagcatttattcagcacagatttaatgacaaaggctttgagtcaacaccactacagggtaattacacatggatgattaaaggtcacgtttctggagacatgagtaaacaagctattcagataaactcccttgtattattttgtacctacttctcgccctctgccccaggataagaaccaccgccttcggctcattcttccccaaagctttgtaaaacacccccaggccttccaagaaggtttgcttctctttcctgtaatttcctcttacaattgttcccaccaccctgactgaactcctacacttcatgtttgctatacctagcttttattttaatgggtttaatttattacaaaacaaagctgagaatcctggtataactggatgtaaagcccattcatatctatttttagaactgaggaaagtggggagtgtggaataggggaagatccttaagctgggacttaggggttactcagggttggcctagcactgtcacttttgttcagcaggtcactccatctcaggttccctacccatcaaatgagggggctggtctcaaggacaggaccttacctactctgaaattctggagctccttttcttggggcctaaagctcctaaatgactgcagacatctatgattgcagcttgtctgttgtgatctattattgtccatatgattaattgagtaagaagttcttgtacaggaaggtaacccacattaaaacatcccaggagacaaatgagctctgccttgcaataacatagtgtttaacgtctggtggggcctagaaggcagtgagaggcactagtgtttttaaagtcaatgaattatgtttttatgtaaaatacgtaagtgctgacattctattttgacccagcatcattccacactgaacaggcttcccaatgataagaggtagcactcctaagtgttacagtgagccgggggagagatgtaagaacttcactcccagcctgaatcaagcctcaactgggatttaggcaaacctgggtgatcctccgagattgctccttgtgaactggtgatgagatgttattaccagtcaataaaactgaacttgaattaggcctattttcagatgcctcctgagttttcactttaattctctgataggagagattgtgttaaagtgggctcaccttcactctggaatcttgctcagtgcccttcacagacaaaaaataagaaaccgggttgcctccaagaaatatttttctggcttctgaggcaacctctgaactggtgaatccaactcaggcttctccaccgaagacctgatgtttatttgggggcaaacttctataccaaattcaaatggaaaaagtgtaagatgtacatgcaaagaagctaaatggattatcatgatgctatgagcatctggaccagctactgctgtacctcccatttaccagataaaaataaaggcaagctgattttacccttccagtagatgctgagtgacccgtgaaactcgtcttctgtgctgtgtaagagttctgatggccgagcctccagatttcaatgttcggtattgataagagtcctagaaggcagttatcaatttgttaccagttgtcacttagaataacatgtatattctctttcttgagtcttttttttccccaagatggagtctgtgttgccaggctagagtgcagtggcaagatctcagttcactgcaacctctgcctcccgggttcaagtgattctcctgcctcagcctcctgagtagctgggattacaggcacctgtcatcacacctagctaatttttgtatttttagtagagatggggtttcaccatgttggccaagctggtctcaaactcctgacctcaagtgatccacctgccttggcctcccaaagtgctgggattacaggtgtgagccaccaagcccaactctcaagtcttttcaacctgataaagttacactaaaatttctattacaccactgaagaatgttactttttttatttacgcctgcctcaccttttttcacaagattcgaggctacttacaaaaatacatctgaggaaaaaggataaaatgaatggttttgagaaaatacagcccaggatgagaaatgacagtactaagaccgcaacatggtgagcacagatccaccactgtcattgttgggtacaggttacaaatttggctctgaactccccagtgaacaaaacacagaaagaatcttatcgattacatgactcatagtatttctaagatttttcagtttctcagaagaggtctgacttttcttagtgctgagatttgagagctgtttctcccttgagtcctcataaagagaacactagatcagttaggataaacttgcactgtaaagaactaaaaacccaaaataacaatggcttgaataagataattttttttttaagagtgcccttttgattatccctgtgagaaagaacatattgtgatgtgaagtgggtgcatgacttgggcagaatttcctataaacaccaagaaaaccagtgttaagtcctgcattttgacacctagtctagtgttaacatgtggccccctgacctgcattaataagatatcttatagagagaccagattcctgcttcctatgtaattcatagagtgatcccaggctgctcagcaaatgcagtcacagcatgtgggtgcctttatcccggaagcattgccatcagtcatcagtttctgattatctctcaagtcagtataggcagtccagggcacgaatggcccttgatgggtgtcagaaactcagagcctcatatattgttcctccaccccatggcccaagattatcttctgctgtggtcaaaatgtcccctccagccagcaagaaagaggaaggaaggaggaagggtgcatccgcaccctttaaagatagatccaggaagttgtatgaaggacacttccaatacatcctttggccagaacttaatcacattgccacaccttgccgagaaggctgaaaaccagagtctttattccaagcctaggtaaaagcaagctttccatttgttaaagcataaaggcagtactgtcatcccttgctatccgtgggggactggttccaagatccccaaggttaccaaattccatggatgctcaagtccctgatataaaatggggtagaatttgcatataacaaatatatatcctcccatatcctttaaatcatctctagattgcttagaatgcctaatgcaatgtaaatgctatgtaaatagttgttacactgtattgctttttatttgtatcactttttgttgaaagctactttaccacagttctggacgctagaagtccaagcagcaggtgtttggcagggttggtttcctcagaggcctctctcctttgcttgctgccgctgccttcttgctgtgtccccatcttcatgtggcctttcttctgtgcaaaggaacccctagtgtctctctaggtgtcctaatcttctcctataaggacaccaggtagatttgattaggacccacactagtggccttgttttaacttaattacctctttgaagatcctatctccaaataagtcacattctgaggtactggtgggggttgcagcttcaacatatgaatttgggtgggggagaaggaaggggcatgattggagggaacacaattcagtccataataggcagaatagatacgggaagacaagcagtagtctcttgccacgttaaccggccagcagccctgtaactggataaatactgcagtaattctttggaatcttctgttctgtctcaccttttaaatccaagactccttgaaagcaggagtcctagaattaaatgcagtgctttgcacctgtaggtgcttagtgactgcttgcaggtgttggtggtaactacccaaggaatcacagcctgagcagacactggaactcaggattcctgattctctaccacctactctgcccagcatgctgcactgactcttttaagttctgacaaccaacacaccaccacccaccatgtgggaacttaaagtcatatgtttttgtgtcagatttttcatatcaaagattacaaggccctaaagctttacacaattctaaggcttctacagagaccccagcagatatcaaactattttaagccctcatatcaaaagccatttgaatcctttctggaccattttgctttgttttgttttctatggacactctgcagaaattttaggaggtaagggtgagttgtcacaaggtcaaagccagcataccacaactctaggaaaagttggaaaatcactgccctaacctcagtggcctctcccctggagcatccagtttgaacaaagacaaaataagcctcaaacttggaacagtatttttttcttccacttctctaaccagcttgcaaactgcctcccattgagccagagtgagactttacttggcaaagataatttcacctaatgtatgccaacagccttgctcctggggtacctctcaaatccaccccaggattctaggttcctgtacttccctgtagcaggacttggcccccaggaggctgtgaagtttccatggagagccctgttggcacagcctgagacatagtctcttctcctagtccatttctgccctagcaacagctacctccaatgcagctttggaagctgttcaatatagttaattgtttgcattggacagtagtgtgtttagagcttatacatctaaacagacaattattattttctgctatttgctagtggcaatgcctgcctggtgactttggcagatggagaaaggagctaatccgtaggttataagcagaagggttattgatgaaatgtcaccatctgttggtgtcattaaaatgatatgagtcataaagagttgcttttgtgttttatcagaaaaaggttagcttgaagtcgagagaaaagttgctagattgtggatggtagtgatgaacagagctagggggaggcatcaatctcagaatggggaggagccttaatgaactcatcagcttgatgggtcttcagggaagctgactgactctctgctagaaaaaaaaatcatctctcatgtgagatggggtatttattaagaatgatgcagtaccccaaggctcccatgcctatttctggggcatctgccaggaggtaaggggaaagtcattcatttgggttaaacaagaaggatcatatctgggagggaacagacaggaaaatatacctgtctccttaatccacattggccccatgacacaaagattattcacgtagctagctgacaccttgggaggctggtgagcccaatagggaatgatattctctacacctgctatatccacaaggaagagacagaggtggcatagaagagggaccagagccagcacaccaagcttccaccaaagatgggagccctcaggatggaagaaagaaagcaatggatggaataatatgtgaattgcatagaaagaaatagggagtgtgaggtgtatatttaaaaaggatccagggtaccaaaataaactgtcaacttcctgatgctgccttattattattatacctaatccctttaattccaccatatttgctgtttacaaattcttttacccactgccaaggacatatacccaaagcagaagaacctgttgttactaacccttttcaatatggcttcgcatcccttttttaaattattatttcaaattgtaactcctagggagagttgaagagattgtataaaacactatacatactttctgcagtacctcagttttgccagataaataaacaagacatagcattgctgtgagcccggcctctcacccagccctgacctctcctcaaggccagctgacctgagcctgcccctcatgccacctctgtagggacacaggtgctggaggggggcgctgttactgtttgaaaagtgtatggtgctggaagcaagagccccaggggtaggagctttctaaagttatttatatggtctcaaaaggaagcatcagtggaaaagttcctgttgatatttttagatctgatgcgtggtccactgctgcactttcattttcaaacaagcagggaagggagtgattgatgatgtctacagtgctgttttggaagtattgagggctcagctgacaggctaacggtcaccccctgctgggcccagaccctccccctccatctcttctagccctgacttcagaagctactgacttcagtggctgacaaataaaacgctggccattggctgccaagtcagagactctgaagtttgttccctggctccgacaccccgtgcaggttcactgtcttgcttgacttgtattttctgtttctgaggactgagacatatgtttgcataagttgtctttggctgcaagtacaatggtttagaatttagctgtggttaagcaggtgaccaactcacaacctgagaagggtgtgggggtgacagggagaaatgaagagaggtcggtcaatgggtacaaacttacagttagatagaagaaatcagtcctaatgttccttaggagactagggtgaccgtagctagcaacaacacactatatattccaaagctagaagagagggcttggaatgttaccacacatagaaatgataaacactcaaggtgatggaggccccaaataccctgacttgatcattacacattcaatgcatgtaaaaaatacatttaccccagaaatacgtaaaatatcaatgaaagaaaaaaactcacaactacacaaaaatcaatgcacttagctattccaaggccagtgggaagttaatctctcttagtagtattactgaattgtttctgtggttactttcatttgcctgatgaaaatcagtgttccaaaaaaaaaaaaagagaaaaagaaatattttttatcagtgctctccttcccaaggagcctgaaagcttgtgactctgtcttcaaggagaaggaaagatggggagatggtggtcatcaagtcttttcctccacagatatagtttgttataagaagctcgtgaattgtagttgtagcccactccagttgaataatcagttgatgaacatgagaaactgaagagcattcaaggagataaaagaaaattcttacatgctcatggctggacaatgtattatttgttcctaggactcagactgtgacaaatctcaaaatcacacatatgaagctactggaacgagtccagaaaactgataagacatggagcttcccctttgttctgtgctcctgttgttgtgcctgtgtacattttatttttttgtttgtttaattttacctctttttctaccacagaccgctgatgaggaggaggaccagcctctcagccttgcctggccttctgaaacccgcaagcaagtcacgtttctgattgttttccccatagtgtttcctctctggattacgttacctgacgttcgcaaacctgtaagtaaagcattttaaaaatagttcccttgtaaaacatatggtacataacagggtgcatagtctgcttcagtttgtgttaaaaggaaaaaggaagtacacttgtatcaaaatctcacatataccccataaataggtacaactattatgtaacaagaaaaaatatttaagtttaaggaaaaagagaaagtgacattaagaatatacagatttctctgagcagacacacaatcacactgattgttcaggttatcaaatctgcataacaaactaccccaaaacttagtggtgtgaaacaaccatccttttagtcttttcttggatcctgtcgatcaagaatttgaatagggcacattgtggatggcttgtctctgctccattatgtctgtggcctgaagtagaaagacttgaagggttatgtgtatctcatcttggggctaccatcatctggaggcttctttgccatttctggcacctgggcagaaatgattcaaaggttaggctcagctgggacggtctactggaatgcctaaacatggccttttcatgtgacttgggcttcctcacagcatggtagcctcaggatagtgaaatgttttacataagaggtcagtcaggactccaagagtgaatgttgcagtgacagaaggcagaaactgcatggtctgtgatgattcagtcccagaagttacatagattcacttctgctatgccctattgaccaaagcagtcctaagtgtgtcttgattaaagggggaggaaacaaaaagtttacctagaatacgtcagtgtcatatagcatatcactctcctgttgggaagagtgtcaaagaatttgcaaacatgttttaaaacccccacagcgtttgtctctgagaaggtaagaagggcaactgaaggtctgaagcaggaaggttactcacattttcttgaacattcttgtgactatcattactttaatcgactatgtttactatcattactttaatcgattttattatctaccattatcacatactgggtgctccgaacgcaacaacatcagcaaattacaacctgagtatagaccaaatcaagagaatacacccacccactgttgttgaagtgagttcttgggccattgccccagaggtgaaagaactaaggagagggaaggagaaacagctctacttcttagtataggaccacacacacaaactcattcaacaaaactgtatacctaatatgcatcagattctgcactaaatgttcctcgtgagagtctcatttctgtttggaacagcacacagtatactcggaaatacagtccatcccagggctggcccttggcgggagcaatgagagaagtcccagtggctaccctggccatgctgcaggggctgactctcaaagggggactgcacagggaggagagcattgtggacagctccattttcttgttaggtgcatcagccagggcagtcgtcataaccaactgccttgattgattcctgttggtttgccacagttgccaatcaggagactttgatctggtctaataccttcttgatctttcaactcagattggcaagaggatgaacattttgccagcctttattctaaaagtccttcccaaccctgagagcccaaggccttgagttattggtccacagtaaactatattatgtaatttcaggaaacatctagggtaggaatatgtatattgttggcataagtagaaagaaacttaggcacaaagaagttaatttatacctggtcatttcctagaaggtagggctgagatccagacccaggtctatgtgaccacatggcttgggctttgcttcatatttagtgatgccacaaagtagaaaaaaaaatcatttaaaaaaaatcatttctaaaagcacttggaatagaatattttgataacttccagcataatttatcataagtcttcaagagctccttcatttgaaaaagacagaagaaaaaccccatcccattaccttggcccttaaataatgcagcctagtggagagccatgtcttgtcaagtagacaacaagaaaggactccttgtatggactcccagcagtataggtttcctggtaaaggatgcatgacacaggtgtggctcacttaaagcaatatttaagtttctttattcaagataccattttacagcatctgcactatgcaaaggcctggcttcctgaaaacccacaaccaaatagctgaatgtgtttgatttttcttggctcacaccacactgacatttctaagatatgcttgcattgtctctcctctctctgtctgtctctctctctctcttgctctgctgtttagtccaatgcttttgtgtggccctagggaggaaaatcagggagacagatacagttttctaaattcccaaaaggggcctcatgtggtgtggcccccagaagatgggggcagattggttgatgagaggatgtttgcatacaaccattgaggcactcaggaagatgtgcaggaatgggaggaagatgccagtaagtcaaggcccttgactctcagaattgggaggaactctcagagaaagggctggcaaagtgtttatcctcttggtaatcctagttgaaacgtcaaagaagctgttagggaagatcaaaagctcccaacttcctaactggtaacttttggaaaaccaacaaaaatcaatcaaggcagtcgttacgtgggtcatgacaactgctctggctgatgccacaatccggagaggcacagagcaagaaaacagagctgtccccagtccactgctccctgtgcagtccccctctgagagccagcacctgcagaatgggcagggtagccagcggggctttacttcattgctcccccaagtgctagccctggaatggactggatttcttttgtttttctgagtactctgtgctattccaagcagaaataagactcttaggaagaacactttggtttttttcaacttccttcacaaatatttattgagcacctattatgtgccaaacactgggccttggccagtgcttaagagacataaagacagggttgctggcaagatggccaaataggaacagctccagtatgcagctcccagcgagatcgccacagaaggcaggtgatttttccacatttccagctaaggtggggtgtggggtgtcgcctcacccaggaagtgcaaggggtcaggaaattctctcccctacccaagggaagctgtgagggactgtgccatgaggaacagtgcactctggcccagacactgtgcttttcccacagtctttgcaacccacagaccagaagataccctccagtgtcctgggtttcaagcacaaaactgagtagccatttgggcagaccctgagctagctgcaggagttttgtgttgtttttttttttcccatacctcagtggtgccagaacaccagtgagacagaaccattcacttccctggaaaaggggccgaaggcagggagccaagtggtctggcttggtgggtccaacccccacggagtccagcaagctaagatccacaacttgaagttcttgctgccagcacaacagtctgaggtcaacctgggatgctcaagcttggtgggggaaggggtgtcaaccagtgctgaggcttaagtaggcagttttaccctgacagtgtaaacaaagccaccgggaagttcaaactgggtggagcccactgcagctcagcaaggcctctgtggccagactgcttctatagattcctcctctctggcaagggcatcactgaaaaaaaaaggcagtacccccaaacatatagataaaacccccatctccctgggacagagcatctggcggaaggggcggttgtaggtgcagcttcagcagacttaaacgtccctgcctactggctctgaagagagcacaacgttcaagctctgctaaggatcagactgcctcctcaagtgggtccctgacacccatgtgtactgactgggagacagctcccagtaggggccaacagacctacctcatacaggagagctctggctggcatctggcaggtgcccgtatgagacaaaggttccagaggaaacaacacgcagcagtctttgctgttctgcagcctcctctggtgatatccaggcaaacagggtctggagtggacctccagcaaactccaacagacctgcagcacagggtcctgttagaaggaaaactaggccaggtgcagtggctcacggctgtaatcccagcactctgggaggccgaggagggcagatcacaaggtcaggagattgagaccatcctggctaacacagtgaaacccgtctctagtaaaaacacaaaaaattaggcaggcgtggtggtgggtgcctgtagtcccagctactcaggaggctgaggcaggagaatggcatgaacccaggaggtggagcttgcagtgagccatgattgcaccactgcactccagcgtaagcaacagaatgagactctgtcacaaaaaaaaaagaaaaaaaaactaaaaaataggaatagcacatctactcagagaccccatccgaaggtcactgactacaaagaccgacggtagataaattcactaagatggggagaaacccgcgcaaaaaggctgaaaattccaaaaacctgaacacctcttctcaaggatgacaactcctcaccagcaatggaacaaaaatggatggagaatgagtttcatgactcgacagaagtaagcttcagaaagtgggtaataacaaactcctctgagctaaagcagcatgttctaacccaatgcaaggaagctaagaaccttgaaaaaaggttacgcgaattgctaactggaataaccagtttcgagaagaacataaatgacctgatggagctgaaaaacacagcatgagaattctgtgaagcatacacaactataaatagctgaatcaatcaagcagaagaaaggatatcagaaagtgaagatcaacttaatgaaatgaagtgagaagacaagattagagaaaaaaggatgaaagggatcaaacaaagcctccaagaaatatgggactatgtgaaaagatcaaatccacctctgattggtgtacctgaaagtgatggagagaatggaaccaagttggaaaacacttttcgggatatcatccaggagaagttccccaacctagcaagacaggccaacgttcaaattcaggaaatacagagaacaccacaaagatactccttgagaagagcaaccccaagacacataatcatcagattcaccaaagttgaaatgaaggaaaaattgttaagggcagccagagagaaaggtcaggttacccacaaagggaagcccatcagaccaacagcagatctctctgcaggaaccttacaagctagaagagagtgggggccaatattcaacattcttaaaagaattttcaacccagaatttcatatccaggcaaactcagtttcgtaagtgaaggagaaataaactcctttacagacaagcaaatgccgagagattttgtcaccaccaggcctgccttacaagagctcctgaaggaaacactaaacatggagaggaacaactggaaccagccactgcaaaaacataccaaattgtaaagaccatcaacactataaagaaacaacatcaactaacaggcaaaataaccagttagcatcataatgacagaatcaaattcacacataacaatattaaccttaaatgtaaatgtgataaattccctaattaaaagacacagactggcaaattggataagcgtcaagacccatcagtggctgtattcaggagacccacctcacatgcaaagacaaacataggcttaaaataaagggatggaggaagatttaccaagcaaatagaaagaaaaaaaaaaaaagcaggggttgcaatcctagtctccgacaaaacagactttaaaccaacaaagatcaaaagagaaagaaggccattacctaatggtaaagggatcaatgcaacaagaagagccaactatcctaaatatatatgcacaccattcaggagcatccaagttcataaggcaagttcttagagatccacaaagagacttacactcccacacaataatagtgggagatttaataccccactgtcaatattagacacatcaatgagacagaaaattagcaaggatatccaggacttgaactcagcgctggaacaagcagacctaataaacatctacagaactctctaccccaaatcagaagaatatacattcttctcagcacctcatcgcacttattctaaaatggaccacataattggaagtaaaacactcctcagcaaatgcaaaagaatggaaatcataacaaacagtctctcagaccatagtgcaatcaaattagaactcaggattaagaaactcactcaaaactgcacaactacatggaaattgaacaacatgctcctgaatgactactgggtaaaaaacgaaatgaaggcagaaacaaagatgttctttgaaaccaatgagaactaacaacacaacgtacaatctctgggacacatttaaagcactgtgtagagggaaatttatagcactaaatgcccacaagagaaagcagaaaagatctaaaatcgacaccctaacatcaaaattaaaagaactagagaagcaagagcaaacaaattcaaaagatagcagaagacaagaaataactaagatcagagcagaactgaaggagatagagacatgaaaaacccttcaaaaaaaaaaaaatcaatgaatccaggagctggtttcttgaaaagatcaaaaaatggatagactgctagccagactaataaagaaaagagagaagaatcaaatggatgcaataaaaaatgataaaggggatatcaccactgatcccacagaaatacaaactaccatcagagaatactataaacacctctatgcaaataaaccagaaaatctagaagaaatggataaattcctggacacatacaccctcccaagactaaaccaggaagaagtcgaatccctgaatagaccaataacaacttctgaaattgaggcagtaattaatagcctaccaaagtccagaaccagatgaattcactgccaaattctaccagaggtacaaagaggagctggtaccattccttctgaaaccatttcaaacaatagaaaaagaggggatcctccctaactcattttacaaggccagcatcatcctgataccaaaacctgccagagacacaacaaaaaaagaaaatttcaggccagtatccctgatgaacatcgatgcgaaaatccccaataaaatactggcaaaccaaatccagcagcacatcaaaaagcttatgcaccaccatcaaggtggcttcatccctgggatgcaaggctggttcaacatatgcaaatcaataaatgtaatccatcacatacacagaaccaatgacaaaaagcacgtgattatttcaacagatgcagaaaagtccttcaacaaaaattcaacacccttcatcctaaaaaattctcaataaagtaggcactgattgaacgtatctcaataagagctgtttatggcaaacccatagccaatatcgtactgaatgggcaaaaactggaagcattccctttgaaaactggcacaagacaaggatgccctctctcatcactcctattcaatatagtattggaagttctggccagggcaatcaggcaagagaaagaaacaaagggtgttcaattaggaaaagaggaagtcaaattgtctctgtttgcagatgacatgattgtatatttagaaaactctattgtcccagcccaaaatctccttaagctgataagcaacttcagcacctcaggatacaatatcaatgtgcaaaaaatcacaagcattcatatacaccaataaaagacaaacagagagaagggaggagccaagatggccgaataggaacagctccggtctacagctcccagcgtgagcgacgcagaagacgggtgatttctgcatttccatctgaggtaccgggttcatctcactagggagtgccagacagtgggcgcaggccagtgtgtgcgtgcaccgtgcgcgagccgaagcagggcgaggcattgcctcacctgggaagcgcaagggtcagggagttccctttccgagtcaaagaaaggggtgacagacggcacctggaaaatcgggtcactcccacccgaatattgcgcttttcagaccggcttgaaaaacggcgcaccaggagactatatcccacacctggctcagagggtcctacgcccacggaatctcgctgattgctagcacagcagtctgagatcaaactgcaaggcggcaacgaggctgggggaggggcgcccgccattgcccaggcttgcttaggtaaacaaagcagccgggaagctcgaactgggtggagcccaccacagctcaaggaggcctgcctgcctctgtaggctccacctctgggggcagggcacagacaaacaaaaagacagcagtaacctctgcagacttaagtgtccctgtctgacagctttgaagagagcagtggttctcccagcacgcagctggagatctgagaacgggcagactgcctcctcaattgggtccctgacccctgacccccgagcagcctaactgggaggcaccccccagcaggggcacactgacacctcacactgcagggtattccaacagacctgcagctgacggtcctgtctgttagaaggaaaactaacgaccagaaaggacatctacaccgaaaacccatctgtacatcaccatcatcaaagaccaaaagtagataaaaccacaaagatggggaaaaaacagaacagaaaaactggaaactctaaaaagcagagtgcctctcctcctccaaaggaacgcagttcctcaccagcaacggaacaaagctggatggagaatgattttgacgagctgagagaagaaggcttcagacgatcaaattactctgagctacgggaggacattcaaaccaaaggcaaagaagttgaaaactttgaaaaaaatttagaagaatgtataactagaataaccaatacagagaagtgcttaaaggagctgatggagctgaaaaccaaggctcgagaactacgtgaagaatgcagaagcctcaggagccgatgccatcaactggaagaaagggtatcagcaatggaagatgaaatgaatgaaatgaagcgagaagggaagtttagagaaaaaagaatcaaaagaaatgagcaaagcctccaagaaatatgggactatgtgaaaagaccaaatctacgtctgattggtgtacctgaaagtgatggggagaatggaaccaagttggaaaacactctgcaggatattatccaggagaacttccccaatctagcaaggcaggccaacgttcagattcaggaaatacagagaatgccacaaagatactcctcaagaagagcaactccaagacacataattgtcagattcaccaaagttgaaatgaaggaaaaaatgttaagggcagccagagagaaaggtcaggttaccctcaaaggaaagcccatcagactaacagcggatctctcggcagaaaccctacaagccagaagagagtgggggccaatattcaacattcttaaagacaagaattttcaacccagaatttcatatccaggcaaactaagcttcataagtgaaggagaaataaaatactttatagacaagcaaatgctgagagattttgtcaccaccaggcctgccctaaaagagctcctgaaggaagcactaaacatggaaaggaacaaccggtaccagccgctgcaaaatcatgccaaaatgtaaagaccatcaagactaggaagaaactgcatcaactaacgagcaaaatcaccagctaacatcataatgacaggatcaaattcacacataacaatattaactttaaatataaatggactaaattctgcaattaaaagacacagactggcaagttggataaagagtcaagacccatcagtgtgctgtattcaggaaacccatctcacgtgcagagacacacataggctcaaaataaaaggatggagaaagatctaccaagccaatggaaaacaaaaaaaggcaggggttgcaatcctagtctctgataaaacagactttaaaccaacaaagatcaaaagagacaaagaaggccattacataatggtaaagggatcaattcaacaagaggagctaactatcctaaatatttatgcacccaatacaggagcacccagattcataaagcaagtcctgagtgacctacaaagagacttagactcccacacattaataatgggagactttaacaccccactgtcaacattagacagatcaacgagacagaaagtcaacaaggatacccaggaattgaactcagctctgcaccaagcggacctaatagacatctacagaactctccaccccaaatcaacagaatatacatttttttcagcaccacaccacacctattccaaaattgaccacatagttggaagtaaagctctcctcagcaaatgtaaaagaacagaaattataacaaactatctcccagaccacagtgcaatcaaactagaactcaggattaagaatctcactcaaagccgctcaactacatggaaactgaacaacctgctcctgaatgactactgggtacataatgaaatgaaggcagaaataaagatgttcttcgaaaccagcgagaacaaagacaccacataccagaatctctgggacacattcaaagcagtgtgtagagggaaatttatagcactaaatgcctacaagagaaagcaggaaagatccaaaattgacaccctaacatcacaattaaaagaactagaaaagcaagagcaaacacattcaaaagctagcagaaggcaagaaataactaaaatcagagcagaactgaaggaaatagagacacaaaaaacccttcaaaaaatcaatgaatccaggagctggttttttgaaaggatcaacaaaattgatagaccactagcaagactaataaagaaaaaaagagagaagaatcaaatagacacaataaaaaatgataaaggggatatcaccaccgatcccacagaaatacaaactaccatcagagaatactacaaacacctctacacaaataaactagaaaatctagaagaaatggataaattcctcgacacatacactctcccaagactaaaccaggaagaagttgaatctctgaatagaccaataacaggctctgaaattgtggcaataatcaatagtttaccaaccaaaaagagtccaggaccagatggattcacagccgaattctaccagaggtacaaggaggagctggtaccattccttctgaaactattccaatcaatagaaaaagagggaatcctccctaactcattttatgaggccagcatcattctgataccaaagctgggcagagacacaaccaaaaaagagaattttacaccaatatccttgatgaacattgatgcaaaaatcctcaataaaatactggcaaaccaaatccagcagcacatcaaaaagcttatccaccatgatcaagtgggcttcatccctgggatgcaaggctggttcaatatacgcaaatcaataaatgtaatccagcatataaacagagccaaagacaaaaaccacatgattatctcaatagatgcagaaaaagcctttgacaaaattcaacaacccttcatgctaaaaactctcaataaattaggtattgatgggacgtatttcaaaataataagagctatctatgacaaacccacagccagtatcataccgaatgggcaaaaactggaagcattccctttgaaaactggcacaagacagggatgccctctctcaccactcctattcaacatagtgttggaagttctggccagggcaatcaggcaggagaaggaaataaagggtattcaattaggaaaagaggaagtcaaattgtccctgtttgcagacgacatgattgtttatctagaaaaccccatcgtctcagcccaaaatctccttaagctgataagcaacttcagcaaagtctcaggatacaaaatcaatgtacaaaaatcacaagcattcttatacaccaacaacagacaaacagagagccaaatcatgagtgaactcccattcacaattgcttcaaaaagaataaaatacctaggaatccaacttacaagggatgtgaaggacctcttcaaggagaactacaaaccactgctcaaggaaataaaagaggacacaaacaaatggaagaacattccatgctcatgggtaggaagaatcaatattgtgaaaatggccatactgcccaaggtaatttacagattcaatgccatccccatcaagctaccaatgactttcttcacagaattggaaaaaactactttaaagttcatatggaaccaaaaaagagcccgcatctccaagtcaatcctaagccaaaagaacaaagctggaggcatcacactacctgacttcaaactatactacaaggctacagtcaccaaaacagcatggtactggtaccaaaacagagatatagatcaatggaacagaacagagccctcagaaataatgccacatatctacaactatctgatctttgacaaacctgagaaaaacaagcaatggggaaaggattccctatttaataaatggtgctgggaaaactggctagccatatgtagaaagctgaaactggatcccttccttacaccttatacaaaaatcaattcaagatggattaaagatttaaacgttagacctaaaaccataaaaaccctagaagaaaacctaggcattaccattcaggacataggcatgggcaaggacttcatgtccaatacaccaaaagcaatggcaacaaaagacaaaattgacaaatgggatctaattaaactaaagagcttctgcacagcaaaagaaactaccatcagagtgaacaggcaacctacaacatgggagaaaattttcgcaacctactcatctcacaaagggctaatatccagaatctacagtgaactcaaacaaatttacaagaaaaaaacaaacaaccccatcaaaaagtgggcaaaggacatgaacagacacttctcaaaagaagacatttatgcagccaaaaaacacatgaaaaaatgctcatcatcactggccatcagagaaatgcaaatcaaaaccactatgagatatcatctcacaccagttagaatggcaatcattaaaatgtcaggaaacaacaggtgctggagaggatgtggagaaataggaacacttttacactgttggtgggactgtaaactagttcaaccattgtggaagtcagtgtggctattcctcagggatctagaactagaaataccatttgacccagccatcccattactgggtatatacccaaatgactataaatcatgctgctataaagacacatgcacacgtatgtttattgtggcattattcacaatagcaaagacttggaaccaacccaaatgtccaacaatgatagactggattaagaaaatgtggcacatatacaccatggaatactatgcagccataaaaaatgatgagttcatgtcctttgtagggacatggatgaaattggaaaccatcattctcagtaaactatcgcaagaacaaaaaaccaaacgccgcatattctcactcataggtgggaattgaacaatgagatcacatggacacaggaaggggaatatcacactctggagactgtggtggggtcgggggaggggggagggatagcattgggagatatacctaatgacagatgacacgttagtgggtgcagcacaccagcatggcacatgtatacatatgtaactaacctgcacaatgtgcacatgtaccctaaaacttaaagtgtaataaaaaaaaataaataaataaaaaattaaaaaaaaagaaaatttcttagaatcagataaaaaaaaaaaagacaaacagagagccaaatcatgagtgaactctcattcacaactgctacaaagagaataaaatgcctaggaatacaacttacaagggatgtgaaggacctcttcaaggagaactgcaaaccactgctcaaggaaataagagaggacacaaataaatggaacaacatgcctgctcatggataggaagaatcactatcatgaaaatggccatactttccaaagtaatttatagattcaatgctgtccccatcaagctaccactgactttcttcacagaattggaaaaactgctttaaagttcatatggaaccaaaaaagagcctgtatagccaaggcaatcctaagcaaagaacaaagctggaggcatcacactacctgactccaaactaggctaccgtaaccaaaacagcatggtactggtaccacaacaggtatatagaccaatggaacagaacagaggcctcagaaataacaccacacatctacaatcatctaatctttgacaaacctgacaaaaacaagaaatggggaaaggattccctatgtaatcaatggtgctgggaaaattggctagtcacatgcagaaaacttaaactggaccctttccttacaccttacacaaaaattaactcaagatggattaaagactccaccttaagacctaaaaccgtaaaaatcctagaagaaaacctaggcaataccattctggacataggcattaggaaagacttcatgtctaaaacacgaaaagcaatggcaacaaaagccaaaattggcaactgggatctcattaaactaaagagcttctgcacagcaaaaggaactaccattagagtgaataggcaacctacagaatgggagaaaaattttgcaatctatccatctgacaaacggctaatatccagaatcttcaaagaacttaaatttacaagaaaaaaacaaccccatcaaaaagtgggcaaaggatatgaacagacacacttctcaaaagacgacatttatgcagccagcaaacatgaaaaaaaagctcatcatcactggtcattagagaaatgcaaatcaaaaccacaatgagatactatctcataccagttagaatggtgatcattaaaaagtcaggaaacaacaggtgctggagaggatgtggtgaaataggaacacttttacactgttggtgggggtgtaagttagttcaaccattgtggaagacagtgtggcaattcctcaaggatctagaattagaaataccatttgacccagcaatctcattactgggtatatacccaaaggattataaatcattctactataaagacacatgtacacatatgtttattgtggcactattcacaatagcaaagacttggaaccaacccacatgtccatcagtggtagactggataaagaaaatgtgccacatatacaccatggagtattatgcagccataaaaaaggatgagttcatgtcctttgcagggacatggatgaagctggaaactatcattgtcagcaaactaacacaagaacagaaaactaaacaccgcatttttttcactcataagtgggagttgaacaatgagataacatggacccggggaggggatcatcacacactggagcctgtcaaggggtggggggctaggggagggagaacattaggacaaatatctaatgtaggtgacaggttgatgggtgcagcaaaccaccatggcacatgtatacctaagtaacaaagctgcacattctgcgcatgtacccaagaacttaaagtgtatttaaaaaaagagatacaaagacaaaaaatgtacaatttatattgttaaggcactctaagtctagtaaaggaaaccaggcatggccacatataaccacagagcaagactttacagctgtattagtgagagaagctggatttgaacccaagtcccctgactccagatcattttcattgtaccacattgactgtgatgggttttccccccacagctgattagctgtacaacattaggaaaagcacttctcaactctggaccgaattttttcccctctgtgaataaatggtcagaaggtttctggattccctgccagccatgacattctgtgattaaggaaagcatgagataaccatcaaaaaagctactgcacatttaaagtgatcctacatcccagattacccaggacggtcccagtttattcacaaagcatattggtttggaagatatatgggtgtattctgcatatacaatatgccaaatgaaagaaaccatgccagttgacacaaatccagtaagtgatcatgcttagttagaagatttttgttagatttgaccttgtatcagttatcttttgctttgtaacataccaccccaacctagtggcttaatacaagacattttttagcccataattctgtgaattggcaatttgggttgtgctcagctggacagttcagctgctggtcttagtggtgctcagttaatggctgggagctggttggtacagggctattgaagctggaacagcttgtctctgctccacatactctcttatctcaaagcaggctagcctggacttagtcacataatggcaaagtgccgagagcagcaagtatgaaagctacaaagccctcttgagatctagtttgaaatttgcacgctgtcacttccaatacattcttttggtcaaagcaagtcataaggccagcccagattcgaagagtggaaaaatagacctcacctcttgatgagaggagcagcaaagtattgtgcccatttttgcagtccaccatagaacttatgtgcttccacagggacctcttgagaaaatacatacggagaggaaagagaggggaaaaattaactaatacatatttgcccctccttagggcctggcagctctgcctcttctgtagattttgattgcccaagaagatgaacataccaaaccttgacagtaattacaaggaaaacatgattttttcatgtatacttatagtttcagagtatatagtactcccactagcttttatttctgcttcatttatatgcaaattgtatgacagtgtttgttgaaccatgcataatttcagctcacataattaatatgggctttacacttacagttttattaatggctttgtttccaaagtaaaagaactaaaatataaacttcaatgaggaccaagtctttgatgaaaactgaaaataaactaaggaccgaaaaagttatcttctctcatgactaagatagatactcctgcaaaacaagaatgcatctaatgagatatgaaaacatgacccattagaactaggaaggaacctgagaacccagctagatgtttgcaatttctattattcattgattcatcaagtatctattcagtgtctactatgtgccaagcaaggtctaacaaggataaagtaattgacacccacagaggtttggtgacttattcaagcacacccagctagaaagacgcaaagccaagactctgggccaggtcttcacagtcatgttcacttccccaattatcagtttctttatctcttaaaaactaaaatgagaatacagttggctcttcatatctgcaggctctgcattcaaacaatcacagattgaaaatattcaggaaaaaaattttaatacaacagtaaaaaatacagataaaaacaatacaatttaacaactgtttacatagcatttacattctattcggcctcaaataatttagagctgatttaaagtatatgggagtcaggtgaggtatctcacacctgtagtcccagcactttgggaagccgaggcaggaggatcatctgaggttgggagttcgagaccagcctgaccaacatagagaaaccctgtctctactaaaaatacaaaaaattagccgggcatggtggcacatccctgtaatcccatgcctgtaaaccctacctcaggaggctgaggtaggagaaacacttgaacccacaaggtggaggttatggtgagccaagattgcaccattgcactccagcctgggcaacaacagggaaactctgtcaaacaaacaaataaataaataaagtatatgggatgattcacaaaggttatatgtaaatactccaccatttcatattatggatttgggcatctgcagattttggtatcctcaggggtggtggaaccctcatgaatacaagggcatgactatattgtctaataacaaatataattatctgagcacttatgtgcgaggtactttgctagacattttatgtacatgaagtcctcaaaacaactagatgttatttctcccattttacagatgaagaaacctaagcttaaagagattaaataatttgtctcaggtcacattgctggtaatttgtgagcagagatttcaataccagtcatattaatccagagaccacactttaaatctttagtaggatttggggggtgggggggggtctttgttaaatatatgtcccagaaccttacacagagtagatgctgagtgaatatttgttgaatttaaatcagtaaggatatagctaatttgtacaaccagctaatgtccagcatctttttccaagccaagccgatatcactctgatgtaccaaaagcttctaatcagagcatccactgtcaattatgtaagtaaaccacaacatgggcacaaaatggccagcacatggatgcaatttgcttatttgctaattagtatgaggtccatcccagcagatggcaggatgaacccccattactataaccataaattgtcatgttagaccttggctccaagagctattttcttccttccaatgacactggtaactaaatgactgtacagttgctactgggcagagatgtctggaatgagaccatgctgtccaagtaaggggaatggtccaagaaaaatgaaagaagtgattacctggggtgtgaaaatggaaatggtaaagtagttcaacagttaggaaacacttagcccaactgctgatgaatgaaacgttgatacttccaaagcaggaacaacatgggaggttgggcgaggcagatggccatacagctggaatgctagtttctacttccctgatgctttttttaattttctgacattcagagcagagcctggtatgatgatcatgatcatgatcattatgtatatggcggggtatattttgagcattattggccctgtttttctttaggaaagagtcagtataatctagatattgggagcacgtgtggtacagtcaggctgacctagtttgaattttatctctagttcaggatctgggtacagagtaagttctcagactttatctacctctagcttatgatgaagactgaaaattcacaaagaatatttttagccttcttcattgagcccctaatgcaacattaggtatggttcgatgcccattaattactaattggcttcttgattaagaatcatgggcatcaaatattgatttagagaggttttccctagtatgttgatttgaatttagttcctttaattccttttctgataccttgctttataccttttggctaggaattttctgtagctcagttatgatatttttcagatgagaaatatgttcaaatgatttgattctgacttgtgaagttatctcaaagaataaacaggcagaggtacaaagttaaaataataattatacatttagtaaatgagctaacctggaaaacgagcaatctatgaaatgaggactctcctaggacatctagtacttatgccacaccttaaggcatgtagaaagcttttcattgtcctcatacattgcccagaatcaaccattggttggggctctaatcacacacgtgaccccacgtggcaagagggttcttctctttcctgtaacagagcacagccatggaagatgaaaccctcattgcacgtaggatcctgaaacagtgactgtgaccagatgaaaaggatgggaactttaataagctaaatgccttggaaaacttcatctcttagcactggctcagggaattcggtctccagaatccggctgatttcctagcttaaaaaaaaaaaaaaaaaaaagctgcttttataagtaaagatctaatggctgggtgcggtggcttacacctgtaatcctagcactttgggaggctgaagcaggcagatcatctgaggtcaggattttgaaaccagcctggccaacatggtgaaaccctgcctctactaaaaaatacaaaaaaattagtggggtgtggtggcaggtgcctgtaattccagctactcaggaggctgaggcaggagaattgcttgacccaggaggcagaggttgcagtgagccaagatcatgccactgcactccagcctgggtgaccgagtgagactccatcttaaaaaaaaaaaaaaaaacgaaggtctccaactccactttaaaaaaatgattacctttttatttcccccattacccattaaagcgcttaggtccctaggaggggtctgagtccttgtccaaaatatttttcttctaagaaagaaagggagcagggaaaagcatttgagggtaaggttttggctactcactgtggcctgatgccctcccccgatttaatcaaacctgcttggtcttacagtcatccaagctaacaaacggccccacaaaacagcaatcatttaaagaaatgtatggggtaaaatttaacagaaccatgcaaatgatcataagaaatatatattgaaaacttgaaattagtaaagaaaacataagcctggtttggagcaatagagactgtgttcatcattattgatattcaaaagattaccatgtatgagtttatcttttccttttaatggagctctcaaaagccatgacagaacgtgttctgtgtgactgcccaaggtcagcctttcggacaattgagattactttcatacaagtcaactctaaaattcatttctctagataaaattggatggcattatcaaagcaaaaagtgggattgtttctcaacgtggaaagctttcaaataaagtgtttggcaataataggcaagaggctctctgacagcattgtgctgtctgagtgtgtttttaaaagaccccaatttttcaacaaaggacatcaaaagaacaccactacagtgcaagcctgggtttctctgtagtgggactgggtaagaaacactgcatttcaagtgtctgattttttggctatttctaggaaactttaaaaatgctcacactttatgcctgagatagcataaagtctacttctagaagcagaattgaacataatatattttggggtggtgaacaggagagaaaacattcttgagagcaatgtctgatctgccatctcagtggaaatcagtacaattgggcgcttctgcctctgtctactctggtccatgggtggttccagtgtcctggagaatggccatcatccagaatctataaaagttgtggtggtggctttttctgtgtgactttcttgataatttgtggtactgtaagatgagtcaatctatttttaaacctgctgatccttcccatttcttattcaatggaattaatcccataggtttcctggcatatggattgttaggattcatggtttgcaagcaatagaaactgattctgacaaactctggagcaaaagaaagaaaaaggaggagggagaatatggtgttaatattgaaggaaaggccaaaaaaccaggccttagaaaggacaagagcagagggaatctaaacatctaatagcaggaactaacagacattctcttcaagatttccatctcaggagccagcactgtgatcactcagttcctatcaatttcacatctccaagggagaatcttactgtcccagcttgatcaggagtgagtagggtcttttgattgccaatcctactaagatgcaggaaatgctagagaaattgctacaatggtggctttagctttggatttccagatcagtctcaatggataacactgatattctcaactcttcctggttgtctttcagtcatcgaggaagttttttcccatcacgttctttggctccattacctggattgcagtattctcttacttgatggtctggtgggcgcaccaggtaagattttgatagtgacatgcctctgccttgtttttctccagtcctgattgtcaagtgtttaatcattgtgtttgctttctgcaactgccacaacagtattgggtgtgacacagacgagttagcattccaggactagaggaatttatccacttaactttccctagtcttctggctgtagcatggaattaaatcagcatagcctctggacagccatgtggaggcaggcaagtctaactacttcttgcctctgcagcctgacagacaccaggacaacccagacctgagagcaatgtcaagattttgcctggttcagtagtactgactttatcttgagcagccactcacctcacgttctcaccagcagtttaaaactggctctaggaaagcatctggagacaaaatagcctcttccttgagcttcactttacataaatgatgatgtattgttattatttttaactcaatatgagtcacaatgcccatcacaagaatacactctcagtaatcattattgaaaaacatgaatgaagagtaagattcaagggtttcacattttcaaagataatagtggtaactattgataattgagtatgtcctacacacccaacaattcacatccctttgtctttataatcttaacagtaaccctatacataggttcaaagcctatgaagcaggtactattattatccacagtttacagataaagaagttaagcttaaagttggtaagattacccaaaatcacataggtagaactgagattttaacccaggactctgcaactccaaaaatcatacttttaatctctattataaactacataaattccaaacttcccacttgtatcctttgtttaatataatcctaaaattattatacttggcaacataaataagatatagaaatttgaaataaggaaatatatactgagaacatgtgaatagacttttcaacaaatgatgctggaataattggatttccatatgccaaaataaataaacttagatccttacctcatactttacataaaatttaactgaaagcacatcatagtttgaaatgtaagagtttgtaaagctgtcaaacttctagaggacagaaaaaaaatctgtatgaccataagccaggcaaagagttctttgatacaataccaaagcatgatccatgaaagcaagaaaattgattaattaatttcatcaaaattaaaacttttgctcttcaggaaacaccattaaaaaggaaaaggaaaaccacaggctggaagaaaatatttgcaaatcatatatatctgataaagcacttgtatccaagatacaagcttaaagctccataataggaaggcaagcatcttcaagtatcctaattttgaagatctgaacagatatttcaccaaagaaaatacgcagatggctaaaaagcacaagaaaatatgctcaacatcattattaattaaagaagtgtaaatcaaaaccataacaagataccactttacacccactaggatgggtataatcaaaaagacagaacctaacaagtgttgatgaggatgtatagaaattagaatccttacatactgctgataggaatgtaaaacagtgcagccactttgggaaatagtttggcagttccacaaaacattaaacatagagttaccatatgatctagcaattccactcctaggaataggcttaagagaaatgaaaacatacgtccacaaacacttgtaaacaaatgttcaaagtagcattattcataattaccaaaaagtgaaaacaacccaaatgtccatcaactgatgaatggataagcaaaatatggtatatccatacaatggaatattacacagtacaaagaaatgaagtaccaatacatgctacaacatgagtgaaattcgaaaatattatgctaagtgaaaaaagccagttacaaaaggacacatcatatgatttcatttatatgaagtatacagaacaggcaaatctatagagacatataataggttaatattaatagttgcctaggattggagaggttgggggaaaatggggagtgactgccagtgggtatgggtttcttctggggatgatgaataagttcaaaacctaaattatgaaggctgcacaactctgaatacattaaaaaccattgaattatacactttaaaatggctaaattttatggtatgtaaattacatctcaataaacttgtttgaaactaatccaagatatcacttcacaaccactaggttggctataaaaaaaaaaaaaaaaaaaaaaacagtagcatgtgttgataaggatgtggagaaacatggctgcatacatttgtaaaaacttgcaggctggttgcagtgggtcatgcctgtagtcccagcactttgggatgctgaggcaggcagatcccttgaccccaggagttcgagatcagcctgggcaacatggcaaaaccctgtctttacaaaaatacaaaaaattagctggccatggtagcacacgcctgtagtcccagctactcgggaggttgagtggggaggatcatttgatcccaggaggtgaaggctgcaatgagccaagatcacaccactgcactccagcatgggtggcagagtaagaccctgtcttttaaaaaaaaaaaaaaaaaaaaaaaaaaaagtaaagaaataggaaaaaaaaaccttgcagaactgtacactttttaaaaaggtgaatgagttttactctatgtaaagcataccttggtttttaaaagaatacatgttactagcaaaatccacagaaaatgttggctgatacactgtcttatttctacatgatattttatattattcatatcacagttattttactgacatttgacttcagattactcttcctggatatttccaaaaaatcattggcttcctgagcaagttctctgtgccttggagtcattattttatacactcattgagagacatttgctaccaacacctggcagaaatcacagcagaaggtgggctggttttcagcctccagatgtccaggctgaaaggactgtttgccatttataacatataatagtttttcttaataatcatcttctatttcttcatgtactaataaagaaaaaatggtgtttttctaacttgctgggatatgttgtttcccagatatttcttttttgccgttttataaaacatcatgcagggttccatctttttctttttaatgattaccttaattccagtcttgttttctttccattctttcaaagaaaaggaacacaaattcaatggctgaaacaataataattttaaaaagccaagacgaatgaaagccataaatggaagccttacttttcattgatggaagagaagtttctcttttctcctatacaaatacttctttaaaaacacccagacagctgaacaaaatagattctgttccaagaagtctagctctaattctgttgtttgtacttctgaactataaaatccatagcagttatatagtgttcaactcttttgttatcaacacttttatcataaatgctatttgataatttggctactgtttggcaaaaaataaatgcccttcacctacaatgctttaacataatttgcccttggcttttttttttttttttgcctttatcttttgtttttgttgttcttgtttcttattgtttttgcactttaataaatttaatgggtgatgacaacctgtagttaaagtcaatcctgcatctaatattagaaattaattttaagagtcaactaagaccttgtgtctcatttagccactatagcattctttcagatcctccttaaaccaaggcacagaactgcatcacaaaatattgggagcagcatggagtttggcctcctctgagtggcctaatttgcttttttttttttttttttttttgaaaatgaagtaatttcccccaaaagactgctgatgttctttctattaaaagctctaagcctctctgatgctccctgatttttcagagtactgtcccgtccatgtgcccatcatctttactgatttgacaaaagttaacttgagtgaaatgtactcaaaacaagcttatgaagactagttcttcttccacaaaaggctttctagagccacacagattcaccaggggtttgatgtctaatgaaaattctcatgaagttttccatgatgtgaattggccccagtaagcccacttctgttcctgctgccagacacctgacagtctaataaattggagagggaaaggagtaatgtctgagttataaaatctggttttttggctgggtgccgtggctcacccctgcaatcccagcactttaggaggccaaggcaggcggattacctgaggtcaggagttcgagaccagcctggccaacgtggtgaaaccccatctctactaaaaatgcaaaaattagccaggcatggtggcagatgcctgtaatcccagctacttgggaggctgaggcaggagaatcacttgaacccaggaagcaaatgtttcagtgagccgagatcacaccactgcactccagcctgggcaacagaacgagactccgtctcaaaaaaaacatattaagttaaaaaaaaaactagatttttatttaacatttgctttatacctgacactgtgctgtatgatttgcatctcacatatagtcatcaacaattctgagtggatattatcctcattttacagataggaaagactgagactcagggaagttgtctaacttgcactaggagtggcaagctaggatttgtacccagcactgtcatctcccaagccagtgctcttaaccacaccaccatttttctcctcttcaattcctatgttttcctgtatatagtagcattcaaactccaaatacaaattattttgtttatatttcggggacaaggtcttgctatattgcccagtctggtctcaaatgtccaggctcaagtgatcctcgtgcctcaacccccgagtagctggaactaccgtgcatggcattgtgcccagcaaataatttttcagtcactactttagaattccctccaagaatttaattattaagaatgttttaaacagattggaacttgccgacagtaacagttgtttagtcagcatctgctcagtctttggcaatgcttcactccaaatctaacaaaaaactgacaatttgagaatattttgctcaaatagggcactcctgtgcaaaagtcttattgaactttttctaggagaatcagcagaaaaacatactagtgaaatcacctaggtatgcagattgatttgcttactcagcaaatcagtattaagagcctgccatgtatcaggctgtgtatgttctgtcaactagggagatcgtggtgaccaaggtgaggatcctgcatacatggaacttactaatggggagcagtgattctgtgtcccatgaggacagggtaagctagttcagctcaccaggctctggagcaggcatgaccatcaaaacaaaaatatgcttttaagctagtaggaatcatactatttcttataaaaataagaatttttttaaaaaggatttagaaatgagtgtattctattccctaaaaggctttattcttatatgctattttggccctttaaattttttcaaaaaatgctggacatcatcaggtaacctgttggaaaccagatggaaagcattatcttgaaggttttcagagccacacttcaccaagtccagcaaaacatgaataggttttaaaagtcccaagaggccaggcacagtggctcacacctgtaatcccagaactttgggaggccaaggcaggaggatctcgaggccgagagttcaagaccagcctgggcaacatagtaagaaccatctctaaaaaaaactagccaggtgtggcagtgctcacctgtggtcccagctactctgaaggctaaggttggaagatcgcttgagcccaggaggttgaggctgcagtgagctgtggctgtgccactgcactctagcctgggcaacagagcaagaacccatctctaaagaaaataagtaagtttttctaaaaagtcccaagaagacaaacaaattgctcaagagaatggaggagcttccacgtgaggctagaccaaccttccaaaatagaactcatcagtcttaaaaggcaaagaaaaagaccaaaaaaaaaaaaagaaaaaaaaagaaaaaaagtaatagccaccctccccttgcttttcaataataatgtactattcacaaagagtctgtcacagattatcatttagtcctcacaagtacctggtaaggtaggtattattatccccagtttatggatgagaaagtgaggatcaatgacatataattggtacagtaagcaaaatgtcaagaaattaacacataccagagccagatcttggacccaggtcctctgattttctggattttgcttctccacagttgctttgctatgtgttaccaaaacccgaaacacccagaatcgagattccagtggaaattatagcatcttgaagtgtttcagaatagattatagacactaggagatgctaaaggagaatggagaccctgggtgtcagtccttggttttggtagtaagttgaagggcaaatcttccacaggacttggtgccactgccaggtgctgccccctggattccatggccaattggcctttctacctctaatcctgcagcttccctgactcaatcttagaaagcaccatataaaggctacactctagccctctagagctcttttttgagattatctgtttaattttcatgtgaacattcctgatgccttgggtctgaatatcctaaaagcataaactctattagcaatgactgtggcttattcatctttatcatctcagcactttgcatagcacagtatagaaatgcattaaaaggaggtcgcattgaaatttttgtgatttttatgattttgtaacttcaaacactgagatgtttattcctgtcctgacatttaggttggagagacaattggcatcagtgaagagattatgggcctgaccatcttggctgctgggacctccatccctgatcttatcaccagtgtcatagtggcccggaaggggttaggggacatggctgtgtccagctctgttggaagcaacatttttgacatcactgtagggtgagtagaggtagttctacaaaggtgtgcaccagctccaccagtgtctttgtcttcttagaagctggaaagacatgaccaggatctctgaacctaagactaaccaataccaatacagagtaaagattgagaataccattgcatttccccaattctatttctcattttctcatttcagagaacttaatgaaaaataagtcatccctagacaagcagaagcacatacctacatacagaatgggtattttaggaaatactttagaatttcacttatataacaacattcaagtggaactgagataccgtgatagcttcatgataagaaggttcacattctaattttaattaaagtccccaccagcctaaggtgagatttggattttaaggcagattggggaaaacataggcctaccatacatatcctgtttccttccttggaaaatactgacagtcttggcattaccatttgtttatctgtactggtgaagatattccaggttttttgaaagccagaaggtgagacctgttcttataatgaagcaaacatgagctctcagtatgaataatcactaaagtgaatcagactggggagaggtgctgcgatctccaccattttatttaacttgtcaaaagtaaaaatagtctgacaaataaacttaacatcagtaccctgagagaataagatataagacattatccttacgttcccaggagtactgggctcctaacacttgagtttggaacctcactaaaaacacctactttctcattgaatatcttaaatattgttctgtcttccacctttccatgaccatattgtttttcatacagtgtctaccatgtgcactgtgtgtatgtttttctccatttaagccacacaataatcctatgaagtatgtattatcacccctattattcagataaaaatactgaagggcccagagttcacactagtaaatgaggtaggtaggatttgaacaaagagtctgtgctatcaattgtagcactctctgtgcataaaactctgctgtgagtattcactgtctgaactacacgtgagcccccactgaagagctctccatgcttgtctgactggaaaactctgacttacccttttagtgacaacttaaatcctgatttctctgattcccctgggcctgacttggaggctcttgcccctaaaaactgtctgtacatcttactcttgtcctggtatatctgcctgctagactgtgcatcccaagagcaggaactcatcagagcttactgcattgctatcactggtagttgtttgacaagtgtttgtgggatggatggatggatgaatgaatgccttaaaaggtgtatgttttaaaggaagttgtacctactgtaaacagtgtttctcagttccgtggtccaaatattcctggtagagttcttggtcaatctcttgtaaaaaataatagtaatgctctatagtatattatgaagaattacaaaatgctttttgttcattattcttaagttgtatacatacacacacacacacacacacacacacaaggaagtttaaagaaaaaaaatcactcctaatcctattactcggaaacaacacttctttgttgtatgttctcttccatatatttcacaaagttttcttagtaaaatattcagttttatctacttggaaggcttttatttttccattttaaagcaatctatgcctggcatagagaggcatctatgaataaattagtaaatcataaccatttttctaagactcctcatagctcataacattttgtggcttcaaatattccctcttgtttttcagtggctttttcattatcatttataggattattaaaaattttctgctatgggagttttgatcaacatctttatgcagaaaaacctcctcttttaattatttgttaggataaattcctttaagcagtattaatgaactaaatattttgaacatcttaatgggtattgacatgtcttgtacatttcttttccaaaaagttctttcccaagaatttataccagctgacaacatttttgacaatatactgagtgatgtcattgcaatatattaagtgtgaaactttcttcatagctttgccagcattttctttatgcttctaaaattaacatatactcacagatttagaaaataaaaataaggctccagggcgcagtggctcacacctgtaatcccagcactttgggaggctgaggtgggcggatcacaaggtcaagagattgagaccatcctggcccagatggtgcaaacctgtctctactgaaaatacaaaaattatctacgaatggtggcgtgcgcctgcagtcccagctactcgggaagctgaggcaggagaatcgcttgaacccaggaggtggaggttgcagtgaaccaagatcacgccactgcactccagcctgggcgacagagcaagactccatctcaaaaaaaaaaaaaagaaaagaaaagaaaaagaaagaaaagaaaaataaagcttaaagatcaataactcaccaaccttttgaaattcttgtgtatttcacatgattgaaattacattgctatttgtgtgtatgtatgcatctttcatctttagcttagaattatattatggctattttcctgtagcattctaagcttgtgattttttaaacagctatataacattacatttacttatttactatttaactagttccctgttattagagattattagagatactcagctttttattattcaaaataacactgaaatgatcattttctgagtaaagtttaatctgcattttcagttatttttatacttaattcttgacgatagaattaatagaccaaaaggcatgaaaagtgtcattttcccccgaaaggtttttgcaagccatttatagtgcgattaaactcaacttcactagaagtgtgagagtgtgtgtgtgtgtgtgtgtgtgtgtgtgtgtgtgtgtgtgtgtgtgttttaataagaataaaatgggttttggtctttcttcacaagggatgggaaaagagtttcccaggccaagtccctgtcaatggctctcagtttgccatcacccccactctcaggcactccccttccattttctgacttttcattgctgaccccaggatgccaaggctgccccctcctgctaagaactggaattaccccttgttcccaagcttggaacccctccccaacaagttcacagaaagaagcacctcctggccagactctactgggcaaagtgccggtattgatccccacaaggcagtcacatcaatcacttcagcttggcccaggttaacatatgcacccagttaggggctgcatgtaccaggcctggaatttcaaagatccacaatgcacgggctctgccttccaatgccgtctctccagcacaggaggcagatgagtaaactcactgcccctttcaccctcatcatttctctcttcctttgaagaatgtaatgtttcaaaagagtacctcctcttcccacaccctgagtctaggccaaaactgaacctcccttagcttttgtcattcagaaagctcagctagccaagcaggtatctccttagccaccatgctgtcattaggctgatgggtagagccagatgcctatcaccagccacttggaaatgcccatgttccctgagccttgcacttccagccatcttcctttcccagagttctagtcaatgcttgtggtgtagtggaaactagctctcctgaggtctttcaggatcaccactctcgataggaaacacaagagatcctcagattttaaaaggtgaatgaaaagggagaaaacaggtataaaaatatataataaagttttttttaagaaaaacacacacatcacaaatgtaagatactgccttccttaaatctttcagaaagaccaatttttcatcaaacaattgtcaacatctttcccagaataaacttcagcctgtgatattgtatcgtggcccccaaccaccatcatttaatttcacttgcctttagactattaagtcattgctattctttgtctccattttttaattttttcctcattttcaccactcatttctgtgccttttttgcacctgcctgctcccttcaccctgtgcaaatcctggaattcacctttttaggactgaaagcaacattttaatctcaactaggaaggaaacaaaataatttccagtcaaattcgcaaatgtagaaatcacccacagcagtcatgtctttgatgttgtctaactgttctccctgttctgaattcagtcaggacataaaggtttttaaagtcttatttccttataaagtggtttcctgggccaaccatgcccgagtcatagtgaacctaacaagacacccttttcagtttagagttcctgagaaggtaataataggttatatttgccttcttcaacgtgtctgactactcccttgtcttcccactcccctctgccctgcttcacttctgcacaggctcccactgccctggctcctgtacaccgtcattcacagattccagccagtggctgtcagcagcaatggccttttctgtgccatcgtccttctcttcatcatgctgctcttcgtcatcctctctatcgccctctgcaagtggcgaatgaacaaaatcctgggcttcatcatgtttggcctctactttgtgttcctggtggtgagcgttctcctagaagacagaattcttacatgccccgtctccatctagcaggaaaagccatatcttgcaccagcagcatgaatggtccctccacactctgggctctgggctccttgacctcttgagaagaggcagctggcacacagccctgggtgccaagtgtccctccttggtgaatttgaggagagatggattcacactgggcccattcacttcacaggctgcttccaccctgcctactgaaatgacttcatgtaaaagacaaagagaaccgtcaatacagggcttctccctattcaccactgacaagtacacctcgctggtcggaggtacagtcgatgcaaacaaggacacaggctatatatatctataaatacacatattataaatatacgcacatgaacacacaaatcctgcctgttcctgtactatacctctccttgcatacctatagattagtacatacctgtaaataaagacaaagaaaaattatatatatatatataaaatcagatatatataaaagtacaaatgcatcttttcagggatagctctagtatatttatagtacttatttgaagaggggcatcaacttgcagtctgggctttacctcttaagtacaagaggtgaactaatggaaccaacaagacaaaggtagcattgctgtgaccttcagcctaccttggacttgctgtgatcctgcctagtaaggtagatggtttagggaaatagcttgcagggaggagggcttagtggagaaggtctgtaggggccctgagttgagccttccaaaacattcctacaagccaaacagagagactatctgcccacctccaccagagtaccctgaccaagaaactcagggtacttaggacagaaagaggtaaaaacccaggctgggtggcttggtttggggaagtggggaggtaaccagggttgggttgttttgttttgttcttatattgtcccagcatgcaagtagaaaatatgactacaaaccaaattagtgctttttctaggacagcaagactatataaactgaacctgtatttttccagcgcatgtcccattatcatcaaaagaagaggggtaagtttagctgtgattgtcatgtagatatattttgatgctaagggctgccaagagagcctagatgtgcaataagaagtcatccagtaaaggtgcttagtgggccttgccacctaatgggatgtaagggcatagttctttaaaacgttttccagtgtagtcataaagggctttagtgtctgaagaaatcattattcccaatagcactaacttaactctgatcagcactgcttgggttgaggcaacttagcgatgcttggaaaggcatttgcacactcagtgcaccccaggaaggtttctgagtgccaggtcgagtggtaccaggaccaggctttggttaaagttcttgtaacatctatgtctcttcttccatcaagaccttatctgggattctgtctaagttttagagtacacggtatttgacagcttccttatactggtttcaagctattcactccaacaatttgatttcttgattttgctcaacattacattgaatgcatgaaattaaaatattccacgcccccaagttctgtatgacaccttgtgtgttttctcagatctatgtcagtcgaaaataaagccagcaagggggaaaaaataggcaaactgaatcaatggaaaactatgtagagcacttttcttttctccaagtcatgctttccttaaaatcagttgaaaaattgaatcaaggatggttcattattctgtacccatcctacgtctaagttggtacatatggcatatgggaaatttcaccatatgtgttcctatctccaatctattctgtcattgacgcctgctatgattttgttgtgagcacatacctcttaacataagaggacaggatgcagaactcacagcagaataagaggaaaggtaacctgacagccccagatcaagctcagtattccttccagaaaacctcagctcaccccacagagcatggcaataacaggaaatgcccatcattcctcttcacccagaagtaaaaagcacttcaaacccgaggccccctgggaaaacaagaaatcaagatggctgccagtcggaggctggctttcaagtctctccaactcggcagattggggtcttcagatgtgggacaatgccttccaagacattgaaacaccatccaatagaggcgctgagtggaacctgccacctaatgggaatgaatctcattcatcaaggtcaggactttgtactggggcaagaatttgtcctgcttccttagagagtgaaagaatgaggaagtgaactttacgtttaaaaactccagttgttttccctgtgtatttcttgaagggcaaccaagttggttattgtgtgaattttatattattgactggtgcgttgtttgaaataaggtttaaataggtgactgactcaactgcaaacagaccatgtaaaacagaagttgaaggagacctgatgccgccctcttcttattcctgatcctccctctgcctcctcactccctcccatttattcccagcttacagtgaaggctgatcaaagcagctatggtgccctttgcttgtctcggagctccacttcacaggaagtgttgtggtctttcatgtgaagttgcatttgagaagacaaaatttccaagccccgttcccacatcagtcatgtgcactgagcctgacctacaacagcactgctccctcactggatgggacacaagtgattccacagcctgcccttgctttcccttcatttctgtgtctgtaagtggttatgtgttgagccagggtaaattcagagagatgtgtacagagttcaacaatgggtctttaaaccattcaaatcattggcataattataagaactttccacaccgtggtttccaaaacaggtcatctctaactcgtttcctgcatgcctgtgtatatacatatataaatatatacatatatatatatatacatatatatatatatatatatatctttataccagatctatatgtacacatataatatgacttacatcatcaccctctgaccctatcacattcaggattctaaagcagggagcatcaagtttgccaaagtcaaggaaaaggaaagtcatgcacacaaaccaaagggaacatttcttcctgatttcataaggttgtttgttccatgcacatatatttacaaatatacacatatgtacccatattttcccaccctaagaatatcaatttatagccttaaggaaatcggtcagccatatccctaatgctgatatagaggcaaagaatacacaacagaaaatacaaagcaaaaatttagactgcagatactctctttgcttctctggagcagggtataaaagatatcaacaattcaagagccaacattgtactaatcaatctaaaataaatgagttgcacgcaaatgatttcatttattcacagcaaaccgagcaggtcttgcttgctgtcaccgcctaccctcccccatacttccaaggcagcagagcagcttggctcaaactgacaattcccaaatagaaactcctaaattgcatctgagaatgcccatgccaactccagctgccctctgcacctgaccagatcctgatgaactgaagctgaagatcagatggtgtttatgcagcttcccaggacctaaactgagtcaggcagtgacagagcaatgatatatgcagggactaagggatagggttgtttataccctcggcagatgcagcagaatgtcctaaagccttgcccagaagattataaaaagaggcggagactgttttatattcaggaaaaatgctttgtaaggcttctaacaggtgtcacctgacaagggccatcataatttattttatagggaagacatgaatcaggtggtttggagccctttcagcaaaacgcagctgcctcgctgattagacatttgacaatgttaatgtacatccattcctgggcagggagagagttggcaaactccccaccactgcacatagcttttaaaggcctctggaacagtgagagaagagatgagctacaaagggagcccacccccagaccactttaacaaaaagttgaccaaagaaaagacacctggtagagtggctggccagatagagctgaagaagatggaagttgcattaaatgctctgcagaaattactgcgttggactatctaacatgggtctgatggcaggcatttcagaacatggcagtgtgctttcctccccacatctaccaaacacacacccacacccccacacacacgcgagattatgtggatgctatgcctccttgcacctggacagattgtttttctggtaagtaggtggccctattataggtggcagctgtgttccagaagaaacaaagtgaagctgttctcagggtgatttctggagaaaactactgtctcctgaaagcatgcatagaagtcagtgctcactcttgctaagccacatattccttaacgatccggcttaatatttttaaaagatacctcctcaacccctatacctgtctcaacaatactgtcttcaattattaggtaaggccttgtcattaagagaggggtaggagaaaaaatagaataataaggaaagggaagaaaggagatattaatttcctaggattccaagaaaacaagtgtcacgtggaaatatatccctatgtagtttaaaacagtaacaaatatcaggctatgtttagccaattacaagagcccatatacagttttagatttttttaaaaaataatctcaggaagaccttgggtaagaaaagtaaccctgccctattccaccttctatttactgttagctccctgactctgcctctgcctctgtctttgcgtttcatttttaatctcagagcttcatattttttaaatatatagcaaacaagaaaagcaataagggaactactcacagccagctcaactctattacttatgattacaccatggcaatattcctttttcaccaggagctttggacctgcgcaggttgtggcatgtaatcacccggagcatgtagtcgtctgtagaaatcacaggcacactcatgtttgctctggaaggaatctgttttccacaatgactccccccagctaatgtacacactggcattttgcatgccttcctcacacatggggcaccagccttgctcagaaccacccaaactccacagaggcccttaatatggctagggacagatttcttaagaaagagtaagaagcagctacaaaggacaagcaaatccacaagtcaggcagcattcgagaggcaaaaatgaccctgcaattacgacaggctaggcaactgttttcaaattagcgtacgaacagtgagggactgtgtagagcaccatattatctaagccaaagcacttctaccagatcattcattgacagactggaaaacctaataaaatctttaaaaacagacaaatatctaagtctgaaagaatgccatggagtttgcctaggcttccaccaaagatttaattccattaagagggtttgtctagcctatcacgctaatccaaaggacagtcctcttacgggggagatcccagcatagatgctggtgtgacccagctcaatgattaacaaccatcagcatcaagaaaagcctccctccaagttaacccaaacccatccacttaatgacttaactttttttttttttttttttttttttggcaaaaagtaactgcatctgggcactcttcactctttgccccatagttggaagttaccgctatgtgactctttacctattttcaattaaaattatctttagatttttatttgagtctttaaccctcttaataatttttatagttcctctctactaagcctttttaagttctttatattgttcttaaatgatggaaccttatgactaatgataatcactgtctgaacagtgttgaactatactgggtgcagcatgaccatgaagctctggtgaagtcaaggtcacaaactgcttttaaggtcattaggtcataatctcagactcacaaagaactcaaaattggggagacaccactttagattactccaaaactctgggcctgtacttacccactaatttatcaagaggaatcaatatttttattttaaatatgaaactgggataaatgattggatctccacttattaaccagtactgcagtgtgtttatatccttttgtgtggtaggttggataggatttgtaaagctactgattgatctcatgggccagggttcaccaaaaggatgggaatttgtttctgcattcttacatattgggttgcatattccttcataatggatccataagtaactaaggccttggagactaacagttctccaaaatactcagctaaccaaaagaaaatactaatttttaaaatcatgtcataaaaaacagaaaagtaaaaaaagtctgaaatcctgaataaaattattttaaggatgaaattacatgcataaattaagggtagataacttcttgccatttaattaaacaaatccccaattcttatcagaataaaactgaaggacaatggatgccttttgggttttttaattttttaatattgcactttatagtacttcataagagacaactgtcttaattaaagccataaaataccaataatacatatattcagggcttctgaatatagtcaatcaataagcagtccatgagtcattcctgttttgtattgtttattgtaaattggagtttatctgttctattttttattaactacaattattgttctaggcaatcctaatctacttatacattttagatgtgtgctttaataaaactgtttgaaaatcaaagaaattattcatttcacaaaagcagtcttcgttttcaaaatagcttattacagtttctttagcaagttctaatactacatggaaattattttaaaattgtagatttttttcaggaatccattttgttatataaagcaaagttcacccatatggaaaatgaaatagataattagcaaacatatacctgggaaatgtaggatgtgtttgagcttttatataaatataggatgggtctaagaagttcccttataaaaatgggaaatagaggtatacaatttatcaataattccttatgcctaaattactaaccttccttgggaggacatgtaaagcagcagatttcataatgctttggtggttattttcctcctctccgctaaaatacacaatttctaacctagtatggtacactgtttacacacacatatataaagatgtccccacaactaaaaactttaatgtttcaacttcatcacaaatttttatataattttttttttaacagacagggtcttgctctgtcacccaggctagagtgcagtggtgcaatcatagctcagtgtagcctcaaacacctggactcaagcgatcctcccacttcagcctcttgagtagctgggacctcaggcacatgccaccatgcctggctaattttgttgttgttgttaagagatggagtctcactatgttacccaggctggtctcaaactcctgggctcaagagatcctcctgctttggcctcccaaagtgctgggattaaaggaatgagccaccatacccagcccttttatgtaatttgagtaaaagtaattactaaaaagcacttaatagtctagaaatccaccagaactgggtacctaaattgtccatatagagtaaacatgggtactaaactggacaaccccatcaattttatgcttaagtggccaaattgccctaaagaaagggtatctgaaccaagggccagtgatattcctctgttagaggctgttttgtggtctgaagagtttctctaaagggctgagactctattcggaagagggagcctcagttactgaattgcgctattgaaccctgaacacaaagtacacatatataccctgcatctagccttgatatttcttctgctcaagtcaaaaaactccggaagcaacagcttccaccatcaagcaatccacatacttaaaaagccatcaaagctaagaatagcaaaagctaccttcctgattcagtgaagttgctgctagcactaaaagcaagagaaattatacttttgttcttcagatacggttaaaacaaagaaaatgttgtcaacgttgacgccaacatagacatttgctctataacatataaactgtcttttagacaggttatgttaaaaatatcagaatgccatttttgtaaaggatcttttttaggatagacgtggtctcatgcttcctttgttcgcctccgttttaaaggagcattgtaacccctatcctcatccctacaaaaatccagtggatgcacttccaaattacttctgtcattttgtatgtgttgtgtttattatgcgtaattttcactggatgatgagatacatggtgatactatgtcagtttattctctgtgaatatgtctgtacatagacaggaagctctacttatttgtacataggctgtctgaagtatgtacttctgtcacatggacttcattctgataaagggtgtttcttcttgtttcactgtccatacctttgtgcttctactactgataatcaattcatagaatatcactttatgtaactaagtctcctcagtgtgaaaaataatagtaataaaattattgactcaaagaagta

SEQ ID NO: 67 - DNA, 17069 bp, Homo sapiens
agattgcttcaggggggtggggtggggtggggtggggctgggggcttgtcgccctttcaggctccaccctttgcggagattataaatagtcatgatcccagcgagacccagagatgctgtaatggtaagactttggatccttcctgaggacgtggagaaaacttgctgctgagaaggacattttgaaggttttgttggctgaaaaagctgtttctggaatcacccctagatctttcttgaagacttgaattagattacagcgatggggacacagaaggtaagaatgatataattactggttatttttgcttgtttgggatacactcagaaaggcaaatattaatggtaatctccttgttctattttctcctaagtcaccaagctatcttaaggccttttcatttcgtctctagcctgcactgctgccgcttcatcagttctctttgaatgtcatacagttctgttcaccttatcataggaaagtcacccggagaagttgtgtttgcttctcaggtttattttaggtaaccatatgccactgaggacgagatggttgagtgtttagaggatcgggctgcttggttgtatggattacaagtgtgggtctcagagccagtgtgaagacttctctggaagcattagaccttgaaaaggtctgtgtttggaggcacaggccagggtctggccatctgtttgtcctataacatatggggttcgtggatgctaaggagaaagaattccagttgtccttcctattagggttaaaatcgtgagtgcaggacatactaaaatattgagtgttgtatatgcattatttgcagggagaaaggcttttcttttttttctgattgagttttactcttgttgcccaggctggagtgcaatggagcgaccgcagctcaccacagcctccgcctcccgggttcaagcgattctcctgcctcagcctcctgagtagctgagattacaggcatgaaccaccgggcccggctaattttgtatttttagtagagacggggtttctctatgttggtcaggctggtctcgactcccgacctcaggcgatccgccggcctcggcctcccaaggtgctgagattacaggcatgagccactgcgcgcagcaagaaaggcattttttaccaagataaatttaactaaaaataaggggccaggtgtggtgggtcacacctataaccccagcatttgggaaaccaaggcaggaggatcacatgaggcctggagtttgagactagccttgggcaatatagtgagatcccatctctacaaagcagaaagaaagaaaatgtaggaaaataagaaagggatggaaaattatgagactaaagaagaaaaggctctcaaagatagtgaatgatgagaggagacagaagagatttttactaaacggaaaaagatttaacagagcattgcactggcagggccctccggggtaccgatgcttagctgggactgagacatctgggaggctgcaggcaaggtcacttctcctgctgaagctcccagcctgctgcctaatctgcccgacctgaaaggaaaggagtttaagatatgaaaggttgaagggattttgggtggtggggtgggggggaatggcgtagaagttggcctcaggtataaaaattgagctgccccaaggtagaaatggaaaatgtctcgcccggctgaattattccaggcaaggtgaagatgaccggttctccccactaagaaatgtctcttatatgttgggttcgcccttatatgttgggttcagagtaagtactttcttcccctgcgcgggagttagggatagcagaactgtatttaataaacgaagactgaaatggggccaggatgcagtgagtagatccagtaggttacatggtcctgagagataagagactcaaagagccacccagcagtgaagacacaaactaccaccccctccaccaccaccagtgggcttccgtggagtctggggtacagatcagactgcactgtatttgtttccagaatggtcaattcttagtaatcctacccgagactgtctttttctctgccctcccagttcgtgagtggaattctatgcctacatttgcctgatgcaagtttttaaatatttccaaactgaccaacccagtttctcttaacttcttccttccccaattttctttcatttttaccaagttaacttcacattcttatctccagataagttctttagtataatctattcctttgtcttccccattaattacctaaatctcattggatgttcttttcataccactcataactcaaattctcctaatacagctccataattaataagaaacagtcatcaatcacaagttttaaggactattctctcctctgtcttccctccctccaggtcaccccagctctgatatttgccatcacagttgctacaatcggctctttccaatttggctacaacactggggtcatcaatgctcctgagaaggtgagtgccaggccacaataattagaatttagaatagggaagttattcctttaagtagggtttcaggaattcagaatttaaggccaggcatggtggcatctgcctggagtcccagctactcctgaggctgaggcttaaagatcacttgagtccaggagttaaacaccatcctgagcaacacagttagtgagggtccctccccaaactaggggattttaagacaaactttgtatctatcctgtccaagactgaagatggagacaatattggtggggaaaattagtggggtcatctaatcgaagcacaaagctcacttactcccggaacgctgggcggtgctgttcttcctcccactctttcacctcatagtgatgcacatcctgtattatcccttaggggttagttacaaagaagctgggttcccttagcagagggctggggtagactgtgaacatcggtgctgccacctactgggattttcaggacaaatagaattactattccagcgagagttaacataaattccaatacgttatctgccccttccattcctgtctatttattcccttgattctctaggaaggaaatgatccctaatgtttgtcttttgttctcatccaactgtaacagtctgttcttccaccaacccttttattttgcagatcataaaggaatttatcaataaaactttgacggacaagggaaatgccccaccctctgaggtgctgctcacgtctctctggtccttgtctgtggccatattttccgtcgggggtatgatcggctccttttccgtcggactcttcgtcaaccgctttggcaggtattgactagaaactgggcaaggaagtgggctctaccagccacattgaggacaagtgtggagagttagggcagggaggtgatgatgcctttgaataagaacaccttgaattctaatcaagggaaacctagtccaactggccccgaatatgactgcccttgcttggagctctactaccctggagagctcccacccagctgtgcaagagatgaactgtgagtgattggcctttgcagtccagctagggatagttcagaattattccctagtaaactcaactatggggtttctagaaacatacttaatttacaaggtccgaagttgtttacttgtattataaatgtttttattattttacccaggattggtaggaattatttttgtctatggcaaatgtggataatgacaaaaaaaaagtcttattctatagaagcttaacaatatgttttagaaggtagaatatattttcatttatgactaatgaaggaactgttttaatttgccaattaggcacggtgtggtggctcacccctgtaatcctagcactttgggaaaccgaggcaagtggatcagctgaggtcaggagttcgagaccagcctggccaacatggcaaaaccctgtctctaccaaaaatacaaaaattagccgggcgtagtgacaggcacctataattccagctactccggaggctgaggcaggaaaatcacttgaacctgcagtgggggtgcagagggtgcagtaagctgagatctggccacttcacaccagcctgggcgaaagagcaaaaccccgtctcaaaaaaaaaaaagccggtgccgtggctcacgcctgtaatcccagcactttgggaggctgaggcgggcagataacaaggtcaggagatcgagaccatcctggctaacacggtgaaaccctgtccctactaaaaatacaaaaaattagccgggcgtggtggcatgcgcctgcaatcccagctgcttggaagctgaggcaggagaatctcttgagcctgggaggcgcaggttgcagtgagccgagatcctgccactgcactccagcctgggtgacagaccaagactccgtctccaaaaaaaaaaaaaaaaaatgccaattagatattctagaaatgcaattggaattcacatttaaaaatcggtaaagcaacctgttttacttgattatgttgttcttttgtttttttaccccccaagaaagagggtcttgctctgtcacccgggctggagtgtaatggcccaatcatagctcactacagcttcgacctccgacctcagctccctgagtgcctgggactacaggcgggcaccatcacacctggttcccaactagaaatgttctgataatagaaagtgaaaaacaaaagttagattaaaaaaaaaagggatgatatgagcctggagaagaacagaataatgaggacagaggagaagttaggagcctctcactttgctaattctactttgtctttgattaaccttacaggcgcaattcaatgctgattgtcaacctgttggctgtcactggtggctgctttatgggactgtgtaaagtagctaagtcggttgaaatgctgatcctgggtcgcttggttattggcctcttctgcggactctgcacaggttttgtgcccatgtacattggagagatctcgcctactgccctgcggggtgcctttggcactctcaaccagctgggcatcgttgttggaattctggtggcccaggtactctagaacttctcatacttaatgagtgttagtttcatgggtcattaaaaaagttaacataggtaaagcactgaagaatatctggcacatgttcaattacatatggaagttttagataatagatagtagctgaagaagcaggctgaggccgggcgctgtggctcacgcctgtaatcccagcactttgggaggccgaggtgggcagatcacgaggtcagcagatgaagaccagcctggctaacatggtgaaaccccatctctactaaaaacacaaaaaattggtcgggcgtggtagcgggcacctgtagtcccagctactccggaggctgaggcgggagaatggcgtgaacccggtaggcagagtttgcagtgagccgagattgtgccactgatctccagcctgggtgacagagcaagactccgtctcaaaaaaaaaaaaaaaaaaaaaaccatgctgagtagagaaaggaaaagaaacacaatttgtttattttttcacatggtaaaagaatgtatgattttctgaactttttgtgttttaatgaacttgtggcctgtgaagtatggggtttatagcattatctttgtgtggtttctagatctttggtctggaattcatccttgggtctgaagagctatggccgctgctactgggttttaccatccttcctgctatcctacaaagtgcagcccttccattttgccctgaaagtcccagatttttgctcattaacagaaaagaagaggagaatgctaagcagagtgagtatccttcacaccttactacatgaattatatggttgtggtttgttttagggatgattgtactggacctactttctgttacactctttccctgcctctcagaatccaagtgaggagggttctgattactcctgagtaaaattttcagcccctaaagaatgaggtgaaaaggcgggtttaggaatggatgctatcaggcagggtgtgatggctcatgcctgtaatccagcattataagaggccgaggcgggtcacctgaggtcaggagttcaagacctgcctgaaacaacatggagaaaccctgtctctactaaaaatacaaaattagccgggcatgggggcgcatgcctgtaatcccagctacttgggaggctgaggcaggagaatcgtgtgaacccgggaagtggaggttgcagggagctgagatcatgccattgcactccagcctgggcaacaaaagtgaaactctgtctcaaaaaaaaaaaaaggaatggatgctacccatcacctcacctcgtgcggccctttcctggctgccttacaggaagaatgaatttggggcagcacattctcttttatcctttcctctttcttcttttcaccagtcctccagcggttgtggggcacccaggatgtatcccaagacatccaggagatgaaagatgagagtgcaaggatgtcacaagaaaagcaagtcaccgtgctagagctctttagagtgtccagctaccgacagcccatcatcatttccattgtgctccagctctctcagcagctctctgggatcaatgctgtgagtgtgatactttagggtcaaacgtgtcttaaagtatttcacttaaaatgccgggcatggtggcggtgtgcctctgtagtcccagctactcaggaggctgaggtaagaggatcacttgagctcaggagtttcaggttgcagtgagctataattatgccactgcattccagcctgggagacagagtgagactgtgtctctgaaatttaaaaaaaggaaaaaaaaaaaagaccctggaaggacactggcaacttcagagtgaactgactttaccagtctgtttttacaactagtatagcgagcatggtagtttaaagagggcatgatagatgatagtttaaagagggcggcacaacggaagctagcatttggcaggtagcccttgtattccatgcaaatatcagcttcctgcatttgactgtggattgtaggaagagagtattcctgtgccttctagtcaatatggatattaagagcacccttgtcccacctttttaaatactgattcatcccctaagggttttcagatagtctttgatcaatgggattaaattattttgtaacaaagcattttgcaaaacttactattttgagcattttgatgctcaaaatagtaagttggttcttggaacttttctcctacctagcacaccaggatatttgtatttgaagtggcagtgcttcttatgaggggttagaggctgttatgtcagaatctatgaggagccaagtgtggtggctgctcatgcctgtagtcccagctactactcgggaggctgaggtgggaatatcacttaggcccaggagtcaagcctgggaaatatagtatgaccctgtctttaaaaaaaaaacttgggaggaaatacacagtagttagaaaaagcctcctaggtgattttgatgaatcccagtctcaaatttcttcatttggaaatgataatgtaggccacacgtattactggagaaaaatgtgctcccgagactttccagagcagcagagctgggactaggcaggtgaggcagctacgtgcaagtgtagccctgagaatgagcacctctttaaagaatgtaccttgcgttagttctgtgcctgtttaaaaaaagaaaaaagaaagaatgaaagaatgcacctgaggcaactccctagctgcctcaccacagtccaggccctgcaaaacaggatcagtaaaagatcacctgtgagaaatgacaagtgatccgtgagcagtctgagggacagactcctgccatttcagagtatggtgtgtacattctttttttttttgaaacagagtctcactcgatcgcccaggctggagtacagtggcacgatctcggctcactgcaacctccacctcctgggttcaagcgattctcctgcctcagcctcccgagtagctgggactacaggcgtgtgccaccatgcctggctaatttttgtatttttagtagagaacaggtttcaccatgttggccaggatggtctcgatctcttgacctcatgatccgcctgccacggccttcctaaatgctgggattataggcgtgagccactgcgcctggcccatcctttttttgaggtgaagtcttgttctgtcacccaggctggagtgctgtggcgcaatctcagctcaccacaacctccatctcctgggttcaaatgattctcctgcctcagactcccgagattacaggtgggattacagcccagattacaggtgcccaccaccataccttgcttattttttcgtatttttagtagagaatagagggatatcaccatgttggccaggctggtctcaaactcctgacctcaggtgatccacccacctcagctctctctcctaaagtgccggccttacaggtgtgacccacctcgcccggcatgtacattaattattgttggactaagctggctcccaatttagtcaatgagtagattttgcgctaggtataatctcacccaaagctggctgcatcagaattatgggggttgggattcctgagtcagctgaatttgagaatctctgtgtaagagacctgaaagttgtctgtaaaaaaataaatctgatgcacagcaggcttggaaatcacttttccaacctactttgcacaaatgatgatttctaatttcccttatgggcagatgggtaagaggttgcattgtatcatgtttacctagcagagtaaactatttaggtgagatgatgtaggggttaccttgcttggtgacactagatagcaaagtcattttactatgagaaattttattgagatgagtacatgtacattaggtttttgacgtgtagacattatgttaaggaaaagaattggcatacctatttattgcttgtttaaactgctcaagtaattacttttgcactagcctaatatatttccccacaagcttgacgccatcatataatatgttgagatttcttaacagtgttaattagccctagagcagcaggtttttcaataatgactctacaaatctcagtttcaaaacacaattatcttattttagaaaatatgaatatacatagtttacatcttacgtactagggatttaaagagttgtttcgtgagaaggtaaatcccaatgtagaggtccatattcataaaaaagactaataaatattgctatggaggcaaatactctgggtgaaataaactgaagtgaacctcggtaacctagataatgttcccttgttaacttgaggtctgagtccagtattttaatatctcttaactatggtagttatagcaactttagattttagcacagtgcctagcaaacaacataataatttatttaatatatattaaattgcattagtagctggtattatttcataaaacacttcaaaagggcctaggcctaggaaatacagcccaacctctgcttattcaatgagcaggataaggttattcaattagttcactatcaaattgagacatcgatgtccctatcaatgttttgagagtttggggaagagccaattaaaaaagcatttagctgggcctgatggcacatgcctataatcccagcaacttgggaggctgagaggcaggaggatcacttgagaccaagagtttaggaccagcctgggcaacagtgagttgctgtctcaacttataaaaaagaaaccagttagtaggaattacacctttatgtaagttagtgaagtggacataagcaagaggaaatggaacagtgggaataagcatttttagaagaaacaatgtaaatgagtagctagaattaagaacatttagagagagaaaggagggccaggtgcggtggctcatgcctgtaatcctagcactttgggaggccaaggcgagcaggtcacttgaggtcaggagtacgagaccagcctggccaacaaggtgaaaacccatctctacttaaactacaaaaattagctgcgtgtggttgcaggcacctgtagtccagctactcaggaggctgaggcaggagaatcgcttgaatctgggaggtggaggtagcagtgagctgagattgtgccactgcactcctgcctgggtgacagatccagactaggagataagatacagaagataattcatttgcagaagggatattagtattgaacgaaaacctagaaaaaggacttcttacccactgggacttttaagtttatttttgagggttctgtgtaactggtgtgcagaattgcatcaaagctgcatgttttcttttctcctaggtgttctattactcaacaggaatcttcaaggatgcaggtgttcaagagcccatctatgccaccatcggcgcgggtgtggttaatactatcttcactgtagtttctgtaagttggatggtttggtaattttgaggggagaaaagaatccttgctacagatgttcaaagatggattgcatgaccctaccatcatttagttacctttttgttgcttaattttcctttgggaaaaagagataaatttaatgttggatgtagtcttcactcttcaagcaaatatgggatggatgggaaaggagggagtatagaagggactatatagtatgctttgaacttggaattggaggaaaggtgcttggaaaaactctcaagctctgttactccactgtttttacactaaaacaacaataatcaacagaagttatctgtgatccccagaatatgtgagaatttttccccgtgaggtgtgcaatcagttccgtagtggacaccatctaggtgtcctgcgattttttaattatgacactgtctacctggagatagcatcagatctcacaggttggtggcccagttcccaagactgccccccactcctgatgccagtcacaagctccaggttgttttacctgtgcttctgactcaccagctgtagatcaggattcccacgacatcctctttgggtttgattaatttgctacagtggctcacaaaactcaggaaaattgtttcctagtttgatttaaaggatattttaaagcacagaaatacacaaccagatgaagagattcacggggcgaggtctggagggatcctgagcatgggagcttctgtctctgtggggttggggtgcactcctagcacatagatgagttgttgctgaccttcctgtcagcttccacgggttcagatatctggaagctccccataccctgccttttgggccttttatgcagacttaattggttctccatgattgaagcatggacaactgttctgacctgtgattggacaaaaagggaatgatctgaacccagctgggcctgtctgcttagatgatttgttggcctctctgtagcgtttcttcctctagggtgtggggcaggaccctctctgaaatgagggttttatgacccacagtcagattagcgtcctgccaagtgggagggcaggagaaagtcagagaagaattctgttatctgaggcctgctcctgaggcctgaagcatcccaacattatgacaaaagactctaccaagggctatggggattttgagccaggacctgtgaatggcacacaatatgtatgtatataaaatcataaatcacaggaggggtatccataacaagtgtcctgctgttggtaaggcagatttcaagtagctcagatgctgttttcatggaaaggaaaactgaagtttcatgtcatattcttcttccagctatttctggtggaaagggcaggaagaaggactctgcatatgataggccttggagggatggctttttgttccacgctcatgactgtttctttgttattaaaggtaggtgctctttgggtgaaaaaaaagggagggggaaagaagagaggttacagttgacttctgtgacacaaggggtgggttgttaaggttgcagtttgtcaataaagtcagaggagagaagcaggatgcccagagtttaagaaacatgggtcgtcagagaactggaggtaaactgttagaatccttacatttatagaacattattatagcttataaaataaattatctaatttaattcttagaataatatcaaggtaatcacacttaatagatgatgacatggtctcagtacaaagtgacatatatgagatcatatagatgggattgaaaaattcaatcctcagctgggcgcggtggctcacgcctgtaatcccagcacactgggagggtgaggcaggcggatcacctgatgtcgagagttcaagaccagcctgaccaacatggagaaaccccgtctctattaaaaatagaaaattagccaggagtggtggtgcatgcctctaatgtcagctacttgggaggctgaggcaggagaattgcttgaacccaggaggcagaggttgtggtaagttgagatggtgccattgcactccagcctgagcgacaagagcgaaactctctctcaaaaaaaaaaaaaaaaatccaatcctggctgggcgcagtggttcatgcctgtcatcacaacactttggaaggccaaggttagaggattgcttgagcccagaagttcaagaccagcctacgcaacatggcaagaaactttctctacaaaaaaacaaaaaaaaattttttttttgagacagggtttcactctgtcaccaggctggagagcagtggcaggatctcagctcactgcaacctctgcctcctgggcttaagtgtttctgctgcctcagcctcccaggtagctgggattataggcacgtgccaccacgctcagctaatttttgtacttcttagtagagactgtgtttcaccatgttagccaggctggtctccaactcttgacctcagataatccacctgccttggcgtgagccacagctcctggccaaaaaaaaaatttttttttaattaggcaggtgtggtggcacatgcttcaagtccaagcgatttgagaggctgaggtgggaggattgcttatgcccaggagatcgatgatgcagtgagctattgtagtgccactgccctccagcatgggcaacagagtaagaccctgtctcaaaaaataaaaataaaaataaatccaagccttttgactccacagccactctttgtattgtacgtcagggacaggaggagcttgccgttaattgcttctgggaacctagatactaggttacactgtctttaaatttaattttctctgttccttgctcttacaggataactataatgggatgagctttgtctgtattggggctatcttggtctttgtagccttctttgaaattggaccaggccccattccctggtttattgtggccgaactcttcagccagggcccccgcccagctgcgatggcagtggccggctgctccaactggacctccaacttcctagtcggattgctcttcccctccgctgctgtaagtaaactcaccttatcttaaaaccagcctatgtaagctgacatgaagatactccttaataatacagtagtctgggcctggcatggtggctcatgcctgtaatcctagcactgtgggaggctgaggcgggtggatcacctgaggtcaggagttcaagaccagcctggccaacatggtgaaattcaaaaattagctgggcatggtggtgcatgcctgtaattccagctacttgggagatcgaggaaggagaatcgcttaaacctgggaggtggaggttgcagcgagctgagatcgcgttactgcactctagcctgctcgatggaagcaagactccatccctaaataaataaaaaaatacagcagtccctcctcttcttcagtttcagttacctgtagtctaaaaatattaaatggaaaattgcagaaataaataattcataaagtttaatttgcggccagacacagtggctcaagcctgtaattccagcactttgagaggcctaggcgggtggataacttgaggtcaggagttggggaccaacctgactatcatggtgaaaccctgtttctacaataaatacaaaaattaggccgggtgtcgtggctcatgactgtaatcccagtgagcgagatcacaccattgcggtagcacacacctgtagtcctagctactcagaagactgaggcaagagaatcacttaaacccaggaggtgttcatggtgagctgtgatcaaccttctgctctccagcctgggtgacagagcgagattccgtctcaaaaaaaaaaaaattcataaatagagatggagttgcccaggttagtctcaaactgctgggttccagtgatcctcccaccttgacctcccaaagtgctgggattatgggcgtgagccaccgcactcggcccagaaacacagattttaaaaataatactcaaaagtccaaaaatactcagtagacatttggaagcatctaactgtaatgaaatggaatgacagaaagaaaactagagagaactacagtaagttagcaatggaatcataagcgaatctgaagaaacctgttttcattaaatatggaagggttatagcttgaagcctattggaaatatgaatgtgaaggaaattgactttgtcaatgaccagatttttatatcaaccttccttttttctgtcctttctctagcactatttaggagcctacgtttttattatcttcaccggcttcctcattaccttcttggcttttaccttcttcaaagtccctgagacccgtggcaggacttttgaggatatcacacgggcctttgaagggcaggcacacggtgcagatagatctggaaaggacggcgtcatggagatgaacagcatcgagcctgctaaggagaccaccaccaatgtctaagtcgtgcctccttccacctccctcccggcatgggaaagccacctctccctcaacaagggagagacctcatcaggatgaacccaggacgcttctgaatgctgctacttaattcctttctcatcccacgcactccatgagcaccccaaggctgcggtttgttggatcttcaatggctttttaaattttatttcctggacatcctcttctgcttaggagagaccgagtgaacctaccttcatttcaggagggattggccgcttggcacatgacaactttgccagcttttcctcccttgggttctgatattgccgcactaggggatataggagaggaaaagtaaggtgcagttcccccaacctcagacttaccaggaagcagatacatatgagtgtggaagccggagggtgtttatgtaagagcaccttcctcacttccatacagctctacgtggcaaattaacttgagttttatttattttatcctctggtttaattacataattttttttttttaactttaagtttcaggatacatgtgccgaatgtgcaggtttgttacataggtatatatatgccatgatggaaatatttatttttttaagcgtaattttgccaaataataaaaacagaaggaaattgagattagagggaggtgtttaaagagaggttatagagtagaagatttgatgctggagaggttaaggtgcaataagaatttagggagaaatgttgttcattattggagggtaaatgatgtggtgcctgaggtctgtacgttacctcttaacaatttctgtccttcagatggaaactctttaacttctcgtaaaagtcatatacctatataataaagctactgatttcctttggagcttttttctttaagataatagtttacatgtagtagtacttgaaatctaggattattaactaatatgggcattgtagttaatgatggttgatgggttctaattttggatggagtccagggaagagaaagtgatttctagaaagcctgttcccctcactggatgaaataactccttcttgtagtagtctcattacttttgaagtaatcccgccacctatctcgtgggagagccatccaaataagaaacctaaaataattggttcttggtagagattcattatttttccactttgttctttaggagattttaggtgttgattttctgttgtattttaactcatacctttaaaggaattccccaaagaatgtttatagcaaacttggaatttgtaacctcagctctgggagaggatttttttctgagcgattattatctaaagtgtgttgttgctttaggctcacggcacgcttgcgtatgtctgttaccatgtcactgtggtcctatgccgaatgccctcaggggacttgaatctttccaataaaccaggtttagacagtatgagtcaatgtgcagtgtagcccacacttgagaggatgaatgtatgtgcactgtcactttgctctgggtggaagtacgttattgttgacttattttctctgtgtttgttcctacagcccctttttcatatgttgctcagtctccctttcccttcttggtgcttacacatctcagaccctttagccaaacccttgtcagtgacagtattttggttcttagttctcactgttccctctgctcctggagcctttgaataaaaatgcacgtagctgaggccggatgcggtggctcacgcctgtaatcccagcactttgggaggcctaggcgggcggtcaggggttcgagaccagtctggccaacatcgtgaaaccctgtctctactaaaaatgcaaaaattagccgggcgtggtggcgggcgcctgtaatcccagctacttgggaagctgaggcgggagaatcatgtgaacccgggacgcaggggttgcagtgagcggagatcgcatcattgcactctagcctgggccacagggcgagactccgtctcaaaaaaaaaaaaatgcacatagctatcaagtgtgctttagcttgaaaaggtgaccttgcaacttcatgtcaacttctggctcctcaaacagtaggttggcagtaaggcagggtcccatttctcactgagaagattgtgaatatttccatatggattttctattgttactctggttctttgttttaaaataaaaattctgaatgtacacgaca

SEQ ID NO: 68 - DNA, 96865 bp, Homo sapiens
ttagttctccgggtacctcaggcgcctcagcctccttagtctcctcatcctgcttcacaggctccgcggcctccggcctcctcggcccccgtcccccggcctcctcggcccccgtcccccgccatccgccgcccggatcctcgccgccctccctaggccgccccgccgccatgggcctgcgcccgccgcgccgccgggccgagggcagctgaggcgcggtgcgaagatgggcgaggacagagcagggcccgagcgccagccccagcagcccgggcgccccgcgcgcgcccgcccgcgccgccgaggggatgcccgcgcccgccgccgcgccctgagcgcctttgtctgccgcccgcgcccttccgcaccactagcctctcgggagcatggcgtcggccccgccggcctcgcccccgggctcggagccgccggggcccgacccggagccgggcgggccggacgggccgggggcggcacaactggctccgggccctgcggagctacgcctcggagcgcccgtcggcggccccgacccgcagtccccgggcctggatgagcctgcgcccggggccgctgcagatggcggggcgcgttggagcgccgggccggccccggggctggagggaggcccgcgagaccccgggccgtccgccccgccgccgcgctccggcccgcgggggcagcttgcgagccccgacgccccgggcccagggccgcgctccgaagcgccgcttccagaactcgacccgttgttctcctggactgaggagcccgaggagtgtggccccgcgagctgcccggagagcgcgcctttccgcttgcaggggtccagcagcagccaccgagcgcggggcgaggtcgacgtcttctctcccttccccgcgcccacggcgggcgagctggcgctggagcaaggtcccgggtccccgccgcagccctcggacctcagccagacccacccccttccgagcgagcccgtggggagtcaggaggacggcccccgcctccgagccgtgttcgatgccctggacggggatggggacggtttcgtccgcatcgaggacttcatccagtttgctacggtctacggggcagagcaggtacggagcggcccgggccggggcgtgggaactgggcaggtgcgcgctggccggcggggttgatgtgggaccggtcgacgctgcccctggagtcgggaaaggcactgtcaagacctgacggtcctgctttttctgcttattcaccacttcggccctggatttctggttgaattgcgctggagtccctcttcccttcttaaaaggaggttctattctggggagtcagtttcttcccctccccccagcgcctcgtcagctggatcttaccgaggtcagctcctcgcctggggacacccccccagggggcctgatcgccacccccccagggtgcctgatcgacgtgcccctgaatgaagaagttccccgcgattcccccacccgagggcccagatactgctcggctgaattcacccaagttctagccgcagaggccaggctgcccagacgccttgagatcctactgatagacacctattttgagtacaattactttactgtgtgtggttgacatcttttctacttagatttcatcttttatttgggagacagtcaatgcttgtagagagtcctggaattaagaatttttactttggtgcctttggggaggaaggcaatgagcctcggagcttgttggcaaatgcagaagtctagcagaactccgttagggccacgtccactctcgtaggagaggtgaaatgcgtggacaggcactacgcacagtacagtgtggaaggggtccacgcggtcctcagggcacctgctcctgggggaaaggtgggccccaagatgcagttgttcctgtctacctcagcacttaataaagtttaagtggagataacagcagggccgtgtgtgttctgccaataacccggtggacatcaaataataccagtgctcacttttaaatattttacttagcaggaaatccctaaggtgcatctgtcaattttttgtattttgacttctcacacatgcagacatctggtaagtgggtgttcaagtacatatgcatgtttaagccaagaggtctgtaagaaaagaggtaaaattggcacactgctatttagggtgtcagtcataacattaagaaccttgatggtcgggcgcggtggctcatgcctgtaatcccagcactttaggaggccgaggcgggcggatcacgaggtcaggagattgagaccatcctggctaatatggtgaaaccccgtctccactaaaaaatacaaaaaaattagtcgggcgtggtggcgggcacctgtactcctagctactcgggaggctgaggcaggagaatggcgtgaacccgggaggcggagcttgcagtgagcggagatcgcgccactgcactccagcctgggcgacagagcgagacttcgtctcaaaaaaaaaaaacagcaacaaaacaaaaaacacagggtcctgataaatcagggttccttgctgagttcacattaagaagatgtgcagacaggtgcgtgcggggcagcctgcaatgctcgcaagcttagctccggttgggatattgtcagggtagttttccacctacactaatgggcagtgaaatatgtgactgatactttcctgtatggtcagcgtggatggtggttgctggtccaggtgttttgctgcgtttccttcttgcccctgggctggagagcaccttgagctcccttggttgctgttggctactgcgctgtctcttctcccaaacatactcttgcttcagtacagcaaagaagttaggagagtaccacatttgctccttgttaccataacccaactcttgatagagaacttctgtgaggctcaggatgtttccactggatcataccacagttctctgagatagtaggtaagcaggattcatccccactttacaggtaagaaactggaaacccagaaaggtcagatagctctcccaaggtctcacaggagtagaactaggtcttttggcccttagaccttagatgcctcttcttagatgtggtggctcacaatatccctattgtgataatatcttactgactttcatacaattctttttatttgagaaacatcttttgtcataacctcccttaatgatcacaatgggaaaaactttgtgttgctatttggggctgagctttcttgtcatcacaaagtagaaatgagacaaaattcttcactctgaattccaagagctcttgatgaaattcgaaggttgggggcaagggctggatgacttgggatttggtgaggatggggaagtggaagggatctcctgtggtattactccttgtctgttcttctagacggcttaggaagaagcaatgttgggtgtgatctgagtgcctggacttgggccggcttcctgggatggaggagagctcttgatttcttaaagctaagttactgtttggcaacagataatttacagggtaaagaaaggttgattttcatgttatgtaaccctgtagccattgctcagttttagcagtcttggttcatctgtaaactcaccactcactacccccagatgatttttgaagtgggttcctgacattatatcatttcttccataaatgcttcagtatatatttccaaaagataccgattcttttaaagacattaatgatttttttaaaaacgctagggaacagttcagattaactggataacagcaataaaggtcataagtttttgtactttctaccttgagatttcaaaatattgagcacatgagagactcttagtccagtcacattactgtccttgatgataacaactagattatcttaatttttttttttttttgagatggagtctcgcctgctctgtcgcccaggctggagtgcaatggtgtgatctcggctcactgcaacctctgcctcccgggttcaagcgattctcctgcttcagcctcccgagtagctgggattaccggtgcccgtcaccacacctggctattttttgtatttttagtagagacggttttgccatgttggccaggctggtcttgaactcttgacctcaggtgatccacccgcctcggcctcccaaagtgctgggattacaggcatgagccactgtgcccggccaagtatcttaatttttatcaaattttcagaggtagcatattgagtatcttctatgtaatctgtttatgaaggtagcattttaaattatttaaatggattatctgaatttttaatagaagcagctcctgtttataatacagatggcttttgtgtccctgtttctttagcaatgtcatggtgtgtttggatctaattacgtcatctggtgatagatcaggtgtagtgtaatataacacagtgttgtgttagcagaaatcagcacatgaaaggagcaagtggagctttctggttatatttttttgaaacaggaatttatagtcagatgtgtccaggaattaggtatgaagttggaataggtgatttttaaggcttcaaccatctctggagattgacatgaccccttcatactgagaggactgatgcttttgtatttactgccacctatcatgaagcagagattgtaaaataaattctaagagtgttgtgagaaaggattactttaattttgttttgtttttaaagattataactgtaatttacatgttatttttacagtcacttaagcagttgcgttttaatagccactgattcttttcagagaatgtccttcagtaaccttggtaggcattgtctgtcttcagtacttgcagaaataggctgccgaaggaagtgtcgatgctcagatctccctacgtttttttattcctgcaccgctaatggtggcagtaggaagttcctagggacatttgactgcacctttttgttcgtttgttttgagacaggatctcactctgtcacccagtctgaagtgcagtggcaagatctcagctcactgcaacctccacctcctgggctcaagcagtcctctcatcttagcctcctgagtagctgggactataggcaggcatgaccatgctccgctaatttaaaaaaattggctgggtgcagtggctcacgcctgtaatcccagcattttgggaggctgaggcgggcagatcatgaggtcaggagacggtgaaaccccgtctctactaaaaatacaaacatttttaaaaattatttttgtagagatgaagtatagtatagtgatactgcccaggcatattattgaactcccaggctcaagcgaccgtcctcgggcctcagcctctcaaagttctgggattgcaggcatgagccgtagcgcccagcctggcatcgccttttatttgccctgtatcatttccagtctcttagccttgaatttgagtgaaagtgtgtgtgaatgagagtgagcatgtgtgtgtgtgagcagttacatatgtgagctggtgtgtgtgtgtgtaatatgtgtgtgcggtgagatgtgtgggagcatgtgtctgcaggatcagggatgtgtgtatgtgggagtgggatatttgtgtgtaagtggcatattatgtatgtgtgtgagcaggtgagtgtatgtattctgggtctacatgctgactgaattgctgaaaggcaaatgaagcttgggttgtataaaacagaaaatgaccaataatcccactatcctgagaaaaataacattcccattattttactacatttcttttcagactttttttttttttttgaaatagagtcttgctctcttgcccatgctggagtgcagtggcacaatctcagttcactgcaacctccaccacgtgggttcaagcgattgtcttgcctgagtctcctgagtagcttggactacaggcgtgcaacgcctggctaatttttatatttttagtagagacggggtttcgccgtgttgactaggctggtctcgaacaccagacctcaagtgatccacctgcctcagcctcccaaagtgttgggattacagatgtgagccaccgcacctggcccagaccttttttaacacagacatagacacacaggtgactgtctataaaagtacacaattgagatcatattggggtagaagctaaatttttttttttttttgagatggagtctcgctctgtcacccaggctggagtgcagtggcgtgatcttggctcgctgcaagctccgcctcccgggtttatgccattctcctgcctcagcctcctgagtagctgggactacaggcgcccgccacccctcccggctaatttttttgtatttttattagagatgaggtttcaccgtgttagccagtatggtcttgatctcctgaccgcatgatccgcccacctcggcctcccaaagtgctgggatgataggcatgagctatggcgcccagtgaagctaaattatttttatagatgttcattgttttaaaagaaactggcctggcgcggtaactcacacctgtcatcccaacactttgggaggccaaggcgggtggatcatctgagatcaggagaccagcctggccaacatggtgaaaccccatctctactaaaaatacaaaaattagctgggtgtggtggtaggcgcctataatcccaggtacttcagaggtcgaggcaggagaatcgcttgaacctgggaggcagaggttgcagtgagctgagatcttgccattgcactccagcctggacgacaagggtgaaactgtctcgaaaaactaaaaagaaactaaaactagtaggtaaaatactagtagataaaataagaaaaataaggagcccttgtaatccccccatccattaatatcattaagagataattaaatatttaatatgtaaattaaaatgtatgtaatacatacttgattatagataaatgttataatttgcatgcatgttgctttgaatctgctttttgacctggttttttttttttttttgtgtgtgtgtgtgtgtgacagggtctcgctctgtggcccaggctggagttcagtggtacgatctcggctcagtgcagtctctgcctcccgggttcaagcaattctcctgcctcagactccctcagccacttagctgggattacaggcgcctgccaccactccggctaaatttttgtatttttaatagagatggggttttgtcacgttggccaggctggtctcaaactcttgacctcgtgatccacccgccttggcctcccaaagtgctgggattacaggcatgagccattgcccctagcctgagctgtttctttttaattgatagaaatatttgtacatattcatgggatgggtacatgtggtattttgttacaggcatacactgtaatgatcaagttggggtgtctgtcacctccatatttatctttttttttttttttttttttttgagacatagtctctgtctcttgcccaggctggagtgcagtggcgcgatctcagctcgctgcaagctctgcctcccgggttgatgccattctcctgcctcagcctcctgatagctgggattacaggtacatgccagcatgcccagctaatttttgtatttttactagagacagggtttcaccatgttggccaggctggtctcgaactcctgacctggtgatccgcccacctgggcctcccaaagtactgggattacaggcgtgagccaccgctcattgcatatttctaaccattaaccgtgctctttaccctcctgatgcttcccagcctctgatatcaatcgctctattctctacctccattagatccacttttctagctcccacataagagtaaaaacgtgatatttgtctttctctgcctgtcttacttgacttcacataatgacctccatttccttccacgttgctgcaaatgacatgatttcatttttttacgtggccaaatagtactccaggccggatgcggtggctcacgcctgtaatctcagcactttggaaggccaaggcgggcggatcacgaggtcaggagatcgagaccatcctagctaacacggtgaaaccctgtctctactaaaaatacaaaaaaaaaaaaaattagctgggtgtggttgcgggcgcctgtagacccacctacttgggaggctgaggcaggagaatggcgtgaacctgggaggtggagcttgcagtgagccgagatcgtgccactgcactccagtctgggtgacagagcgagactctgtctcaaaaaaaaaaaaaaaaagtactccattgtgtatctatattacattttctttatccattcaactgttgatggacacttagattgattccatatctttgctattgagaacagtgctgcagtaaacatggggtgcaggcatccctgtggtatatggatttcctttcctttggataaatctcagtagtgggattgctggattgtatagtagttgacctaaattttttgaaattgaaggtctctgatatcagatgtatatttatttatttaaaaatttctttattttttgagacagagttcactattgttggctaggctggagtgcaatggcacgattttaggtcactgcaaccttcgcctcctgggttcaagcaattctcctgcctcagcctccttagtagctgggattacaagcatgtgccaccatgctcggctaattttttgtatttttagtagaggcggggtttcgccatgttagcccaggctggtctcgcgctcctgacctcaagtgatctgcgtgccgcagcctcccaaagtgctgggattacaagcgtgagccactgcaccctgccagatgtatactttatttttttgatatagagtctcactctgttgcccaggctggagtgcagtggtgcaatcactggtcactgcagccttgacctcccaggctcaggtggtcctcccatctcagcctcccaggtagctgggactacaggtacgtgttaccacacctgcctaatttttctattttttatagagacagggttttgccatgttgatctccaactcctgggctcaagtgatcttcccaccttggcctcccaaagtgctaggattacaagcatgagccactggcctggcagatgtatactttaatggaaacctaaggtttacttgtccccaggaagattcagaattgttaaggatggccggacgcagtggctcacacctgtaatcccagcactttgggaagccgaggtgggcagatcacttgatgtcaggagtttaagaccagctggccaacatggtaaaatctaaagtctactgtctactaaaaatacaagaattagaccaggcgcggtggctcacgcctgtaatcccagcactttgggaggccaaggcaggtggatcacgaggtcaagagatcgagactagcctaaccaacatggtgaaaccccgtctctacgaaaaatacaaaaaattagccgggcgtagtggcgggtgcctatagtcccagctactcgggaggctgaggcaggagaattgcttgaagctcagaggtggaggttgcagtgagtcgagatcttgccactgcactccagcctgggcgacagagcgagactccgtctcaaaaaaaaaaaaaaaaagttaaggactattctggttccagtttaggatctaacatacaggaagagtttagttctgtgtagatggtgcagacaaggttgttaagggcaccaggcttatggattgcttctcttccaagcacttattttgtttaaattctggaaacattcaatgtaaacattagttatatcagacaaaaggattaggcatccacttaagtctattatgtagctcataaaagtggtaattataaaggctccaaatttacttagattagcacttctaagttattatgatagagtgatgtactaaatatacatcacacttacaaccaggtagaattgaaagaagttttgaagaaatattaaaagtgcttttagttttgtgttgggagatatgagtgtgtaggagagggcgtatggtgggaagggttttatttgaggtattggctatatttcctgttgtgttactgattttgattattttgaaaagtagtgcctttgcacatagcatagagttcaaacagtacagaagggaatctagtaaaaaaaatcattacagttggtagaaataaaaaaatttaagtaaaccctaaagataaaatatttacatactttgacttcattaaggttcatataaaatatacaaaatacatctaaagaaacttggattttctagtaaattaaagaactagatagaacattgaatttgcatctgcagatgctttatgaagatgggctatttttactgatatttggagaaatgcatattagaaaatgcctgtaattcctgcttcttggagaaggaaaaaaagagatgggatcattggccaggcacggtgactcacacctgtaatcccagcactttgggaggccgacgccggcgactcacaaggtcaggagttcgagaccagcctggctaacatggtgaaaccctgtccctgctaaaagtacaaaaaattagccgggcgtggtggcaggcgcctgtaattccagctactcgggggttgaggcaggagaattgcttgaatccgagaggcggaggttacagtgagccaagatcgcgccaccgcactccagcccaggcgaaagtgcaagactgtgtctcaaagaagaagaaaagagatgggatctcaatttgttgtctaggctggagtgcagtggtgtgatcatggttcactgcagccttgaagtcctggggtgggttcaagggattctcccacctcagcctccaggggcatgcccccacacccagccaatgtttcatttatttatttatttatttgtttatttatttttgagacagggtttggccctgttgcccagggtggagtgcagtggcatgatctgagctcactgcaagctccacctcccaggttcaagagattctcctgcctcagcctcctgagtagctgggactataaatgcctgccagcacacccagctaacttttgtgttttttgtagaggcgaggttttgccatgttgttagcctgctaagctcaaaggatctgcccacctcggcgtccgaaagtgctgggattacagatatgagctaccgcgcccagccttatttttatttttcgtagagacgagttctcactgttacccggatgaacccctggcctcaagcagtcctcctagtgttgagattatgggcgtaaccatcttgctaggccaacaaattcttagtgacagaattatagctagataggaagaataagtcctagtgttctatatcactgtaggatgactgtagttaataatctgtttttcctaatagctagaaggaggagtcgggtgcagtggctcacacttgtaatcccagcactttgagaggctggggagggtgaatcacctgaggtcaggagttggagaccagcctggacaacatgatacaaaaccctgtccctactaaaaatacaaaaattagctgggtgtggtggcgggcacctatagtcccagctactggggaggctaaggcaggagaatcgtttgaacctgggaggcgggggttgcagtgaggcaagatcgcgccactgcactccagcctgggcgacagagggagactctgtctcagaaaaaaaggctagatgtggtggctcatgcctgtaatcctagcactttgggaggccgaggcgggcggatcacctgaggtcaggatttctagaccagtgtggccaacatggtgaaaccccatctctaataaaaatacaaaaaattagccaggtgtggtggtgcgtgcctgtagtcccagctactcaggaggctgaggcaggagaatcacttgaacctgggaggcggaggttgcagtgagctgagatagtgccattgcgctccagcctggacaacaagggtgaaactccatctcaaaaaaaaaaaaaaaaaaaaaagtcagatggatattgaatctcccaacccaaagaagtgataaatgttgaagatgagagacgtgccaagtacactgaactgataactatatgttatagacatcagaacatcactgtgcagccacgagcgcgcaagactgttatgtcatttaatcaaataaagtgaaaaattcttaatgaaaagaattgtactaattgcattgtaattattattattttttgagacagtgtctcgctctgttgcccaggctggagtgcaatggcacgatcttggctcattcttggcccatacccactgcaacctctgcctcctgggttcaagtgattctcctgccttagtctcccgagtagctgggattaaaggctcgtgccagcacacctgcttaatttttatatttttagtagagatggggtttcacatattggccaggctggccttgaactcctgaccttaagtgatccacccaccttggcctcccaaagtgctgggattacaggcatcagccactgcgcctggccttcccccacctcctcctgagatggagtcttcctctgtcacccaggctggagtgtagtggtgtgatatccacttactgcaacctccgcctctcaggttcaagcaattctcctgccttagcctcctgagtagctgggattacaggcacgtaccaccatgcccggctactttttgtattcttagtagagatggggtttcactatgttggccaggctggtcttgaactgttgacctagtgatctgcccacctcggcctcccagagggctgggattacaggcatgagccgctgcgtccggctttttttttttttttttttgagacagagtcttgttctgtcacccaggctggagtgcagtggcactatctcagctcactgcaacctccgcttccagggttcaagtaattctcctgcctcagcctcacgagtagctgggactacaggtgcacgccaccacgcctggctaatttttgtatgttcatattggccaggctggtctggaactcctgaccttgggatctgtctgccttgggctcccaaactgctgggattacaggcatgagccaatgtgtctggccttttaaatttttttttttttttcctgagatggaatttcgctctaacaccaggctggagtgcggtggcgcgatctcagctcactgcaacctccgcctcccaggttcaagtgattctcctgtcttagcctcccaagtagctgggactactggcacgcgccaccacgcccagctaatttttgtatttttagcagagacggggtttcactatattggccaggatggtctccatgtcttgaccttgtgatccgcccgccttggcacccaaagtgctgggattataggcgtgaaccgccgcgcccggctaaaacattctttaaagagatagggccttgctctgtcacccaggtaggagtgcactggtgccatcacaactcactgcagccttgaactcctgggctcaagtgatcctcccgccttagcctcctcttcgtagctggcactacaggtgtgcaccactgtacttggctttcaaaagttcttgagactaacaggctaggaaaaatggattcagtgtcatgattagggaggaaaataaattctttaagtaggtacagttctatttttgtgtccagatatttcatgcttgtatctgtccgtctgtctttctgtctgttcatggctagtcaagtgaagcagtgggaatggagaaggaccaaagcaacccgtaacgattgtgatcagttagttgtaaacaccactgcactaggaccagctcatcttgttttagcaaattggtattactctggttaccatcttgtgatattcttgtgtttatcataagtttcaaaacagggctcatgttgagccagtgtcctgtgtgtgccactaaaaccggcgtcctagctcttcagcctttaggtctcctgatggctgtggacccacaaaatctgagacagatctcagttagtttagaatgtttattttgccatggttgaggatgcacacccgtgacacagcctcaggtactcctgatgacatgtgcccaaggtgactggggcacagcttggttttatgcattttagggagacatgagacatcaatcaatatatgaaagaagtacattggttcattctggaaaggtgggacaactccaagcaaaggcaggaagacatgaagcagggaggggcttccaggtcacagataggtgagagacaaacagttgcattcttttttttttttgagacggggtctcgctctgttgcccagctggagtgtggtggtgcaatcgcggatcagtgcaccctctgcctcctggtttcaagcaattctcctgcctcagcctcctgagtagctgggactacaggtgcctgcctcgtctggctaattttttgtatttttagtagacacggggtttcactgtgttagccaggatggtctcgatctcctgacctcatgatccgccccccccatcggcctcccaaagtgctgggattacaggcgtgagccaccgcgcccggccttcttggttgattaatatttatttctttacttttattttcttttgagacagggtctcattctgtgccttatagttgcataaaatggaaatgtttctggacatttctggacaataaatttctgtgttcctttttctttttattaaagatttactaatttttgtatttttagtagagatggggtttcgccatgtttcccaggttgttctccaactcctgagctcaagtgatccgcccaccttggccttccaaagtgctgggattacaggcatgagccacctcgctcagcccctctgctgtcgtcccttccctgggatcagtggcccaaagtccaagggaggctcttgctctgcctaccttcccccttttctcctacctggtgggcattctcagctaggcctggccagctggcatcttaatttcctgaagggattttctctttgctgaaagatccccttgctttgctggccgtgtcctgcctactgtttcttaggtcagtgatgcatcttcctcacaaagatgttcaaaatacacagatgcttttatcccttatgggaaggaagacttctgaaaatgctgtgtgatgaatctgggaatgttagttctggagaccagccatgctgggggatcaggaaggcatccctgccatccctgctggttcagctgcagctgtgcctgcgggcaggaagtgaagaggtgagaacaggtgctggcacaggcccgcctggctgccctcttcccaccctcttgctccttcagccctcctccagaacacaggaaggtcagctgagtccatttttcttttttttttttttattgagacggagtctcgctttgtcgcccagggtggagtgcattggtgcaatctcggctcactgcaacctccagctcccaggttcaagcgattctcccgcgtctgcctcccgagtagctgggatgacaggtacctgccaccacgcctggctaatttttttgtatttttattagagacgggtttcaccatgttggtcaggctggtcttgaacttcttacctcaggtgatccacctgcctcagcctcgcagagtgctgggattataggccaccgtcgccatcgcgcctggccctatttttcttcaagcctgttcctgatcactcagtaacctggtattcccactcactcagtagcctgatgttcctgatccctaagtcgtgcgtatccacgattaaacaaacccatgctctaggagtacacagcaggggacatgaggtcttcccatcactgtcgacctctggcatgttctcacggggggtgagttttcccctctgtgtcaccctccagtaagtcctgccgattcattcaaagccccacctgtagaccagtgatgaaaattaattatttgaagtatcctgtaacagtcataaaataatcgctatgctgggtactctgtcgttgcctctctaaattgatctcacgcacgcggaccctaatgtgcacagggactagcctggagttggtgccagctgctcctctggctggagccctctgccccatgctgctcctttcttggtcatgcagcaaacacacatttgtgttcccacaccaggcacccttccttctgtgacataataacagcctttgagtgactgatacttttgatttgtctgcctagagaaggaattccacaactcttgaactatgaagttctctaatcatgcttttttgtttgtttgttttgagacggagtctcgctctctcgtccaggctggagtgcagtggcaccatgttggctcactgtaagcgccacctcccaggttcacgccattctcctgcctcagcctcccgagtagctgggactacaggcacccgccaccacgcctggctaattttttgtatttttagtagagacggggtttcaccgtgttagccagggtggtctcgtctcctgacctcgtgatccgcccacttcggcctcccaaagtgctgggattacaggcatgagccaccgcgcctggcctcatgctgtttttttaagaaacggggtctcactgtgttgcccaggccggagcgcagtggctgtttataggctctgtcacagtcactgcaccctccagctcctgggcagtcctcctgcctcagcttcctgcgtaggtgggactcctggcccatgccactgcacccagcttatgatgctggtttttgaaatggggttgctattcccatggtgagtgtcttgggggagtttgggcatggtagttggagttataaattcaactgaggtcttttgtttcattctggagcgttattagaaccctcgtgaagggggttgctatttcaggaggagctgcaatggccaaccaggagtgtgctggtctcctttctggtcttcctcccgctcagccgggctgccgcttctggtgtctggttgcttccatggttctctacttctgaagtggcaatccagggtggtcaggcaggggtgaattgtctttcggtgtcatgctactttttttctgacgtagtggcagtgtctgctgagtcgtcccaaagcacagagatgtgatttgcagaaggtatgttgtgtcttcgtgggcaggagctggagctccaccctgttgctttagcaggcggcctttgaccaattaagagagcaggtctttcttgttggcgtaactctcctgagggtcacaacaggctccgtgctagagcggtcatctctgcagatgtttcttcctctcttctaccactctcaccccttatttttttcccgcttgtttacaaagttttatttcattccaacatcgggtgggttggtttactttactaaaatccaagaaaaacaaggctgacgtttttgctgttggaaatgaaaagcccttttatgagaaagtccatccccgtcagcatggcttattctgtctggtgaggagagaagaagccatgaagacatttcctcttggtgatttaatttttaagaaccctcttcaggaagccagccctgtgatgcattttaagagaaataccagttagtgaggtttcatcagcactgaggaacacttggctctctcttgcagactaagaaataccaagcaggaggagtcttggcatttggaacgggtaaatcaagaacctgctcttgttggcttgcgagtgcctttaaagcgaaagcaagaagcttagaaggaaaacgtcacagatcatgcacgcttaaaataaaaacatgcaaaagaagtaaataaaaataataacttgcaaataaaggagaaaataaaaaccccatccagcaccgtgaatcttttcagccttctggcttttaaatttttctttgtataggacagttaaacaaaaccagagtcataattgaccattttaacctagtttaagtcaacatattgttaccacctctcgatatcagtacatctgcttctgcagcatgatctttggtggtggtggttgttgttgttgagagggagtctcgctctgtcgcccaggctggagtgcagtggcgcgatcttggctcactgcaacctctgcctcccaggttcaagcgattctcctgcctcagcctcccgaatagctgggactacaggcgcccgctaccacgcccggctaatttttgtacttttagtagagacggggtttcaccatgttagccaggatgatctagatctcctgaccttgtgatccgcccgccttggcctcccaaagtgctgggattacaggcatgagccatcgcgcccggcctggatatgtagggtttaaagcatttaagaaaatattttccgtcaccaaattgtcttccagaaaagtattgccaatctgatacaggaagaatggcatatcaacggagtttcagtttgtatttcctggagtgtatttgagctgatgttcctctgcatgttaataaacaagtgttttcgttcttgtgcgtgtctgtgttgtggtgtgggtgttctccaccctgaggcctctctttctcaacctgtgcatggaggttggccgaggcagcctctgaagtacatggagccctggacagcgccctgagtttctgtagggtttctttcttttgtggtattatcctttcttacgagtttcagatataggccatcagtctgcgtcattcagtaaggaataaagaacatggaaatgcctacttttcactacctttgttccggtgtgacgttctccttgtaaagggcagagggtagtagactaaggcaggcagcagcaggacggtgctgagaacggctctgaagagtctctcttttgtgctgacttaaaagttttctctactgttggatgatctcttgataattaaaaaagaaattatgatactgatagctgttcggcctgcagaataaagctgcagttacttcattcagcaaggtctcaggctcctaattttagagctcctagaattttgtagtcctctcaagattgggttctggccaggtgccatggctcacgcctataatcccagcactctgggaggctgaggcaggtgttttacttgaggtcaggagttcgaaaccagcctgggcaacacagcgagaccctgtctctattaaaaaagattgggttcaggccgggtgcagtggctcatgcatgtaatccaagcactttgggagacccaggcaggcagatcacttgaggtcaggagttcgagaccagcctggccaacatagcgagactatctctattaaaaaagactggagcctggtgcggtggctcacgcctgtaatcccagcacttcgggaggccaaggcaggtggaatacgaagtcaggggaccgagcccatgctggctaacatggtgaaaccctgtctctactaaaaatacaaaaaattagccaggcatcatggtgggtacctgtagtcccagctactcgggaggctgaggcaggagaatggcgtgaacccgggaggcagagcttgcagtgagccgagatctcaccactgcactccagcctgggtgacagagcgagactctgtctcaaaaaaaaaaaaaaaaaagaaaaaaagattgggttcaggctgggtgcggtggctcacacatgtaatccaagcactttaggaggccaaggcaggcagatcacttgaggtcaggagttggagaccagcctggccaacatggtgaaaccccgaatctactaaaaatacaaaaaaaaaaatcagccaggcctggtggcaagtgcctgtagtttcagctacttgggaggctgaggcacgagaatcgcttgaacccaggaggcggagtttacagtgagctgagatcttgccactgcattccagcctgggtgacagagcaagactcttgtctcaaaataaaaataaaaataaaaaaagattgggttttaggtactatgccaatatgggagctcttttaaatttaaagcaaatctcaaaataaaaaaatggacattctataatctcccccttgcccacccaagggagtgactctggtctggtatggggggatgagaatctgaggctgacaccctcaggcaggtggctgaatctcaggcccacagagactgggttgctgttggctcctgtagcggctccactgtggagagaaaggttctgccagaaaatctgggagccacagattagaaccttcctccaggcactcaccatttctccccatctgtgctctcggcgggaggtgctttgtgcccacttggcccaggtgcagggacccagcaagaatgggacagacctggctgctccctgggggaggcagatgggcaaaaggacgttatggcctgagcacctagcagcctccaggtacaggtgttctctggatgcagtcctgaggctcaggtgtaggcccctgtgtgaggtgggggtaggtggggctggaaagtgttctagacacagagacgagggtgcatcatagaatttggggacgttgggtcctacttgctcttggggaatgggagctttgcatcctgtcatctttgtttccctaaagatcaccctgggtgctgggcatgggggtgcgtgtctcaactactcgggaggctgaagtgggaagattactggagcccaagagtttgaagctgcagtgagccatgatcactcctgtgactaaccactgcactccagcctgggcagcatagtgaaaccccgtgtctttgaaataataaaataaagatcaccctggcctctttctgacccgtatctgaaattggttgtctatgtgaagcagaacagtggtacccagagaggcagggcactgaggcttgttttattttaggggacgacattgcaggtgggctttccttgggagcagatatttccttcagagggacataaagagtgctccttggcaggctgtcttccaggtggcctttggcactgcctgcagatcgggtgggcagtgcagctggggagctctgtgcactggcagggtcacctgcacgtggtctcatccttcacagtagaagtttgtggcatctgctgctctagcctggtgtccagatgtgtcctacagagacatgttgacctgttttccaagcacacttcagtgtgaggacttatttccatatagtcctttttattcatatatctcaaacttttttgttttttttttgagacgcactctcgctctgtcgcccaggctggagtgcagtggcgtgatctcagctcactgcaacctccgcctcctagtcctggttcacgcaattctcctgcctcagcctcccgagtagctgggattacaggcacatgcctccgtgcccagctaatttttgtatttttagtagattcggggtttcaccatgttggccaggctggtcttgaactcctgacctcatgatctgcctgcctcggcctcccaaagtgctgggattacaggcgtgagccaccatgcccggctttaaaaacatttttttaagagacgggctgggtgtgatggctcacagctatagtcccaacactttgagaggctgaggcaggaggatcacttgaggccaggagttcaagaccagcctgaacaatatagtgagactctgtttctacaaaaaatataaaaattagccaagtgtgatggtttacccctgtagttccagctacttgggaggctgaggcaggaggatcacttgaggccaggaatttgaggcttcagtgagctatgattgtgccagtgcactctagcctgggcagtagagtaagaccctgtctccaaaaaggaaaaaagagagtcagagagagagagatggcgtctcgctctgtcactcaggctggagttcagtggcacagtggcagcctcctgagtagctgggactacaggtgtgcaccactgcacctggctaattaaaaatatatatatattgtggccgggcgcagtggctcacacctgtaatcccagcactttgggaggccgaggcggtggatcacgatgtcaggagatcgagaccatcctggctaacacggtgaaacctcgtctctcctaatagtacaaaaaaattagccgggcgtggtggcaggcacctatagtcccagctactcagtgggctaaggcaggagaatggtgtgaacccggggggcagaggttgcagtgagccgagatcgcgccactgcgctccagcctgggcaacagagcgagactccatctccaaaaaagaaaagaagactaaaacgtataaattatacctgtctccctacagaaattcattaagagactcatgctcagactgttgtctggttaatgtgaacaacatgagcacatctgaagaaagggtgagaacaaagggttacattcagctttcaggtcaactaatttaaaacaacaggacgggccaggcacaatgaattgtgaaaaataacgctgacaatttaaaatagtggaacaaaattaaaaaaggaaaaagaaaaaaaactgtaaagaaaatttgacatatgaaaaagcgtattgtccaggcgcagtggctcacacctgtaatcctagcattttgggaggccgaggtgggcggatcatgtgaggtcaggagtttgagaccagcctggccaacatggtgaaaccaatctctactaaaaatacaaaaattagccgagcgtggtggcgcgcatctgtagtcccagctacttgggaggctgaggcaggagaatcacttgaaaccatgaggcagaggttgcagtgagtcgagattgcgccattgcactctagcctgggcaatgagggaaactgtctcaaaaaaatagccgggcgcagtggctcatgcctgtaatcctagcactttgggaggccgaggtgggcagatcacctgaggtcaggagtttgagaccagcctgatcaacatggagaaacgccgtctactaaaaatacaaaattaggccgggcgcggtggctcatgcctgtaatcccagcactttgggaggccgaggcaggtggatcacgaggtcaggagatcgagaccatcctggctaacacggtgaaaccccttctctaataaaaatacaaaatattagccgggcatggtggcgggcgcctgtagtcccagctactcgggaggctgaggcaggagaatggcgtgaacccaggaggcggagcttgcagtgagccgagatggtgccactgcactccagcctgggcagcagaacgagactccgtctcaagaaaaaaaaaaaaaaaaaaaatacaaaattagccgggcgtggtggtgcatgcctgtaatcccagctactcgggaggctgaagcaggagaatcacttgaacctgggaggtgggggttgcggtgagccaagatcgcaccactgcactccagcctgggcaacaagagtgaaactctgtctaaaaaaaaattgaataacataaataagtaaataaataagtaaataaaaacaggatggaaattatacctgaaatttaaaaagtaagatggctgtggtaggccaaataatggctcccaaagatagctaggtcctgctctgtccgctgagaccaccacactctacacagtagagtcctcctcatgctatgctctggccctcttgcccctccaacctcacttccagctgccggccccctgctcactctgctcctgacactccacaggcacacatcctcctccaggcctgtgcagtagctattccctctgcctggaatatgcagtcctgtatatctccagctcagtgtctcacagcgctgtcaccaggcgggacagagtgtcgggctcattcaggtgctcagcagaattcagctccttgaggttatagaactgaggaccctgtttgctggttggtcgtttgccagaaatggttcttaggtcctggagaaccctcaggttcaaccacatggtcctcccaggtatggcagcttacttcttctttgagaccaggaggctgctacgatggagtcttaagttaacataaatcacagctaggtgtggtggctcacacctgtagtcccagctactcaggaggctgaggtgggaggatcgcttgagcctaggatcttgaggctgcagtgagctgtgtttaccacaccactgcactccagcctgggtgacagggagaccctatctcaaaaaaaaaaaaaaaaagttttaggccgggtgcagtggctcacagctataatcccagcactttgggaggctgagttgggtggatcacttgaggtcaggagtttgagacccgcctggccaacatcgtgaaaccctgtctctactaaaaatacaaaattagccgtgcgtgatggcgggcatctgtaatcccagctgttgcgtagactgaggcaggagaattgtttgaacccgggaagcagaggttgcagtgagccaaggtcgtgccactgcactctagcctgggcgacagagtgaggctccatctcaaaaaaaaattttgttttaaagattaagttaacctcgtcacagtgactgtgccaccacatgcacaggccttgcccacactcaagagagggggtcttagaattctgcctgctaccatggtctagtcttggcacaccttccttgacaacatggaagccaggtcactacccaggccacctacaaggaagttcaccatttgacctgccgaacgtgcacaacaaactttttttctctttcttgagacagggtctcactctgtcgcccaggctggagtgcagtggaacaatcttggtatactgcaacctctgcctcccgggctcaagcgatccttctgtctcaccctcccgagtagctgggaccacaagcatgcaccaccatgcccagctctggctaattttttgtatttttggtagatatttttgtatttttgtttcactgtggtgcccaggtcagtttcgaactcctgacctcaagtgatcccctggcctccaaaagtgctgggatgacagatgtgacccaccacgcccaaccaagtattggataactttttagtttctttttcttcctcctttacttccgctcaggggtctaggtctgagtcagggcttgagggtgtccccatgggggctggtgttacccaggacactgcagcggctagcagggcttggctgggctggcgaatgagggccccacttctcttttttgtacagggaagggaccgaggatctgagtgacatctgtaggtcagagggcatgctgaccttgaaagcaaggtgggaatggagttctatgagctgaggagtcccagctggctcgcattctagagaagcgccataaagggagtctattcattagccccagggagagagcctcccgctccctccctccccgccccccaccccaccccacccttaggagctgctcaccttcccctcgcctggggcacacacctgcttctccagggaccagacctgaagtgcaggaaggagccccgcggccttctgttaccgcagcgctctgcctgccatcgttgaatgtgtggactctttggttgctttcataaattctgttttatttcctcatcatgtttgctgaaagcttgaatgtatccacttggctgttttccaagtattctcatgtgcattttaagagtctcctgtctttaaaataatgtggaggcagctctgaatatactaaaaccattgaattgtacccttcagatgggtgattttgtggtatgtgaattttatttcaatgaagctgttaacagaaatagtacagagtccgtactgttgtgttttctggagcacctggagtcccctctgtccctggccatccctccttccccacacctcacccctgtacctcaccttccccacccccctgcctcacccctgcacctcaccctccccacgcttcccgtatcagggagcttcttaaacacagaatggggtgttaagatgattggagggcagcagcctattggaatcccgatgaacgtggaaaggtgtcagggaggggtagctgtggtgtggaggagccccacattttcgtccctgtcttgtcacaaagaaggagcccatcgctgtgattagaaggacttaggccgggcatggtggctcacacctgtaatcccagcactttggcaggctgaggcaggtggattacctgaggtcaggagttcaagaccagctggccaacatggagaaaccccgtctctactaaaaatacaaaaaattagccaggcatggtggtgtgtgcctataatcctagctccttgggaggctgaggcaggagaattgtttgaaccagggaagcggaggttacagtgacccgagatcacaccattgcactccagtctgggcgacagagcaagactctctctcaaaaacaaacaaaggaaaaaaacaaacaaaaaggccggggctcggtggctcatgcctgtaatcccagcactttgggaggccgaggcggtggattgcctgaggtcaggagttggagaccagcctggctaagatagtgaaaccccatctttactaaaaatacaaaaattagctgggcgtgatggcaggcgcctgtaatcccagctactcgggaggctgatgagggagaatcatttgaacctcgggagggcagatgttgcagtgagttgagatcgcgccactgtactccagcctgggcgacaagagtgaaactccttaaaaaaataaaaaggaaacaaacaaacaaacaaaaaatcagctgggcatagtggtgggggcctgtagtcccaggtacttgggaggctgaggcaggagaattgcttgaacctgggtggctgatattgcagtgaggcaagatcatgccactgcactccagcctgggtgatagagtgagactccatcttaaaaaaggaaacaaaaaaaagccacaaagaaggacttagaattgggtgctaagcaggcctcttcctactgataggtggacacatctatttctttattattattattattattatttttgagacagagtcttgctctgttgcccaggctggagtgcggtggcatgatctcggctcactgcaagctccgcctcccctgttcacgccattctcctgcctcagcatcccgagtagttgggactacaggcgcccgccaccacgcccggctaattttttgtatttttagtagagatggggtttcaccatgttagccaggatggtctcgatctcctgacctcgtgatctgcccgcctcggcctcccaaagtgctgggattacaggcgtgagccaccgcgcctggcctatttctttattttttaatttttttttattttttatttttgagacggagtctcgctctgttgcccaggctagagtgcagtgagcgatcttggctcactgcaagctccacctcccgggttcaagtgattctcgtgcctcagcatcccgagtagttgggactacaggcgcccgccaccacgcccggctaattttttgtatttttagtagagatggggtttcaccatgttagccaggatggtctcgatctcctgacctcgtgatctgcccgcctcggcctcccaaagtgctgggattacaggcgtgagccaccgcgcctggcctatttctttattttttaatttttttttattttttatttttgagacggagtctcgctctgttgcccaggctagagtgcagtgagcgatcttggctcactgcaagctccacctcccgggttcaagtgattctcgtgcctcagccttctgagtcgctgggactacaggtgcccgccaccacgcctggctaaatttttgtatttttagtagagacagggtttctccgtgttagccaggatggtctcaatctcctgacttcgtgatccactcgccttggcctcccaaagtgttgggattacaggtgtgagccaccatgcccggcctggccacatctatttctgatggataaaagtggattcctgaatatgtgatatgcctctctggggacctgtggaatgacattttgcatgtcagaccagcacagtgcttttattctagacttttctaaaccttcccctctaaaccagggaaagcgagtcggttccccggttcctcatcatgggtaatcagaacagatctctgatttaggaagttggtttttttttttttttttttttgaagcagagttttgctcttgttgcccaggctggagtgcagtggcgcgatcttggctcactgcaacctctgccccctgggttcaagcgattcttctgcctcagcctccccagtagctgggattacaggcgcctgccaccacgcccagctaattttgtatttttttttaagtagaggcggggtttcaccatgttagccaggctggtctcgaactccagagctcaggcaatctgctcacctcggcctttcaaagttctgggattacagacgtgagccaccacacccggccaaggaagctatttttgtacttcaaacagaaaaactgagctgccagtgagcacatttcagagtaggaaaactcatattattcagcctacctgtctttcttccaaatttcaatttagagataaacacaccgtagcttttaagttgccaagaaaagagacatgagatgtactcaaatgccttcattttcccagtaggacctcatcattccaggtggttgaagcatccagtaggcgggtctttgttccttgctcacacacccagttaaaagcaaaggcctcccctcatctagagccaactctgagcagggtcgttaagcatcaactgccaagcataaccccctataaagttgcttgctatagtagttggtgcaaagctgactaaatgggaattaaaaactgtctctagccaggcacagtggctcatccctgtagttccagctactctggaggtcagttggaggattgctggagtccaggagtttgagaccagcctgagcaacatagcgagatcgcctccctacaaaaaatacaaaaattagctgggtttggtgacactcacctctagtcccagctactcaggaggctgaggcaagaggattggccgagtctagtcgttcacatctagcgtgggaaacatgttgtagacctcatctcatattgtatacctcctcaaaaccaaaaccaaaaaaccccaaaagcaaaaaccaaaaaaacccacaaaaccaaccatgaaaacacccctgtctctggaactccttgtccaaggtccctgaggctaatgtgatttggaacagaagccaactttcctgcaggtttagaaagtgtcacatacaggctctttctcattcaagcgtataagaacaggctttcttggccgggcgcagtggctcacacctgtaatcccagtactttggaaggctgaggcagtaggcagatcacctgaggtcaggagttccagaccagcttggctaacatggcaaaacgacgtctctactaaaaattcaaaagttagcgaggcgtggtggtacgtgcctgtaatcccagttacttgggaggctgaggcacgagaattgcttgaacccgggaggtggaggttgcagtgagccgagattgcactactgcactccagcctgggtgacagagcgaaactccgtctcaaaaaaaaaaacaaaaaaactaggctttctttcttttttttttttttcttggccacatgcaccagattgaagaataagctttcttgtctgttctctatacagtgatatgtaaaaatcaccactcagatcaaagaattgagaactgcgcagccaggcgccatggctcacgccggtaatcccagcactttgggaggccaaggtgggcggatcacctgaggtcaggagttcaagaccagcctggccaacatggcgaaaccccgtctctactacaaaaatcagccgggcgtggtggcacgtgcctgtcatgccatctacaaaggaggctgaggcaggagaattgcttgaacccgggaggtggaggctgcagtgagctgagatcacaccactgcactccagcctgggtaacagaggcgactctgtctcaaaaaaaaaaaaaaaagaattgagaaccgcgcacactctcacaagcactcagcagtggtcagtccattcttgggtgggtgatcggatatgactggagcaggtgctccctgtcactgtttttgttgttgttgttgttttttgggagatagggtctcactctgtcgcccacgtggaatgcagtgacgcaatcatggctcgctgcagcctcaacctcccaggctcaggcaatcctcccacctcagccttccaagtagctggaactactggcacgtggaccgacgaattttttggaattttttgtagagatgaggtttcaccatgttgcccaggctagtctggaactcttgggctcaagtgatccatccgccttggcatttcaaaatgctggaaagccaggtgtgagccattatgcctggccttagtttggttcaggctttatactaagtgcatctcaaatattttattgaacatcctttcatttctaagagtacttcagttatctctgttaaaatgaaccaaccagaaagattcccactcaagtgcaggacaacagatattagtatcaagaattaaggccgggcacggtggctcgctcacacctgtaaccccagcactttgggaggccaaggcggatggatcacctgaggtcaggagttcaagaccagcctggccaacatggtgaaaccccatctgtaaggtgggctgagtggctcacacctgtaattccagcactttgggaggccaaggtgggcggatcacttgaagtcaggagttcgagaccagcctgggcaacatggcaaaacattgtctctaccaaaaatacaaaaatgagccgggtgtggcggcacacacagctacttgggaggctgaggtgggagaatcgcttgaacctgggaggcagaggttgcagtgagttgagattgtgccactgcaccctagcctgagtgacagagtgagaccctgtctcaaaaaaaaaaaaagaaaaagaaaaagaaaaacaaggctgggcacggtggctcatgcctgtaatcccagcaatttgggaggccgaggtgggcagatcacttggggtcaggagttcaagaccagcctgcccaacatggtgaaaccctgtctctactaaaaatactaaaaaattgattgggcatggtggaaggtagctgtaatcgcaactacttgggaggctgaggcaggagaatcatccaaaccagaaggcggaggttgtagtgagctgaggccgcaccactgcactccatcctgggcgacggagtgagactccatctcaacaacaaacaaaaaaaccaacaaaaaaacaacaacaaatcaaaacaaaacgagcacttgttgggaacagcagggaaagccctttgtgtatatgtttagctgcttcgcgtctgcttttagaaagaagtgtccgtgccatcggcaggtgagccgcaggcttcagtgccattgggagatactgtatagccaggcttccagagccgcctctctccctgcccacgctggcccatgtgctgatctagtgtgaagtttacagatagcttcgggaactcctaggaacattttgcttattattgctgtggtttctgataagataagctttgttgaaaacagtataattcaagtatgatagtaacaacaagatgcagaaaggcggtttctcgttctgaaaggtgctttgctgtgaagccataatacagtgtgttattcgagaatcctgggaggagtctctgggatcctagttgactgtggtgggagaacttgttctgctttcctttctttcagattagtggatcatgtttctacatccatagtaggaacaatgcaatttgtcagtaagtttttcatactgcagtcaccctggagccagtgactgagtggattctccaccatggtgtttctgtaacttattgtccgtctgctggagcggtgctggctggctttggccactctggtttatgtctcttggctcggttttctgccactactggattttgcagggaagggcaggctgtctcatttttcacagtttcacctttttttttttttttgaaagcctctgaattgagtattttggacttggagaattagaactatccccaaatcatcaattacatgaaatccatctgttctacagattataaagaaaatataattaaaatggagttttaaaaatgtatactttgattcactcttgttcattctaacatggtaacatgtaaaaggggcctattctagttaatgatttgtttaaaaaatatttggttaatgtttcagaataaacaacttggtactttgtgttcaattagtagcttcagtgtggaaattcttaggaatcttcaggacagattggccagtctggactccggattaggtaactctcaggtacccagcaagactctcacattcttaggaatgagcttaggaatgaggacttttgtgagataagtggggagatgttttataaactccagttgtctccaggaagttggttgatgatggacttccgaggctagagtcacgctagcacacagagccctaggattggggcgatggccccggcctcttccgttgtgaaggggaagcggaaactcagtctctggctcaggaattccacactgtggggtcccttagctggggctggccctgtttgagcctgactttatgaggcatgttggctgacagtggcgagagggccagccacgggggcccgggccttgctctggtgccctgtgtgcttcgggctctctggattgcctcctgggcgatgctatagccttgctgaccacgtgctacaccccccatccttttcctgaaacagagcagctgtgtcctggcatctccagcagggctgcccttgagggttctgtgcttgctgcttggtagcagccccggcatctggacttcaccacagggcctagggggccttcctcgggttcaccgatgcccacagggcctggggggccttcctcgggttcaccgatgcccacagggcctggggggccttcctcgggttcaccgatgcccacagggcctggggggccttcctcgggttcaccgatgcccacagggcctggggggccttcctcgggttcaccgatgcccacagggcctggggggccttcctcgggttcaccgatgctcatctgccgtaacctgcctgaggccctagggttttgtcagttaatggatgtggctacagccagggctcctgccagcctgttgcctctccctgtccctgagcattttcacagtccagcccgccacccaagaggggctttcttcaggagtctgccccctctgtggctgaatgctgcctcctttttcctttctccctggcccacacttctttcttctttgctctctttttctcttttgctgttcttgaagttttcattatggaagagttcaaacccatatgaaagtggagagtagtgaaatggtgcactggtacccatccccagtcacagcaacgtgcaggcatgcctctggtgacatctgtgcctcaccccagattctagaggtatttctaagtatttcagtacatgtgtctaaaaagcagtgctctttaaaaaattatgaaaatgtcatcacacctacaaaaatgaacagttccttaatatcatcaaatatttatcagtgttcaaactttttttttttttttttttgagacagagtttcgctgtttttgcccaggctggagtgcagtggcacgatctcagctcactacaacctccacctcccggattcaagcaattctcccgcctcagcctcccgagtagctggggttacaggttcccaccaccacgcccagctaattttgtatttttagtagagatggggtttctccacgttggtgaggctggtctcgaactccggacctcaggtgatccgcctgcttcagcctcccaaagtgctgggattataggcgtgaaccaccacacccagcttcaaactttttttttttttttttttttagcagacaaattctcattttgtagcccaggctggagtgcagtggcacaatcttggctcactgcaacctccgcctcccgggttcaagcgattctccagcttcagcctcctgagtagctgggattacaggcgagcgccaccacacctggttaatttttgtatttttagtagagatggggttttgccatgttggccaggctggtctggaacccctgaccttcggtgatcccatctcagcctctcaaagtgctgggaatacaggcgtgagccacaaggcacctggctgcaatgtggttttaatttaatttgcatttctttaaggactaattgagcattttttcatgtggttatcaaccattcacacatattttctgatgaaatttctatttaagttttttgcccacttaaaaaaaaattgagttgtcttttttttttttttttttttgagacagagtctcattcaatcacctaggctggagtgcaatggcgcaatctctgctcacggcaacttctgccttccgggtttaagcaatttacctgtctcagcctcctgagtagctgggattacaggcatgcgccaccacgcctggctgattttgtatttttagtagagatggggtttctccacgttggtcaggatgatctggaactcccagcctcaggtgatccactcacctcggtttctcacagtgctggggattacaggtgtgagccaccgcacctggcctgagttgtcttcttaattataagatttccttatatattctggacacaagtcatttaacagatatatgatttgcaaatactttctcccagtcagtgtcatttttttgcttttattaatgtcttttgagtatgaaagttttaaatttttatttttaagttttggggtacatgtgtaggatgtacaggtttgttacataggcaaacgtgtgccatggtgatttgctgcacctgtcagcccatcagctgagtattaagcccaggtattttctgtaatactctcccccctcccaccccatcccctgaaaatttttaaatttttatgaaatccaatttacacttggcagaataaacctgcattctttctgaagagtttcattttgtgttacgtccatgtgtgagtcaccctacttagcgtttatgatttttgatatcaagggtctttttccctgagttattcgctaccaaggactctgcagagccaggaaggcatttctgaatgggcggtgtgtgcttatctatgttatctatgtaacatatctatgttggcatgctggatccttgccggaacaatacctaaaacttcagaactgatctccccacgtaagaccctggctgctggcgttcagtggccagggtcctactcctgtggttcatcacgccaggtgctgctggcagcccatttacagggtgctgcctgtcctgtggctgtgaccgtctgcagtggcccatggaggccgtgctgcctcctgcacgtgaggagtcagaggctgtcactgtcagcaccgcccctgttggcggcttctttgcatgtggtgaaaaagccaagctcgcgatacagcctaatcccgattccctaaagcggcccgcagccttcttggcaccagggattggtttcatagaagacgcctttccacagacgggcagggcgttggggtggtttcaggatgatactgttcagatcatccggcgttagagtctcataaggagcgcgcaacctggacccctcgcatgcggagcacacagtaggctttgcgctcctgtgagaagaacctgatgctcctgctgatctgacaggaggggagctcaggcggtaatgctccctcacctcctgctgtgcttccccgttcccagcaggccacacaccagatctctcccagtccgaggtccagggttggggacccctgctgtaaaggcttagggtaacctagtctcatttggcaattacaggtgaaggacttaactaagtacttggatcccagtgggctcggcgtgatcagctttgaagacttctaccaagggatcacagccatcagaaacggaggtcagtcatccccgccatgagctcccacctcctctcccgttcctcagccaccctctcagccacctgcacatcaccaggctcctcgtgctgactctaacatctttccttctccttgaagcccccaacataccccaggtttccaggtggtctctttcctttcttgttaccttctcctcacataccctgttttccagaatttgctgcgttaactacttttccataatgctagaaagcaactgcccccttcctcaaagatttcatgatgacaatttgagaattttcaaaatattgaaagaatgattccatggccacccaagtgggtgttcatcacccgtgctctgcaggcagcacttcgtcgcactctctccccacgtctctgtccatctccagtctgtcccccagcccctcttgaatgggatgtgtttgtaatcagcatgcttccgcgcacaccgccctgaacactgcagcccgtaccaccatcgttccctagagctcagtgtttgtttccagtcttcctttgagtaaaaatttacctgcagtgaaatgtacagctcacacctgctcctctgtgagctccgacagagtcctgtgcctggcagtgcggagcctgtcacgcacatcactgtccccatgtgggtgccgcatacccctcgccctcaggcagtgccttccctcctgctggcaccattgctgatttctgtcaccatggattagttttgcctatctctcttttttttctttgagactgagtttcactcttgtcacccaggctggagtgcaatggcccgatctcggcttactgcaacctccaccttccgggttcaagcgattctcctgcctgagctgggattataggcacccaccaccatgctcacctctactaaaaatacaaaacatataaaaatttttgtatttttagtagagacggggtttcaccatgttggcggggctggtcttgaactcctgacctcaggtgatccgcctgcctcagcctcccaaggctgaggtgctgggattacaggcatgaaccaccgtgcctggccagtttcacctgtcttgagggttcgcgtgctctcacttggcttctttcctcagcacgatcccttccccagcacgatcccttccccagcaccatcccttccccagcaccatcccttccgcagcaccgtcccttccccggcaccgtcccttccccagtcccccggcaccgtcccttccccagtcccttccccagcaccatcccttccccagcaccgcaccatcccttccccagcaccgtcccttccccagcaccatcccttccccagcaccgtcccttccccagcacgatcccttccccagcaccatcccttccccagcaccatcccttcctcagcacaatgtcttccccagcacaatgtcttccccagcaccatccctttcccagcacgatccgttgcgtgcttgtgccgtatttcgtttcttcattctcctggtgatgggcacgtttgtgtacaactctttgtgtggatgcgtgtcttcaagtccttggggcctgtatctaggagtgggtcatgtgctggggtaaactcggttcttcacagtggccgtgccttttcacactctcaccagtccccatactatacactgtccgtcttacgtcaagttctgaagctctgaacaggccatctcacttcctcatgtttggccaggcggtgtaggggtgacggtggcgggtcctttccctccttcatgcacgtgcaggataagtagaccttggctggggccctcagagtcagcaggtgcagtgagggagacggatgcccttggacctcgacctcaggtcttgtctgtctcctccacagaattattgcctgacagtgtctctaagggttttctcagatgccaagtctttagatggctctggggaaacgtgctgtgtgttgttccccggtttttttttttttttttttttttttgagacagagttttgctcttgttgcccaagctgaagtgcaatggcatgatttcgtctcactgcaacctccgcctctcgggttcaagcgattctcctgcctcagcctcccgagtacctgggattacaggcatgtgccattgcgcccagctaattttgtatttttagtagagacagggtttctccgttttggccaggctggtctcgaactcctgacctcaggtgatccacccaccttggcctcccaaagtgctggggttacagacatgagccactgcgcccggcctgttccccatttgttactctttatttgactgtctgttcttccacccatgaacatgttgtgggaccagcacggcctctgcgctgggcttggccccggggcctctgtggtgaaccagcaccagagcaaggccagcgggctgcggcaggacaaatgggtgaggtgctgctgctgtcagcgtagcaggccgggggtgagatgggaactaggcaggcagccctctctgaggaggggtggaggggagaaaggacaccctgacaaccaggtaaagaccatctggcccaggtgaggaagcagtcctgaggtggggcgaggggcccaggacgaggatggagagatactgcaggctctgcaggctgagaggagcgtgcaggcaagctctgggtcaagggggcctgcagagcaatgggcagagtgggtggccacagaccctcaggaggcagcattggcaggagaagggggaggaagaggacagtcaggaggcctcagagtctgcaggctgagcaccagcaggttgaggctgatggggccgtgtctcagtctaactgataagctgcaacccttaagtaacatcttaagaggataggtgtgtactttatacatttatttaacgtttgtccttctgtacaaagctttcagtagcggctttgtgagaattttggcgtctcacatactgtgccttgaggcttgctgcatggcgtgctgcaggtcctccctccaggccttctggaaagtctggttctcctcaggttactcctgggacatggcagctgtgcccatgaccctcgggatgagtttgttctctaactgattcaccggttagctctggggagattctaggtgtaaattttttcctcttagtttgaaaaatccattatgggccaggcacagtggctcatacctgtaatcccagcactttgggagactgaggtgagaggatcagttgatcccaggagggtgagaccagcctgggcaacatagtgagaccttggctgtgcaaaaaaataaagtagttgagcattgtggcgtatgcctgtagtcccagctacttgggaggttgaggtgggagcatcccaggaggtggaggctgcagtgagctgtgtttgtgccactgcactccatgcactccagcctggtgacagaccctgtctcaaaaacaaacaaaacaaaaaaaacttgccattaattccaaacagaattttgtgtgtaatagagaatgcgatctttatgacactgatgctttggtacttgctgggccggctgggtggtttttatgcatgtgatgggtacgcctgagaggatgcttcttttctaatcattggtcccctgagttcatggaggtgcgagctggagactcacgttagcttggtctcagtcgcagggaggagaaaagccgctcatgaagctggtagctgtgtcgtttttgttttgtatagctgtgtttcgtcttcactcttaagtcaagaattactggatgcaggcttctaggttgatggtgagggagcccggggacccccagaactggttgtcatcggagaggcctcagtgtttggggctgagatgggtgcatggaggccaagcacaagaccccaggaggcagttaccacttccatgaaaaacaagaagtggaataagacagcctgtacttcttggtccagtaacaagccatattttacatagccataatagttaaattgaatattgatgtaactgaagatggcgatgtaaccattttggaagattggaggagggaaaatggggcagggtgcagtgtggcagggcatctcatggggactgtttggcaaaacagagggaagtagatgcgagcttagaggggagtgtgggcggcctgtcagtagccacggcctctcagcactggctcctttttcttttgagatggagtctcgctctgtcggccaggctagagtgcagtggtgtgatctcggctcactgcaacttgcgtctcccaggttcaagcgattctcctgcctcagcctcccgagtagctgagaccacaggctcgcgctgccacacctggccaattttttgtgttagagatggggttttgccatgttggccaggctggtcgtgaactcctgacctcaggtgatccacccacctcggcctcccaaagtgctgggattacagacgtgagccaccgcgcccggccagcagtggttcattttctagtgacaggcacgtgtatgaaatcacagggaacaggactgtaactccacgcattttgaataaaaccaggaattctttgttgtgactgctggtcttgttataaatgttacaacccatttcctcggtgccacaaagactcagagcactcagggccctggccagtcactggctgtgctggtctcggcttgtcatagggtaaacttgctctgcacaatgtggctggcagagcgtgttcctgggcctgtgactgagggcagcctgcaggagatttgggctggagatgtgttccctcgggagtcagggacacagcctgtcatggagagttaagacgggtcttttgtaggtttggacaggtgaagtgctcagatccctctgcagggtcaaggctgggaacagcagtggccccgggtaccatgacatgggcaggagggagccacctgggtccacgattctgtcgtcagggtaggggttggtttgttcctgtggaccatggctaacgtgaaatggggcaagctcagctctaggggttcctgggaggccttggcttggaaggtgcccactctcagctcaggagtcagggtgtgggagatgcccaccaagcaaaatgaagcctctagcctggcctgctgccctcggaggagcccgatgctctgtctgggaagcctgggggctgccagctgtggactgtggctgcctgtggttgccggtgtcttggcttagtgactgaaggggtgagagagtgatcgtccaaggacagcccatctccagatgtttcttagtggttgcccagccacctgacacgccaagctggggccttctcccagacaccgtccccttctctctttgctgtcacctgggccaatcccacagcagctggggcaccccgttctccttcccagcagctgacagatgggcctgggagggctcctgcgcctgtctgcttgagagggcggtgagctagtcatcgtgagccggccagggctctcctatctcactgcattagagcttgagccaggctggtggaggtggctgcagccgagggagagcacggctggcacctgtgaggaccatggatggggacacatggggcaacgggcccgtgagtgctgtcgaaccagcctgttccaggctctgggacgtagcacgaaacggcagtgcagaacccctgcccttgggagctggctttctagtgggagacagaccacaaagtaaggcaggagctagggaggcagaggagtggggaggcctccctgagaacgtctgggatgggaaggcagcatcccagcagggctgcacctggcatgtttggaggccacagggaggcagggtcagaaggagcaggtgagaggcaggcctcacaattctgtctccagctccaggctcctgaagaggatggtggggcatccctgagagctggtgtgaggggtgggacactgagctgactgcagagctgactgcagagtggagtgggcgtcagggaggaggtgcagtagcctcagggaggaggtgctgggacgtcagggaggaggtgcaggggcctcagggaggaggtgctgggacgtcagggaggaggtgcaggggcgtcagggaggaggtgcgggggcgtcagggaggaggtgcaggggcctcagggaggaggtgctgggacgtcagggaggaggtgctggggcctcagggaggaggtgctggggcgtcagggaggaggtgctggggcctcagggaggaggtgctggggcctcagggaggaggtgcaggggcgtcagggaggaggtgcaggggcgtcagggaggaggtgctggggcctcagggaggaggtgcaggggcctcagggaggaggtgcaggggcgtcagggaggaggtgctggggcctcagggaggaggtgctgggacgtcagggaggaggtgcaggggcctcagggaggaggtgctggggcctcagggaggaggtgctgggacgtcagggaggaggtgcaggggcctcagggaggaggtgcaggggcgtcagggaggaggtgcaggggcgtcagggaggaggtgctggggcgtcagggaggaggtgctggggcctcagggaggaggtgcaggggcgttggaggaggtgcagggaagtcagggaggaggtgcaggggcgttggaggaggtgcagggaagtgagggaggaggtgcaggggcgtcagggaggaggtgctggggcctcagggaggaggtgcaggggcctcagggaggaggtgcaggggcctcagggaggaggtgcaggggcgtcagggaggaggtgcagggaagtcagggaggaggtgctggggcgtcagggaggaggtgctggggcgtcagggaggaggtgcagggaagtcagggaggaggtgcaggggcgtcagggaggaggaggtcctggggcgtcagggaggcggtgctgccatggcattggacacatggcctctggggctgcggggtctgctttacttttgagtaatttgatgtcatgatttatgtttcgttcggaaggagagtgaaactagaataaaacgaagtcgaagatgattttggaattatttcatagcatttagaagaaaggaaaatgtgatcatccaaaccgcacttcagccaaagttcacttcaggtgttagctccatcgtggctgcagcagcctgtgttgtctgtcagccctgtctgcgtcgaggagtgaccagcaggatgtgctggcctagtttgctgggaagcacaaggaggctttcctgtcacagccacaggccttgtttcaggaatagaatgagatagagagggattgttccaaataggccattgctgtgtctcacacaccctcacgctttggaagaataagggaaacgcacgtgaaaaattcctaattaattgaaaattgttttagtttttataaggaaaactaatatgagaatggtatttaggtcctaccaagaatataaaaatgccatctgtgttcatatcccctgctccgccctctggggcaagaccctcagattgtttgcccactgtcagaacctgagctgtcatgcgctgtgtccaaaatgcttcgctgtatattgaaagtttttagttctgtgtttcagtgtttataagcgcaggcaagactgttagcattttaaaatgtaatttaatttttaatttattattattattattattattttgagacagactctcgctgtagcccaggctggagtgcagtggcgcgatcttggttcactgcaacctctgcctcccgggtcccggttcaagctattctcctgcctcagcctccctcccaagtagctgggattacaggcacataccaccatgcccagctaatttttgtatttttagtacagacgggttttcaccatgttggccactatggtctcgaactcctgaactcgtgatctgcccacctcagcctcccaaagtgctgggattgtaggcgtgagccaccatgcccggcctattttttattattttaaatgtattatttatgtatttatgagacagggactcactttgtcacccaggttggagtatagtggcatgatctcagctcactgcagcctccacctcccaggctcaagtgattcttgtgcctcagcctcccgagtagatgggactacaggcatgcccccaccacacctggctaattgtttttgtggagatggggtttcactgtgttggctgggatggtctagaactcctgaccttaagtgatccgcccgcctcggcctcccaaagtgctaggattacaggcgtgagccaccacacccggccttatctttattttttgtagacataggatctttgctatattgcccaggccagtcttgaactcctggacttaagcaatcctctagtgtcagtcttccaaagtgctgggattacaggtgtgagccaccatgcctggtctccacttttcttttttcttcgagacagggtcttgctctgtcactcaggctggaatgtagtggtgcagtcttggccaactgcatcctctgcctccctggctcaagccttcagagtagctaagactacaggtgtgtcccacaatgtccagctgatttttttcttttcttttctttctttcttttttttttgagatggagtcttgctctgtcgcccaggctggagtgcagagtggtgtgatttcggctccctgaaacatccgcctcccaggttcaagtgattctcctgcctcagcctcccaattagctgaaattacaggtgttcgccactatgcccagctaatttttactatttttagtagagatggggtttcaccatgttggtcaggctggtcttgaactcctgacctcaaatgatcctcctgcctcagcctgccaaagtgctgggattacgagtgtgagccactgcacccgacctaatttttgtatttttgtggagatggggtttcaccatgttgcccaggctggtctcaatcacctgggctgaagcaatccacctgcctcagcctcccaaagtgctgggattacaggcataggccaccgtgcctggccccaaccttcacttttaaaataagtgattgacattagaatagattgtgttaaaggtattaagtaatgctattttataagtagctggtctattttaggcaagtagttgaattaatagtgagacagtgtgaagacacctaagtgtcttctgtcactcacaggccctggaaggtgctttgacctgtgaatatcactgagacgctggaagccagtgccttttcctacaggaggagaggcaggtgctgcgggattggttgtgtttgcaaagtgatgactgtagctgacgtaagaattatagcctgtctctcatgagaagatagcttttcctttaaagtttttctcatagaacattgattatagaagataagcaaaaaaagaaaataaaatgaaaactgcgcgtgaacccagcacccaggaaaagatgttgtttttgtattatttcatcatacctacaccttctcatgtaaatgtttttaaaggtttaaatctgattggtacctaacactttttaaaggccatggacagttttatggagctcaatgtcttgctctttttttttttgcagtgctgtctgcttcttttaagaaataaaaagtttatctcctacctctgcatctcctcctcagaattctctccagaagccttgttcctgtgggcaacgcatctctgacccgttggcaaggctgttttctctccctggatttctcatgctcactcccttgcttgtcttgaccccccccagggcccccaactcccacacatctgtccctgggggcctccttcccagggagtcccgaggccgccaggggtcccgtcactgggtggctatgggtggcctgttgagcacgaggtcttctccctgcagatcctgatggccagtgctacggtggtgtcgcttctgcccaagatgaggagcccctggcctgcccggacgagttcgatgacttcgtcacctatgaggcaagtggttttcacccaggagcttgggggaagtctggcatccacctcttcctttatgccctacagctcgtgcctcctgcctccgggctgtcttccgtagaagctggcgtgaaggaagggcctcccgccctgtgtgcaccgtggggctctgtggctgtgacgggaggcccacagttgtctgtcccacacgccctgtcagcctgggcaggaatcctcccccagggcctgtcgccagcagaagtggggtgggcagtgatgtcatgaccacccgctgccaggctggcaggcacaggcggagcagagggcttgggaggattccttttgtcaacttgcaaatgattttctgtgtttggggatgcctgactaatgcctgcccctgcttggctgtcctccaccctgctcccagatgcagccagggttgtcatggtgacgtggcgtctcctgtgtctcctgtcactgtgggtcccttgttctcaacatagctggggagagggtcttcgagcacagccgtggtcgacagagcgtaaccatgtccgccggtctggagggttagattccaggagagccacgtggctgcagcagaaaatgcatgaagttgaacttgagcccttgggggccgccgggaaggtggaggtggcagccgccagtcctggtcagcctgctgccgagcaagggtaccagaagtggggctgagctgctggccggtagggcctgggcttctcatgtcagtcctctgagccctgactcctcgaaagctgaggctggcacagggtagtttttgagttgcttttggacgccactgtaccgtgggagccatggtattatactcagttccctgttccgagaagctgccccagggattagtcaccctcacccttgggtgggcagcttaacttctgcccacacagaccctgggggtggttctgccttacggcggtgtcccagttatcagctgggctgcagcttctggggccagggcgcccaccgtgggtcccatgtttggccttggtgtgctctttctgcacgtgaggcagcagtgaggtgctggctaagagggcgtgtggtgggagttggaccctctcgcatggctgcagtgtgcagaacgtgctgggagaccccaggactacagacggtggctcctgtgccctgagaaggacccggcttcttcacgaggagatgcccaaggctctgcagggtaacccagagcccttggtctgcaacgtccggggaactgtgtgttcctgggcgttcatgtgcctgtgcactctttctcacgtgtatccgtctttttgttcccctctcatgtttgttagggcattgttgattgtttatatcctatgtatggtgcagtggctgaagagtggcctctcaaaagatatgtccacccagcagctgtggatgtggccttatttggaaaaagggtctttgcggatgtagttcattaaggatctcaaggtgatatcatgctggtttgggccctaaatccagtgacaggtgtccctggaagacgggagagacacacagggggaagaccataggaagacagggcagagactgaccagagccagggaactcctggggctcccagaagccagcagaggcaaagatgcatcctctccgagagccttaggcaggagccagccctgctcacaccttggctttggacttcgggcctccagaactgagaggataaactggtgtttcttcacgccccgtggtctgtgctagttcgttatggcagccctgggcagggaaaccttgagtgacgttactcgaggcaccaaaggcaccagtgcattttatccttaaaggcccacgtggtctgaagggtgtggccgagcctcacgcttgtcacttcagaagggtgggaacctgacatgtcagagctaatccttctcatatttttagatcctgatttcttttttagaatggaagaaagttttttgacttaaaaaaatgaatatgcttcatgttttagagcaattttaggtttacagaaaatggaacatagtgtagagcattccgggatcacgttacatgattatttgttttgttttgtttgagacggtctgctctattactcaggctggagtgtggtggtacagtctcgatcttggctcaccacaaccttcgcctcctgcgctcaagtgttcttctttctcagcctttccagtggctgggaccacactcagtaaccaccacgcccagctgattttttgtattttttttttgtagagatggggtttcaccgtgttgcctaggctgctctcaaactcctgagttcaagcgatccacccgtcttggcctcctaaagtgctggtattacaggcgtgagccaccgcacccagcctgatatgttagtattagccaaagtccgtagttgagggttcactcttggtggtgtgtattccgtgttttgacaggtccacgattatagtgtcacagagtcgattcagtgccggctcatccctcacaccagcccccacaaccaccgatcctccgtgtctccacagctctgcctcttccagaacgccacggagctagaaccatctggcatgcagccttttcagatgcgcctctttcccttagtgaatacgcagttacctctcctccatgtcttgctttgctttttaagggtgggatgtaattttccacaaagtggagttcgatactgtgaaacttatggaaaatttgctcttttaaaaaacagcttgcacatcatgtcatcttaaaaaaaaaaagtctaataaagatatgagtagggagtatgtgttccatccagataccctattcggggaccctccactggtagtcttcaggtaaataaacctttgattgattggttgattggttgattgattgatattctgaatggttccagtcagacccatttctctttactgggagcatcgcagtgctcacaccggggtggtcgggtaaaatgtgcagttagtcatggccgagctagtgggtctgctggctcgcactgttttcccagggatcctttcagcaggcagcttataacgggaaagttgctgctatggtgtctgagtaagtggggagagtagaaggggatggactgtggcgccgctgagttcctgggcatggtgatgtctgaggatctgagcaggtggagcccagggggtggtggggctgtttgtcgggtttctggaagagcgaagggaaagtcagggagtgtaaggcgcatctcacagaatcgtcgggccgcgctctctcccgtcctccctccttctcccactactggcgatgtctggagcaaagagctgccttagtgaaatgatagtgaaatgtgtcttttgtgcaaaccattatcagcttaggaagccaaaaacaaaagccactctgttttcagccctgactgactaaccgttttttaaaccagcaaggacacttcctgaactttgccttcccctccctgggcaacaccagcaggaggtttattagagcgtgtctgggagcaggttaaactttctcctaggtggtgatgtgcctccaggtgagcgcacaggctttgcagaaaccccagcatgacaagcaagtaggaaggtgacattgttgtttgagaaaagccagtgacccggttgggacggagacacgatggggagccggtctccaacagcatgcccttcctgaaggtgtgtacagagccaggcccagcctgtgaggccacccgggccagcatctgagggtaagaggaggcagtagtgtgcactgtgcccagtattcctatttctgtggtggagagaggctcagggaagaaggaactgtgacggggacagtgttggccccacttgagttactgatggccctgaacgggctttttctctgtccgctggtgatttaggggacttgttaattagtgaatgtaacgtttcaacatagcgacgttttccaagatgcactttgattttcaagcgagttcatcttaacattggtaatttgtaaaaatgttaaaaagttggtagcatagacttgatggcttctgggcaaggccaggtcctggctggctggcaaataaaataaactgccggggccggtgtgagctgttactgcattttatccaggaggccgggagtgagcaggcaccgtgctctgaggtacatttttgtctctggaaaggcaggtgatggctgccctggaaaactccatgtagggaggccttgaactgcagaaaccaacccgcagggctgaattgggaagtgagcaggtggggtggctcctgtgagcctcatgagctgtctggaacccccagggcatccagccggccaggggctctgagtatcgatggcgatggcatggaagtggacgtccacaaccccagagcaaataaaggggtgggtgcagtcaccgaagccgctgaggagtggaactgttcatctctgtgggatctacagtgcacggagccactctgcaatggcagggaggcccggcttactttattttttattttttaaattgttttttgagatggagtctcactctgtcacccaggctggagtgcagtggtgcgatcttggctcactgcaacctccacctcccagattcaagtgattccatgcctcagcctcctgagtagctgggattacaggcgcccgccaccacacccagctaatttttgtatttttaggagaaacagggtttcaccatattggccaggctggtctcgaactcctggcctcaagtgattcacccaccttggcctcccaaagtgctgggattacagtgagccactgcgtctggccctcaggcttactttagaaatgagaaggtgaaggtgggtccagagcggagcgtgtgagttccaggcttggcagggtgccctggcatccagcttacagggagtctgagtttgtgtagaatctgcctcattgttcctgtgtccgtggagaattctttccatcccaaaccatcctgtctaagctctgaggaggcacaggtggctctaaggcggcactggcttttgcctgcaggggcaccatcctcagctacaggtctaacaggaacttggtgaaataagcaggccccactgcccggacctccctcccttcgtaggacagatgctctgctcagggctccatgagctgtttgagagaaggtgtgggtttgttcttagaaacatcatgctttctgttggggacttagggtccacactggccagggaagggcatcgggcatctgtcagaagtaccagtccattgactttttaaaagctggtccaaggtcaggtgcggtggctcatgtctgtaatcccagcactttgggaggctgaggcaggagaattgcttgaacccgggaggtggagtttgcagtgagccgagattgcgccactgcactccagcctgggcgacagagcaagactctgtctcaaaaaaaaaaaaaaaagaaagaaaaaattttaggctgggcatggtggctcaggcctgtaatcccagcactttgggaggccaaggtgggcagatcacaaggtcaggagttcgagaccagcctgaccaacacggtgaaaccctgtctctactaaaaatacaaaaattagttgggtgtggtggcgtgtgcctgtaatctcagctactcaggaggctgaggcagaatcacttgaacctgggaggtagaggctgcagtgagctgaggtcacaccattgcactccagcctgggtgacagagcaagactccgtctcaaaaaaaaaaaaaaaaaaattagtcaggcattgtggcaggcgcctgtaatccctgctacttgggaggctgaggcaggagaatcgcttggacctgggaggcagaggttgcagtgagccaagatggcgccactgcactccagcctcggcgacaagagcgagactctatcaaaaaaaagaaaaaagaaattttaggctacgtactgaaccactgaacctgatgttgtaataaccacactttttagagtcagcagcgggtcttcctggtgcccctggggtgagtctttgtcactgatgactctggggcagtgtggcccctgtgagtgtgcaatcctgttggggtagctggcaactgccctcaaaccgtctcggacctgtgcgctgggcttcgcatcctgccccgtcatgccttccccacaggcccagcctctgacagacatcctgggcctgcctgctttcctggccactcccgccttttcctgcctggcgtcccgcaggcccagcacaggccagccctgtcctgagtgggccctgggccctgccgtcctgcaggagtgggagctgcccagggacggtgagtagcacgagagctggggtttcttacagtgctctcctggttctggatgttacagtggatgctcttgaggaatgacttagtttttatgaattacttccttagattgtaggggagattataattggacacccagagtaggtacacttcacagcactccctgttcccttgtggctttagaagcagctggcagggatttcccacccaccagtgacactcgcaccctgcagtccttgtttctgtgctttgaaaagcaccttcctgggttgtctttcttggttccatgaggtggccaccttgtgagacgagaatttataacccccgtttgcggcagggctccaggtggttgagtcacacgtctgaggtcacacggcttttaataaaggggccaaagatggaactgcggcctcccgcaagtgcgccaggctcctggcagctcggcctggcccttcacgtctcttccagtgaggctcaggtgggtgcagcctggggtgggaccctctggtagccctcgcaggtcttagcacactgtctacttcttttttttttttttttgagatggagtcttgctctgttgccaggctggagtgcagtggcatgatcttggctcactgcagcctctgcctcctgggttcaagcgattctcctgtctcagccccccgagtagctgggactgcaggcacgtgccaccacgcctggctaatttttgtattttcagtagagatggggtttcaccatattggctaggctggtctcgaactcctgaccttgtgatccacccgcctcggccttccaaagtgctgggattacaggcattaaccacggcgcccagccactttgtctgcttcttacgatactagaactagagtgcaaagggcatctttttctgctgggactgcagcttttctgagatcttgtttatttgcaaattgttaacctcagagtcttctgagcatgaaatgttggccacttttcctaaccagcaatttcattttcattaaggttgaaattataaattgaaaatgttggctgggcacggtggctcacgcctataatcccagcactttgggaggctgaggtgggcagatctcttgaggccaggagttcaagaccagcctgggcaacatagcaaaacctcgtctctacaaaaaatacaaaaattagctgggcacagtggtgcatgcctgtaatcccagctactttggtggctgagacacaagaatcacttgaatccggaggcagaggttgcagtgagctgagatggtgccactgcactccagcctgggtgacagagtgagaccctgtctcaaaaaacaagaacaattagaaaaagaaaaaaaaagttctgtttaatagttctttagttttgtgttcatttgtatgatccacaaatatttactatctacctatacctggtcctatgctagatgctagatacttaagagtaaaaacaagttgggtgtggtggcttatgcctataatcccagcacttcgggaggctaaggcaggcagatcacttgagctcaggagtttgggactagcctgagcaacatggcaaaaccccatctctacaaaaaaatacaaaatcagcgaggtgtggtggctcacacctatagtcccagctactcaggaggctgaggtaggaggattgcttgagcccaggagtttgaagctgcagtgagccaagaccgcacgactgcactccaacctgggtgtcacagtgagactctatctcaaaaaaaacacagcagtaaaaacagtaaaaacaattggttgcgatggctcacacctgtaatctgagcagtgtggaggatcacttgaggtgcggagtggatgaccagcctgggcaacagagtgagaccctgattcaaaataaataaatcaacaaacaaacaaacaactgagccaggtgtggtggcacctgtagttcccagctacagctagatcctgtctctattttattaaaataaaaaagaaattactctgccaggctcagtagctcacacccatagttctagcactttgagaggccaaggctggtggatcacttgagcacaggagttcaagacagcctggaaaacaaggcaaaactccatttctacaaaatttcaaaaaattaggcatggtggcttttacctgtggtctcagctactcaggaggctgaggtgggaggatcacttgagcccaggagatcaaggctgcagtgagctgagattacaccattgcactccagcctgggtctcaaagagagacactgtctcaaacaacaacaacaaaaattactcagagtaccttgttttctgctctcagacatgtacctatttttcatttaaaaaaaagttgaattcagccaggcacggtggctcacgcctgtaatcccagcactttgggaggccgaggcaggtggatcacctgaggttaggagttcgagactggcctggccaacgtggtgaaaccccatctctactaaaaacccaaaaattagtggcgtggtggcacgcatctataatcccagctactcaggagcctgaggcaggagaatcttttgaacccgggaggtgtaggttgcagtgactggagattgcaccactgcactccagcctgggcaggaagagtaaaactccttctccaaaaaaaaaaaaaaaaaaaagttgaattgtgttttattcattttattttcatttttgaaatagaggctcactctgtcgcccaagctggagcttaatggcatgatatcagctcactgcaaaatctgcgtcccaggttcaagccattctcctgcttcagcctcctgagtagttgggattacaggcatgtgccaccacacttggctaattatatttatttatttatttatttttgagacggagtcttgctctgtcgcccaggctggagtgcagtggcgtgatctcaattcactgcaacctccacctcccgggttcaagcgattcttctgcctcagtctcccgagtagctgggactacaggtgcccgccaccacacctggctaatttttgtatttttagtagggacagggtttcaccattttggccagactggtctcgaactcctgaccttgtgatctgcctgccttggcttcccaaagtgctgggattacaggcgtgagccactgcgcccggcctgtatttatttattttaattttttttttttcagacagagttttgctcttgttgcccaggctcgagtgcaatggagtgatctcagctcaccacaacatccacctccctggttcaagcaatttgcctgcctcagcctcctgagtagctgggatacaggagttcgccaccacacccggctaattttgtattttcagtagagacggggtttttccatattggtcaggctggtctcgaactcccaacctcaggtgatccttctgcctcggcctcccaaagtgctgggattacagtcgtgagccattgcggccagctgttatatttatttttaattaattaatttttttgagatgggtctttatcactcaggttggagcacagtggtgtgatcacatctcactgcagcctcgaccttttgggctcaaatggtcctcctggctggcgctgtggctcactcttgtaatcccagcactttggaaggctgaggtgggtggatcacctgaggtaaggagtttgagaccagcctggccaacatggtgaaaccccgtctctactagaaatacaaaacttagctaggcatgatggtacatgcttgtcttcccagctactcaggaggctgaggcaggagaatcacttgaacacaggccacgtaggttgcagtgagctgagatcatgccactgcgttccagtctgggcgataagagtgagaccctgtctcaaaaaaaaacccccaaaaaacaaaaagcaagctcctccgtcagtctcttgagtagctgggacctacaggcaggtgccaccacacctgggcaagctcctccgtcagtctcttgagtagctgggacctacaggcaggtgccaccacacctgggcaagctcctccgtcagtctcttgagtagctgggacctacaggcaggtgccaccacacctgggcaagctcctccgtcagtctcttgagtagctgggacctacaggcaggtgccaccacacctgggcaagctcctccgtcagtctcttgagtagctgggacctacaggcaggtgccaccacacctgggcaagctcctccgtcagtctcttgagtagctgggacctgcaggccggtgccaccgcacctgggcaagctcctccgtcagtctcttgagtagctgggacctgcaggcaggtgccaccgcacctgggcaagctcctccgtcagtctcttgagtagctgggacctgcaggcaggtgccaccgcacctgggcaagctcctccgtcagtctcttgagtagctgggacctgcaggcaggtgccaccgcacctgggcaagctcctccatcagtctcttgagtagctgggacctgcaggcaggtgccaccgcacctgggcaagctcctccgtcagtctcttgagtagctgggacctacaggcaggtgccaccacatctaggtaagttttgtatttttggtagagacaaatttcactttgttggccaggctggtcttgagctcctgggttcaagcgatccacccaccgaggcctccgaaagtactgggattacaggcgtgagtcaccgcgcccagcctgaattgtgttttataagtaatgtctctgcttagagacagttgggacttcaggcgtcagacccctccctccacactgccctctccagggccttgcagcagtgaggtgtggggcgttcgcagttcccctcccagcttgtgcccgctgactgctggcgcactctctcctaggccaacgaggtgacggacagcgcgtacatgggctccgagagcacctacagtgagtgtgagaccttcacggacgaggacaccagcaccctggtgcaccctgagctgcaacctgaaggggacgcagacagtgccggcggctcggccgtgccctctgagtgcctggacgccatggaggagcccgaccatggtgccctgctgctgctcccaggcaggtctgtaccccgccacgggcctcctggagaggccttgggatgtggcaccctgtggaggtgtctgatgggcagactggggtcttggaggagtgcgtgctggttagcatccattatgtgggggtggggcttggccctgcagtagctcctgaccttcctgggatgagcccacaccgtcctgcccgccttgcccgagcagtctccctgttccagctgactttcctgtcaggacgactgtggtttcaaatgttgctcaacatctttagctgtagagatagaaattatagaagtgaatgtctcggcagggttttggaacccgttcacctttgcagcacccctgaggaggccatgttctctccccacctgtcccccaccctcaggatttctgtagcccccgtatttcgagctagttggggccggagtagagggacgggcagagtctgggagaaggtcagatgaaggaggtgtccagtggctcacgtggacctgctttccgtgttgcccctgctactggaaagtccgctcagcacgctgaagtgtaattgtgaagcaaaaattaaattctcagccttcagccaactgatggaccccctctctcagcctcaggcgttgctcagtcaacctgaaaatgtagttcaggccatggttagggaggtcaggcaggcctcattgggcccctccctttggaactgaggcccagctgaccagcattcacattaaacagactctgacaaaggcggactttttatagcagcgacagcacaccacattccagcctgactctagtgtagcatcacatgacaggtggcaggccctgaaagaaatccgagtattttaccccaaaatagatttctttgacatttttcagaatggctctacaggactgtgtcttgtggggaaagtctgcaccctgtagagaatctcctcccttcccaggtcttttccctggtgcaggagggaattaactcggagtctggcaccttgtgaggtctgctgcctgctgcctggaggcctcatctgcttgataaagccttggtctccacagccccttatcttaagccgaggcattcctttctattgattccaagtctttagataataactctttcaaacaaacaactgccagtcagaagatcttcgcatctgctttgacctggaagcccgcccgtcccccgcttagagccgtcccatgtttcctgactgaagcagcatcttgcatgtagggttgatgtcttctgtctccccaagatgcataaacccggcccttgggcacatgctctcagggcttcctggggcggcatcacgggctgttagtcactcttatctggctcagaataaacctcttcaaatattttacagagcttaagtctttttgccaacataatatacccacaagtaagtgcccatgttgtaagtgcacagccagcaggtttttcaaactgaccattcccacggcccttttctcaggcaagaacaaaacactcccgcacccagggtcctcccaggcccctgacagcagccagctctccaccggccctgcatcttccttaagttcccccacacagggaggtccttcctgtgcctggcttcttccacttgctgttgcgcttgtggatttagccatttttttttttttgagacggagtctcgctctgtcgcccaggctggagtgcagtggtgcgatctcagctcactgcagcctccgcctcccaggttccagcgattctcctgcctcagcctcccgggtagctgggattacaggcgcccgccaccacgcccggctaatatttgtattttttagtagagacggggtttcaccatgttggtcaggctggtctccaacccctggcctcaggcgatccgcccgcctcggcctcccgaagtgctgggatgagaggtgtgagccaccgcgtctggccgtattcagccctatttttgtgcattgctgtaaactgttgacttttatgattctattgcgagagcgtgctgcgactctagagttgactctcctgtcggcggcagcgggtagttcactgtcgttggctttgagggtgaaactgctgtagggattccatgtctttgggagcatggtacggccctaagcaggatggtcatcgggagcacgtcccttcagccttgcaagttcctgcaggggctgcagggtcaccagcctccggcatctgtggctcctgggctccctgacctcagcagcatgtggccatgtctgctctcctgctcaccttgtggggggcatgcagagaccctgccacatgctttttacttgcgcttcccgggtgactaataaggcatgcaccttttgtcagggtgggagctcctctgcctgctcactgcttgcgggaggggtctgcagactttttctctagaagagttgcaggccacgcagcccccgtggcaactgctcagcccggctgttgtgctgcagaagcagccaaaggcacgtgggtcagtgagcgtggctgtgtcccagtgaaacaattttcagaaacaggctgcgcaggattggcaggacttggcctgcccctggtctgttgggtcctctgtctttttctcactgattataggagtcctttcgatatgagtcccttatggggtgtgggtatcacagatcctttttgctgctctgtgggtctccttttcaccttttgaggaacagatttttgtttctgtttttttgtcaagatggagtctagctctgtcgcccaggctggagtgcagtggcgccatcttggctgactgcaacctctgcctcccaggctcaagtgattctcctgcctcagcctcccaggtagctgggattacaggcacctgccatggcgcccagctaatttttgtagttttagtagagacagtgtttcaccatcttgcccaggctggtctcgaactcctgaccttgtgatccacccacgttggcctcccaaagtgctgggattacaggcatgagccacagcccctggccagaacagatgtttttaattttgctatagttgagcttatccatttttcttttatgtttattagcacttttgtgtcccacttgataaatctttgcttactacacagtcactatgatgtttacttacgctttcttttaaaagtgttattgttttaccttcatattcagatctgtgatcgctacataatttttttattttgttttgctttgttttgagacagtcttgctgtgtcacccaggctgcagtgcagtggcacaatcttgggtcactgcagtctctgcctcccagattcaagtgattctcttgccttagcctcctgattagctgggactactggcgcccgccaccatgcctggctaatttttttgtatttttggtagagatagggtttcgccatattggccaggttgacctcaaactgccagcctcaagtgatctgccctccttggcctcccaaaatgctgggattacaggcgagtattttctcactagtttttaagcagtataactcttggtggggcatgcctgtaattccagccctttggggggccgaggcaggtggatcatgaggtcaggagtttgagaccagcctggccaacttggtaaaaccccgtctctactaaaaatacaaaaactagctgggcctggtggcacgcacctgtaatcccagctactcgggaggctgaggcaggagaatcgcttgaacccagagaggcagagtttgcagtgagccgagatggcaccactgcatttcagcctgggcgacagagcgagactctatctcaaaaatgaaaacaaaagtataactcttttgggggacacacattttgaacagctcatttgtggctggatctaactgctagctagcgcggctcatcttctgtggaccgtggaaagcacgttgggcgtctgggtgcagaccgtccggttcatacagtctctgccgtgtggcctgggcctcttggtcctcagtgtgacgttgcatgtgggccttctctgttcccgtcaagcatcaggaagaagtgtcctgaggagaggaggagatggggtggtgaggggtgctgagcccctcgtcattgcttctgagggagtagcaggtttcaccatggtggcccggggaggcggggaagggcctgctggccgatggaccagtgtgtgttttcctctcgctgattctcctcccctcagagggcagttttctgtcacagtatctgagcctgttggtaaaacaagcacccaatcataagaaacagaaaataaggtcttcctgtaacgtagcctaattttagatggcggctgtggaagggagccacacctccctgtcactgtgtaggaaggaaggggctgatgcagacaggcagcgccaagttgaagaccctattgggaggccatgaagtggcacaggcctcctggttttggtttctttttttttttttttttgagacggaatctggctctgtcgcccaggctggagtgcagtggcgcgatctcggctcactgccatctccgcctcccaggttcacaccattctcctgtctcagcctcccgagtagctgggactacaggcacccgccaccacccccaggtaattttttgtatttttagtagagacagggtttcaccgtgttagccaggatggtctcgatctcctgatctgcccgcctcggcctcccaaagtgctgggattacaggtgtgagccaccgcccccggccctggtttaagcctgcgtgtttgaggccatgggattcatcctgagctgtcccagcagtggtgcgtggtgggcatttctgcgggtgtgaaattggaactcctcacggctgagcacagtgggtccgggcggagcagagcgcgcggtcctcctgactctgcccccttctcctgggcacgaggagtcgcctcactctgccaggcccctttctttcctggagtggagcagcgccgggcctgcacagaaggttctcccgaggactcctgcgggagggtgggagtggggaccgctagggcacaggagccgctgaaggcacagctgtttcacatggcccccggccgctgtgttttccagaacttggctgtggaggagtcactcccttcagaaggagggtgggtatttggaagccccttcctttccctgtcgcagctgctgttacgttttagcttaaagtagagtttgaacggcgccccccagtggttgtgtgaggacagcagctccctagggaagaggcagaggtgcttgaacccagatgctgctttgtgtcgacctgtgctgtcctgtgtggggctgcggaacttgtgacgtgggagggcacacgagtgaggagtgtgaagaggctggaggttttgaaatgactgcgtgttgggctaagtaaaattttttgttaaaatatattcgggccaggcgtggtggctcacgcctgtaatcccaacactttgggaggccgaggtgggtggatcacgaggtcaggagatcgagaccatcctggctaacacggtgaaaccccgtctctactaaaaatacaaaaaattagccgggcgtggtggcgggcgcctgtagtcccagctactcgggaggtggaggcaggagaatgacgtgaacccgggaggcggagctggcagtgagccgatattgcacgactgcactccagcctgggcgatagagccagactctgtctcaaaaaaaaaggtaaagaaacagatttatttatttattttttttttttgagacagggccttgctctgtcacccaggctggagtgtagtggcatcatcactgctcactgcagccttggcctcccaggctcaagcgatcttcccacttcagcctcccgagtacctgggactacagtcgtgcgcatccatgcctgggtgatttaaaaatgttttttgcagttgaggcctccccctgttgcccaggctggtctcaaactcctgagctcaagccatctgctcgccttggcctcccaaagtgctgggattacatgtgtgagccaccgcatccagcccactttttttttttttttaaacgtggctcccaggactcacgtgtggcttgtagcacaccctatggaaagcaccttccacaccctcagctcgggggtgccctggccttcagtcagaagacatcatttctgttttactttgcaggcctcacccccatggccagtctgtcatcacggtgatcgggggcgaggagcactttgaggactacggtgaaggcagtgaggcggagctgtccccagagaccctatgcaacgggcagctgggctgcagtgaccccgctttcctcacgcccaggtaatgacgccttgttccagcacaccctcctccctcttcttcccgtggttagtagtgggaagtttccctttttggttcgtgcattggtgagagaacttgctttccttgacgtcatgtgattaagtaaaccatattcaaacattttaaatttatacctggatttatgaaagttgggagaagtccctcttctccagccacatccccagatcactctacatttctgaggcttcagcaaaatcctgtggcacagagctgtgtttgcacacttggcttgcgggctcctttgctgtgggccgtggatcacatggtggtctgtgcaggcttttgagggaggcctcatgatcataagtgagtcttcagattcatttccttataaatatctgacatccccaaactggaaagctgtgactctgaataaatagaagcacaacacgcagtgggcgagatgcccactcacaaatgtccagagtcactctagggagtccagagtcctcttggcttggatccgaacatgggggtctgggtacgtacttctgagggctaggggctcccacgtgggagtcagtccctctaggacgctcctgacttcagggagaccctgggctggccgatggggttgttacttcaatcccttctcccctttgctactaggttgtcgtccatctttgccagcagtcaaggccgagcctctttaagcagccacaagagtcttcccttgcctgctgcccgcccgctgttactgaggcccagggaacctgggtggagggcggtgcaggaggggctgagcagctcgtctgcccatagggtccccctccttttgtttcccatgtgccctccttgaagccgcccgtcagccctgggtgtggggaccctgcacggatatcctgtgtgctctggtcccggcgagcgtcctgggagagctgtgcatgagtgaggcatcacagacggtcctcagaggcagtgtgcttgtcttaggcactttcctctcccagcgcgtggtggtgtcaagacaagggccagaggactggggcgtttctaaacttgggtctctgtgcttggtaatcacctcttcctacgtgtttagtttgtccctgtctcctgttcagtgttttcattgttacctgtttgaagtgtaatgtctatgctacattgtatgtttcacttttcacctttctttacttgagcttccaaatggtttcccacagcatgtgggtcccagcgcccgcgatgaggctgcctttgctcctttgccttcgcgtcgcagacgcagcacccctgccagtggcccagaagcccttggaggtgaagtcacagggaggttagctagcaccaccacaaaatctaacactgagtttcgacaggtcggtctttttgggggttttttgagacaggatctcactttattgcccaggctggagtggtgcaatcatggctcactgcagcctccacctccctcagcttcctgagtagctgggactacaggtatgagctactacgccgggctaattttgtattttttgtagagacgggttcaccatgttgcccaggctggtctcaaacgcctgagctcaagcgatccacccaaagtgctggaattagaagcaggagccaccatgcccggctttaacgcacatcttaaaaaatcacaaaactattgtagatttatcattcatgcatagtttttgctagaggtggtttttggagtaatcataaatatagtacagtaagtacaagtttacccggagacatggttcgctatcacattgatgtgtttttggcaaaagagaaagcagtatggttttttaccttcttgttaaagaagggcttttgctttgcaaggaggctctcaggctgcccctgctttcttctgggcacccgacccagaggagcaggtgtgtgcagggccccctgaggctcgagctggtgcctgtcctgggctcctggaggcagctgagggatgtgggctcactgcggtctaaaggcaagagccagaacattgcacagctcattctctctccacgtgcttttgttccacaccatgtcctgtcctgttcccctcggcccctcgtgcggagtcacagatgaccacacgggtcctcatcctctcctgaacggatgcttctgtctctctagcactgaccctcttgccgcaaagctgcacagcatcctcactgatgaggcgtttgagttttactgtagccagtgccacaaacaaatcaaccgccttgaggatctttctgcccgcctgagtgatcttgaaatgaataggtaactgaccagcgcctggccttgctgtctgttcccagggtgtgggggactccggatacccacagcccccttgagggcctgccccgaggcgaccaggagcctctcaggcagcgggactctccctggggccccgcctcccaccctgcacgctgtggggccaccagggccctgcctcctcccctgcatgcgcagcccaggccagtgcttgtcttggtgggaggaagtgatcggtctttgcaagctgtgctgtctgtcctgtgtgtgaaagaggatactttctgcattttactaaaagatttctttcattgagctcatgagacagaattgggaaagttaaagatttagtctttaagaacagatatgtaaacagctttcaggattgtcagtttaaatggagttttgaatactcacagtgagcgtgtgagggagctcactgtgtctcagcaggggagctcttgtggctggccctcatgtctaactcccagttacagaagacggttttgagtgctttgcacatattgacgtgcccgttgggcatcgtgttgatttcgcttgcggtgaagcccctgggtgggcagctctccagaagggtctggtgaagaaacgggccactttggagctttccacagcagccctagcctagcagaagaggtgagtgagcatacaggctcatgctggcaatctgggacggcttcctgaagaacgggacctggcctgtggggagggtttgtaaaggtggcagaaaggtgagttatcctgacggttctagcatgtttagaggtatctgtgaaactgcttacctgtcttgagcctgccctgtccctgccccagggggcttctgccgaggcacatccttgctggcgggcgctcactgcccacggccttattgaggcttctgtcctgcctctagttccatttccagggcacttaactcttcttatgttctgtgaaatgctgtgaagcacagggcccccagccagtgcccattcaggtggagaggatgggggtggggcccggcactgatggccattctggagcatcgggggtcttggcagcactggtgagaaagcagaagtgctctttgaagagggtcttcccgggagacccgaggccgcccagagccctccccgggagacccgaggccgcccagggccctccccgggagacccgaggccgcccagggcccttcccggggagacccgaggccgcccagggccctcccgggagacccgaggccgcccagggccctcccgggagacccgaggccgtccagaatcttggattccaaagatccgctaacctctgttttaggggaaatcagtttctgcctgcgtgtgtgttcagctaggggttcaaggcccggcgacgatggctcagcctgcttggggaggggccatttgttcttcccacgcagagacttgccctcccactcaccgataagttgagtgcaagcatgtcatctccgtacatgaaagtaagcctgaagactcaggtctcgtctctcattttctgaagatttttgacatagaactgattttttcccacattgagaactagctccaagatggccatggtcgcctctgctgggctttgtgggggcagagaagggactaggatgtagctaagtacaactagcaagtcctgtggagcctcacgtccaggttctgctaccccttttcctaagactctatgaagcgggccaggcgcagtgactcacgcctgtaatctcagcattttgggaggctgaggaggcaggcagatcacttgaggccaggagtttgagaccagcctggccaacatggcgaaaccctgtctctactaaaaacataaaaattagccaggcatggtggcacatgcctgtagttccagctacttgggaggctgagatgggaggttcacttgaacccaggaggtggaggctgtggtgagccaacatcctgccactgcactccagcctgggcaacagagccaaactctgactccaaaaaaaaaaaaaaaaaaaagactctaccaagtggttaatatgctattcaattcaacacaatcaggacacacaactgccagtcagaacatcctccccataacccttagtggaggagatctgaatcttgcgttttagtttccatggacttgcctgaaagtaagcttatttggtcatgctttgtgggtggcaacaggtgacttagtccagaccacctctggaagctttgatgtcagatacgatgtccagtcgcctcagaacaggccaatagctgttgcattttccaggtaccctgcagcctctaaatacatttcattttgtaggaactaagaagtgtgccttacctggaggtatattttcttttttcttttttttgagacagagtctcgctttgtgacccaggccggagtgcagtggtgcgatctcggctcactgcaacctctgcctcccgggttcactccattctcctgcctcagcctcccgagtagctgggactacaggcgcccatcaccacacctggctaacttttgtatttttagtagacacggggtttcaccatgtctcaatctccggacctcgtgatccgcccgccttgaccccccaaagtgctgggattacaggctgagccactgcacccagcctgcctggaggtatattatctttttcttttttgagacagagtctcgatctgtcacccaggctggagtgcggtggtgcgatctcggctcactgcaacctctgcctcccgggttcactccattctcctgcctcagcctcccgagtagctgggactacaggcgcccatcaccacacctggctaacttttgtatttttagtagacacagggtttcaccatgtctcaatctccggacctcgtgatccgcccgcctcggcctcccaaagtgctgggattacaggtgtgagccaccgcacctggccacctggaggtgtattttcaattataaatcctgttgctgggctgccagtccaggccctgaaaggtcagtaggtaaactgaacgatgagtctgtcctgtcctattagttctagggagtctcaacaataataagataaaattaaatttgtattaaggctgggtgcggtggctcatgcccgtaatcccagcactttgcgaggctgaggtgggcagatcacgaggtcaggagatcgagaccatcctggctaacacggtgaaaccccatctctactaaaaatataaaaaattagccgggcgtggtggcgggcgcctgtagtcccagctactcgggaggctgaggccggagaatggcgtgaacccgggaggtggaacttgcagtgagccgagatcatgccactgcactccagcctgggtgacacagtgagactccatcttaaaaaaaaaaacctgtattaaaatatacattattagtctccagtcgagaaaggagagccacacagtaatttgaacagggacagtttaatactacaaagaatgggctgagtgtgggctgaaatcgcagtgctttgggaggctgaggtgggaggatcacatgagccggggaggtcgaggctgcagaggtgggaggatcacatgagcctgggaggtcgaggctgcagaggtgggaggatcacatgagccggggaggtcgaggctgcagaggtgggaggatcacatgagccggggaggtcgaggctgctgaggtgggaggatcacatgagccggggaggtcgaggctgctgaggtgggaggatcacatgagccggggaggtcgaggctgcagaggtgggaggatcacatgagccggggaggtcgaggctgcagcgagctgtggttgcaccactgcacttcagcctgggccacagagtcataccttgcctctaagaaaagataatgcaaacaaacaaacaaaaaatttaaaaaatcattagggaaaggaaaagaatgtcacaggctatgggagtaatgaggcactggttgggatgagtaaaaagaactctgcagagtgtagggacagcaggcacaggagcagccgccacccagggccggggcagagccccccagctacagtcactgccacccagggctgaggtctgcaccagctgcaaacggcgtggtggggacaccaccgtgctgtcagggcttgtggggaacctgcctcctggctgccaggaaagctattctgttgcaggacacttggcagaggcacccctagagaacagctacccgaatggggtcggggaagcccctggctctggctacagtgggcaggatgctccctggagtaggtactggggagactgcaggtgtcggagggccctgcagagagtggtcagaaccaggaggcaaacctcttcctgctgtgttcactcctcggctccctctgctgatgacacgcagcattgtggaggaagagcctgctaagggcccagctctgtttctacagggcaagtaaaaaggatggacttagagctgaggggctctacgttaatacctggcacagcagctgattctcctccagtagatttctttttttctttgagacagagtttcactctttgttgcccaggctggagtgcagtggcgtgatctcggctgactgcaacctctgcctcccgggttcaagcgagtctcctgtcccagcctcccgagtagctgggattacaggcatgcgccaccattcccggttatttttgaatttttagtagagacagggtttctccacgttggccaggctggtctcgaactcccgacctctggagatccacccgcctcagcctcccaaagtgctcagattgtaggcatgagccaccacgcccggcccctccagtagacttttctgcctgaccctggaaagaaaatcagaggtgtttttgagacaggtaagctgaagagagacgtggctttgtgagttccaggaccgtgatggttcccaggccccaggggtgagggtgtcttcctgcaggctgaggctaatagttcagcagctagactgtaaaatacaactttggacctcagaaatgagggagaaggtaagtttggcccatgtgccactgcagatggttaaatcagacagctgatgtataattggctatatttactgccctgaaatggcaacgggaaaggtttccaaactgatgcctaggcaggcgttctgagcatgatgcatcagtgcctgagtcgaagccagcggcaaactctcctgtcacagcggggcctgggtcacttttcacttgggggcctccgaaggccaagcgtttgggggtaatttggcttcagaagcattgggacagtgcagccagcgggtgggaccaggtgtggcgctggcctctcagtcgtggtctggggtggctgcatctggaagcctctttgggggctggagtaacgagacgtatgcggcctcaccccagcactgccgtgtccttgctgttttgctgagtgagcatttgtgcatggacttgcctggggggccctgcatgccgggagcattgctgaaaggccgcccacctcgtatctccacagcctgagtttcctgcttcctcctgctcctctctgtctgttctaacaattttcctgtttattttgttttctgcacagtccgacaaagcggctctccagcaagaaggtggcaaggtaggtgggtctctggttcctgctgaaaaacgttctgaagtggataattaatcatagttttttaaaaaacattttaaaatgttcttttccaaggtattttttaaactcttgcaagttactttacatggtttggggctgaaggtatcctgaaggagtgttgggaaaggggtttccagggctgtgaatttggacctggatttgtgaccagggagggtacgtgtcagagcttttggtgctgggcctcttgtgtgttcactaaggtctggaaggggccgccatccccagatgtctgctctatgttagctctgaggtagcgagacccagtgaggagcctggcttctcagagccgggtctgggcagctccccaaggtgagtcgaaggtgagggatgggtctgactccaattcctaaagaccatttcttcattttccagcttcgtatagatctgttggcttcctgctgtgaaagatggcaacatacacttttatcttcctcccctgccagttcttaccgaaataaacatgcagggttaaggcccttcccagggagccactcagtgtggctgccgggtggcctctgctgccgtcagagtctgcctttgtgtctttatctgctttgccttcctagtccccgtcctgcttcgtggcccggcatctggcagggctgggagacgcctctccagcttcctctggagcatcccctctggagcctcctctctgccctgttgtgccgggcgttctccaggcctcgtggctgtggtcctggacaggtctccccacactggtgggttcctttgtttcgggggttggatcctctagctccctggccccgtcttccttctcatttgttttctctggtttttgtccagcgtatcttcctgtagcttcttgagaaaagaggtgctcaggagataaacttgagcttgggttggtttgtactgtgagagtgggatcattttcctgtaagatttttgacggcattgcttatcttctagagctaaagttgttaccatgaagtttaacctttctgactcggtttctttgggaccagcctgagcaacttagtgaaaccctgtctctacaaaaaaaaaaaaaaaattaaaaattaaaaattaaaaaaaaaaaaggaaaataggcaaggtctagctgcgttgcccaggctgtagtgcagtgagtggcaattcataggtgcaagcatagctcacaacagccccagactccctgggcttaagtaatctttccacctcagcctcccaaaattctcggattacagaggtaagccaccacacccagccaagaacagaaaccttttgttttccattttcttttattttgagacattgtcttgctctgtcacctgggctgaagtaccgtggtgcaatcacagctcactgcagcctggacctctcaggctcactccatcctcccacctcctcctcctgaggacctgggactacaggtgcgcattgccaatgcctggctagtcttttaatttttaatagagatggagtttcactacgttgcccagactgatcttgagctcctgggctgaagggatcctcccaccttggcctcccaaagtactgggatcacaggcatgagccgtcacacctggccatggatgaaaacttttttctttttgtttctcttctcttttcttggctttcttttctttttgagacagtcttgctctgtcttgctctgtgaagtgacatcatcacagctctcaatagttttcacttcccagacctcccaagctcaaatgatcctccctcctcagcctcccgagcagctgagaccacaggcgcatgccaccatacccagatgattttttaattttttgtagagacaggcccagactggtcttgaactcctgggctctagcagtcctcccacctcggtctcccagaatgttggaattacaggcaggagccaccgcgtcccacttgttttccattttctgtcattttaggggctaggggctaggggctagaggaagcagaggtgaacgtcatcatgcatctttttctaactgtcttcttgctcacccctttcagaaaagcattgagctggccgggcgtagtaggtcacgcctgtaatcccagcactttgggaggctgaggtgggtggatcacctgaggttgggagttcaagaccagcctggccaaaatggagaaaccccatctctactaaaaaaatacaagattagccaggtgtgttagcaggtgcctgtaatcccagctactcaggagactgaggcaggagaatcacctgaaccctggaggcggagcttggagtgagccgagattgtgccattgtactccagcctgggcaacaagagcgagactccatctcaaaaaaagaaagaaaaagagaagcattgagctcttaggaacgtgacgtgcatccccagctacacttctgttaccacttcagcatcaccttcctccccgcttcatcaagtcttttactccagacaggctgcagctggtgacatgaaagaccggtcaaggccagctaaggcatctgcttgaggcctcccgtgcctaggatggggcgcagcctgcagttggctgtcacagccttgtgtcagaaacaccctttaaaatttaatgtttccttcacgggtaccctttggcataaaaaaagcccaatctgagccggacgcagtggctcacgcctgtaatcccagcacattgggaagccaaggtgggtggatcacgaggtcaggagttcaagaacagcctgaccaacatggtgaaaccccgtctctactaaaaatacaaaaattagttaggcatggtggcacacatgcctgtaatcccagctactcaggagcctgaggtaggagaactgcttgaacccagaaggcagaggttacagtgagcccagatcacgccactgcactctagcctgggcgacagagcaagactgtctcaaaaaaaaaaaaaaaaaaaaaagctccatctgcagttatctgtcgttagagtttacaaaacagagacctcttctgcagtgtgtctatccacatgtaaatatatgtacacaagatttaatctgttgttttgccccaaatctgccacaagaggctaaggaagagcaaaataaacgtcgcgattcgcttctcacagttctcagcccttcgcgctgaactattgctgagatggtgggttttgccagcagccattgtagcccccgggcctggctgcattgctcacctccctcagccttgttctgtccctgtccatgagatggaagtggctttctccagtcagctgtgtgtgcagagaccgggggctccgggcagagccgagtccatcaggactggaggaagtgctcacagcaggcaggctccctgggccctgggtgggaggcctcagggatccccgtacctccttgctcaccagccaggctcgacctactgccctgtggggcaggtcaggctttttccacagctccctctctgggaggagggtccttccaagtgagggtgtggtgtagctggagaatccctctttctaggggatttaaataagcagccccagccggacgcggtggttcacgcctgtactcccagcactttggggggccgaggcgcacagatcacgaggtcaggagtttgagaccagcctggccaacatagtgaaaccccatctctactaaaaaaaacaatacaaaaagttagctgggcatggtggcaggtgcctgtaatcccagctacctgggaggctgaggcaggagaatggcttgaacccggaaggcagaggttgcagtgagctgagattgcaccactgcactccagcccaggtgacagtgcaagactctgtcgcaaaaaaaaaaaaaaaaaaaaaaaaaaaaattaaataagtaaataaataagcagccgcatgacccatgctgaggaccctctgcctcacgttggtggccacgtgtggtggctgcacgctgggtgcctggggatggctgtgtccccgagtcagccccagaagtgcctacgcctctaggacagctcagaagtgctgacaggtcgtggcctctcaggatgggctctgggttgcagcttcatgcctggagtggctcatgtttgggggcaaggtcatgggcgtttaagagcagcgactggccaagaacatgatctgtatcagcagcagcttttgagaatctgatgaaatccccagagccccagaagggcaccggtgtgttccagctggtgcacgttcacagggcttgtctcctcagagcgtttatggggaaaaagatggaaatgttcaagcccagtccgtactgagaagcaaatcgaacttcatacacttggtagacattttcagtggaaaaatattaacattttatggaattcttactctgctacgtccctagccaagctgtttgtatgcatgaccttggttaaacctcagttgcctctagacccccatttcataggcaaggaagctgggagagggtccccccatttcataggcaaggaaactcggagagggtccccccatttcataggcaaggaagctcggagagggtctcccatttcataggcaaggaagctgggagagggtccccccatttcataggcaaggaagctcggagaggatccccccatttcataggcaaggaagctgggagagggtccccccatttcataggcaaggaagctcggagagggtcccccatttcacaggcaaggaagctgggagagggtcccccatttcataggcaaggaagctgggagagggtccccccatttcacaggcaaggaagctgggagagggtccccccatttcacagacaagttcagagaggctccccccatttcataggcagggaagctgggagagggtccccccatttcacagacaagttcggagaaggtcccccatttcataggcaaggaagctgggagagggtccccccatttcacaggcaaggaagttcagagagggtccccccatttcacagacaaggaagttcggagaggatcccccatttcataggcaaggaagctgggagatggtccccccattttataggcaaggagtctgggagagtgtccccccatttcataggcaaggaggctgggagagggtccccccatttcataggcaaggaggctgggagagggtccccccatttcataggcaaggaagctcggagagggccagtgctttttaacggtcacgcagttctgagcatcaggctgtcagcctggagcctggcttggtactgaggttcccaggatgtataaagaactgaacacgcacctttgctgttggctcttctgtgcgagtgctctgagagttttctgtactcccggcaagtttgggttggtacagattcaccacagcgaatctgaccacgtggtgaccacaagcacgcgcttactgcgcgcctaagttcacactccctggagaagctcctgccccaaggccgcagcctatgggcctttgcgtctactcaggaccatgaggctgtgtccccgagcctggcccgggtagtaactggcatggcctgcggtgctgggggcgtgtccacaggagctggtgccacagaggacacgtgtgtctgctgtcttcctggactcggtcggaccagtttcccagtgtgtccgtgagggtgacactgagtgagacttctgggatccacacctttcctgggaccctcactcttcctgccacagaaagcacctgtgaaagtctgagatcaagaatgtgcacaggggaggtgtctgcaggtcaaggtcctgagctgatgtctcacaggcctctggtagagacgagattgttcgtgtctctgcgaagaagggcatgttttattgcagccaagtacaaagtcctctctgccactcgctggctgggactgaggtcatgttctgtcaggttccaaagagcgccaggaagactctgagaccacagagcacggcctgctttctcccagcccctggtaaagatgtccagcctgggacctccccctgtatatagtgctttaagtgggagaagaccaccacccagatcaggggaggacctgtcccctgcaatgctgctgcctgcttttcagattgacttgggagtgcttgtgctgacggagcatgtcctgtggtttttccctttcttccctctgttgttgtgccttttctgtaggtacctgcaccagtcaggggccctgaccatggaggccctggaggacccttcccccgagctcatggagggcccagaggaggacattgctgacaaggtaggccctggagggctgggtaggtggcaagtaggggatttagaacacagccacgcctaagggccgctgcagacaccccgggaggtggggacagcacagccggaggtgaccccatgtcctccagggctccccagactgtccatccagccccgatgctctttggcaggtttccccaaggggtctcgtggccatgtgagaaaaaggagtcttcctgttgtgcacgaagggccagctgggaggagtggactgggcagtgagtgagcaccctcgggtatcccacccccactgtgtctgagtcgggctgggggacacccagacattcagtccaccaggcccatggagacgcgacctggggcacccatgatttgggagaaaagggctggccctgcagttactgcagagccaacagcctgaggaacgggcttctcctggggccttgaatggaatgggtgacagcagccagggcaaggcagccttgccgtggtcaagacccgcttttcagccagatgtggtggctcacgcctggaatcccagcacattaggaggcctaggcgggcagatcacttgaggtcaggagtttgagatcagcctggccaacatagtgaaaacccgtctctactaaaaatacaaaagttagccacgcatggtggcgggcaactgtaatcccagctatttgggaggctgaggcaggagaatcacttgaacctgggaggtggaggttgcagtgagccgagattgcacgactgcactccagcctgggcgacagagggagactccgtctcaccttctgcaccccctcaccttctgtgaccccttcacttactcctgtaccccctcaattcctcctgtacccctcatctcctcctgtaccccctcaccacctcctgtaccccctcaccacctcctgtaccccctcactacctcctgtaccccctcactacctcctgtaccccctcacctcctcctgtaccccctcacctccttgtgtaccccctcacctcctgtaccccctcacctcctcctgtacccccccacctcctcctgtaccccctcacctcctcttgcactcccatctcctcctgtaccccctcacctccttgtgcaccccctcacctcctgtaccccctcacctcctcctgtaccccctcacctcctcctgtaccccctcacctcctcctgtacccccctcacctcctcctgtaccccctcacctcctcctgcactcccatctcctcctgtacccccttacctccttgtgcacccctcacctcctgtaccccctcacctcctcctgtacccccctcacctcttcctgcactcccatctcctcctgtaccccctcacctccttgtgcacccctcacctcctgtaccccctcacctcctcctgtacccccctcacctcttcctgtaccccctcacctcctcctgcactcccatctcctcctgtaccccctcacctccttgtgcacccctcacctcctgtaccccctcacctcctcctgtacccccctcacctcttcctgtacccttcacttcctcctgtaccccctcacctcctcctgcaccccccttacctcctgtaccccctcacctcctcctgtaccgcctcacctcctcctataccccctcacctcctcctataccccctcacctcttcctgcaccctcctcacctcctcctgcacccccatctcctcctgtacccccctcacctcctgtaccccctcatctcctgtacccccttacctcctcctgcacccctcacctcctgtaccccctcacctcctcctgctcccccacctcctcctatacccccatctcctcctgtactctctcacctcctcctgtacctcctcacctcctcctgtacttcacctcctcttgcatccccaccacctcctccctacaacttctctagcatctcaagtctgctgacccaggccaagtcctcctctgctcccttcactccttctcctacctccgcaggtgtctgattctcatcttggtgtgaactctctgagggagggaccgagacatggatctgtctgtcccttgcatccatgggcacctgggctgcctctgtgagctgcatctggctgagcagagacccaactgtgtgttggggggctgagtcttgctgcccaccagccagccagtccaaaggcacccctgggccccgagccctcagagctgcggcactgtgtgcatttgtgggtcgaatgacagtgctccccaagaccccggccccattaggagctgcacctttgtgggtttatgggacaagttggatccaacaccagcctagctaggtggatctgattctgtgctgagaaaatccccaggcggcctcccaggttgttcccttgggggtgcaggcccttctgcttctggctgcctgaccctgaagcctggtctcattgccaaggttgtcttcctggaaaggcgtgtgctggagctggaaaaggacacggcagccaccggtgagcaacacagccgcctgaggcaggagaacctgcagctggtgcacaggtgagcctgggccaggagacccgggcctctgcgtggcgcctcctgtgcccgcctgtcagcccccatttacttctctttacctcacacagcaggggcttggccacccgtccatccccgttggaagccggctgagggggtggtgccaggtggtcatctgagcctacccagtgggctgcaggcaggcgacccgaggctctgactggtgctctcatggaaccctagacacacagagggccagaggagggcactgcctccctctcgggagcgctgagacctgacccacacagaggaggaactgactgcgaacccacgcagtgctcagcctcaccagcaggcctggaggtgcagctctcccaccactctggtccatacggggtttgcccgtcctggaagaatgcaggttagagaagtcgctcagcagcagaaagcgaaatgagcagtgactgctgagtacgcgacaggacgcgcagtctcatcgctgtgggcaggagtgctggggaggaagcgaagtgtgacgccgtgtttgcagagaaagagtgggagctgcttgcctcactctggtttgcagacttttcttagaataccgtgtaattctcggtgtttttcacacgaggcacgccatgttgtctcatagccgatttgcaggactgtttccggtgcaaagtaagatgagcttgtcccaggagtcagctacccaggctatgacacctgtagctgggcaccggcagcctcttgtgggcagaggaggcagccaggaggcctatgaggcacctgtgggatctgcagaagaggttcttcctgtgagcttctgtccctgcccagctgcgcgggcacatcccggctcttccacatattctcagctcggccaagggccctgtcccttgaagcttcagtgtcttcatcaccactgagcaggtagattcagggctctgagcagcctgcacacacgtgtgttggcagcagggcatttgtggtcagcatccccaaagcccccaagccctcaccctcacggtactaacatttgtgaccatctgccctgtgagcgctgagaattggaatgcctcatgggattgtgggcataacttgcacatcattttaattctaacaaagcaaagcatgtgctcttgtggagtgaagaccctgggcttggcggctgcccgttctccaggattctcagcagaagagggcctgctaccagcccctgctgcagagtggagaggggccaggcatgctggtgaaggggctggactcccgtagtgcgctacacataagcagtgccaccaaagaccactgtctcctccttgtcaaggagaatccggggggctgccagatgcacttgttttgttttgttttttgagagacagggcctcgctctgttgctcaggctgagtgctgactacagcctccacctcccaggctcaagcgacccgcctccctcagccttcgatgtagctgggactacaggtgtgcaccaccacacccagcttttttttttttttttttgagacggggtctctctctgtctccaggctggagtgcagtggcgcaatcttggctcaccgcaacctccgcatcccaggttcaagcgattcttctgcctcagcctcctgagtagctgggacttgcaggcatgcaccaccacgctgggctaatttttgtatttttagtagagacggggtttcaccatattgaccaggctggtcttgaactcctgaccttgtgatctgcctgcctcagcctcccaaaatgctgggattacaggcgtgagccaccgtgcccggcctagtttttaatttttttatagagatgaggtcttgccatgttgcccatgctggtctcaaacgcctggcctcaagcgatcctcccaccttggccccccaaagtgctgaaatcagaggcgtgagccaccatgtccagcctagatgcctttgtcgagttgactgtggaggtttcatttgagtctggagtatgttcatctgttttccgtgtgtgtggtgtgaagtccacactgccgcctggcaccacccactgaccgtctgcagtgcagccccggccacattcagttcctgtggctgttccctgtggtgctcacctccaacgtcctaaacaacacgtttcccgttttcagtatcatctgcccgttctgagccatttgctctctagccctaccatacagctgccatcctaagagtacgtttcccgttttcagtatcatctgcccgttctgagccatttgctctctagccctaccatacagctgccatcctaagagtacgtttcccgttttcagtatcatctgcccgttctgagccatttgctctctagctgtgccgtacagctgccatcctaggaattccgagtgctttctcctgtgtttgattccttattttctgggtcccacgttttcttctgttttgccaactcattttctgagtatgtcactgatagttgcctggaaaagggagcacaggagccagatgctctgagaactgcttgtgtggaagtgctttttcctcccaccctgctccagtccatagtgtagctgggcataaaattctaggtcagagatcgaattccctgagaatgtgaagacctctgacccggtgctgtgactgaggaacctctggtgccgcagggccttgatgttctctgtaacttctgtttcccaccctacatacttggaggaggatcttgtattatttgccgtgctgtgcacctggttttcagcctttatttcgttttgttttgttttgttttgttttttgagacagagccttgctgtgtcacccaggctggagtgcaatggcacaatctccgctcacggcaacctccgcctcccgggttcaagtgattctcctgcctcagcctcccaagtagctgggattacaggcatgcgccactgtgcccggctgatttttgtatttttagtagagacggggtttcaccatgttggccaggccggtgttgaactcctgacctcaagtgatccatctgcctcggcctcccaaagtgctgggattacaggcatgagccaccgcgcctggcctaggttttcagcctttaaatctggaaaacgcgtcctttcgctgtgggaagacttctgaagttatttcaccatgcggcctctccctctcatctgtctgaacatctgctagtcacacagtgggccttctggatgtttcctctccttttttaaactttcctcgtctctaattttatctttctgttctttttttctatgtaatattctcagttttctccttcaactcttgatcagatcttttttttttttttgagacagagtctcactctgttgcccaggctgtagtgcagtggtgtgatctctgctcagtgcaacctctgcctcctgggttcaaatgattctcgtgcttcagcctcccgagtagctgggactacaggcacctgccaccacatccggctaatttttgtatttttagtagattcagggtttcaccatattggtcaggctggtctcgaactcctgatctcaggtgatctgcccgcctctgcctcccagagtgctgggattacaggcgtgagcccggcatctcaatcggacttttaaattgtccttcccacgctttcagttcctgggagctgttccttgttgtttgtctcttctgcagcaggctgccctgacgctgcagctttggctctctgctcgcggaggccgctggctcggggacctttccctgctgtctgctgcatcatgtgtctccctgggtcctcacttggtgtttgctttggccacttcctgttgaaagctttcctgttgtgtctggtgatctttggccatctgttcactcctgcgtgtgaggcaccacaaggatgagaggctctgtgcgaggcagggccagagggcgtgggctgtgctgtgtcagtgggcagggcctgtgcccttctctttgggatggttcagtcctgtctcctgcggatggttgtgaagatctcaggaaggccagggtctccctgccctgtgggaatattccctttcccctgtggtctagctgacacctgccctgcctctgctctgaggtgacctggatgggactggtctctatacccacttccccagcctggaggggactgggagcagagtgggccccccccccacttgtggcccctcacagcctctggggcccggatgtgcccagctgccagagccagactcgtcctggctcccatgtggacctggcatctcaggaagcctcgtgagcacctttgggtgatgtgccatgaactgactgtactgcagctgaaggcagactccgccagcacactcagttctctggtgttcagctgccgcggaccacgtgctcatcagacactcacttcctggaaatgctgtggcccttgggccctggcacctccacgccccgtcccgaggccccgtgcctctgggctctgagcgcacgcgttgtgtgtagtggccctggcacctccacgccccgtcccgagtccccgtgcctctgggctctgagcgcactcgttgtgtgtagtggccctggcacctccacgccccgtcccgagtccccgtgcctctgggctctgagcgcacgcgttgtgtgtagtggccctggcacctccacgccccgtcccgaggctccgtgcctctgggctctgagcgcacgcgttgtgtgtagtggctgcaggtggagcagctgcatgaacacagagtgcaccaggagaagttacctggcgggctcaggccctctgagtgctgcggtccacaggccacaagcgggcagtgcctgtgggtatcagctgggcctaggtgcagtggacactgctccggccaccccaggtgcctttagtgtgggaggcgaggccatctgggggtgtattcgctgcttcagaactgccttgaccagagctcggggatgcccttctcggtgccctactcccgagtggaggcaggttctctggaggtcctgaggcagcttctgggcatgggtggagccactgcacaccctgcctggagacagctcagctcctccctttgcctttcaagagcaaacgccctggaggagcagctgaaggagcaggagctgagagcctgcgagatggtcctggaagagacccggcgtcagaaggagctcctgtgcaagatggagagggagaagagcattgagatcgagaacctgcagaccaggtaggcggttcccaacagcccatccaccccagaacctgcaggccaggtaggagacggtccccaacagcccgccagccccagaaactgcaggccaggtaggcgaggttcccgacagcccgccaaccccagaacctgcaggccaggtaggagaagttccccgaaagtccgccaaccccagaacctgcaggccaggtaggagaagttccccgaaagtccgccaaccccagaacctgccggccaggtaggagaagttccccgacggcccgccaaccccagaacctgcaggccaggtaggagaagttccccgacggcccgccaaccccagaacctgcaggccaggtaggagaagttccccgacggcccgccaaccccagaacctgcaggccaggtaggagaggttcccgacggcccgcccaccccagaaactgcaggccaggcaggagaggttcccgacagcctgcccaccccagaaactgcaggccaggtaggagaggttcttgacagcccgcccaccccagaaactgcaggccaggcaggagaggttcctgacggcccgcccaccccagaaactgcaggccaggtaggagaggttcccgacagcccgccaaccccagaacctgcaggccaggtaggagaagttccccgacagtccgccaaccccagaacctgccggctaggtaggagaagttccccgacggcccgccaaccccagaacctgcaggccaggtaggagaagttccccgacggcccgccaaccccagaacctgcaggccaggtaggagaagttccccgacggcccgccaaccccagaacctgcaggccaggtaggagaggttcccgacggcccgcccaccccagaaactgcaggccaggcaggagaggttcccgacagcccgcccaccccagaaactgcaggccaggtaggagaggttcttgacagaccgcccaccccagaaactgcaggccaggcaggagaggttcctgacggcccgcccaccccagaaactgcaggccaggtaggagaggttcctgacggcccgccaaccccagaacctgcaggccaggtaggagtagttccctgatggcccgcccaccccagaacctgcaggccaggtaggagaagttccccgacggcccgcccaccccagaacctgcaggccaggtaggagaggttcctgacagcccacccaccccagaaactgcaggccaggcaggagaggttccgacagcccgcccaccccagaaccggcagtggctaggaataacctgaaagtttagaaaaaggggcaaagctatgtggagaagactttgaaactctcccaaagaccacaagggatcggttcaaagactgaccctgacgctgtgcgggtgctggtttctgtaaatccatgtctaaccaacgtatccagtctttttaaaataccaatcttttttttttgggtgggggtgggtgggtttgagatggagtcttgctctgtcgcccaggctggagtgcagtggcgcgatctcggctcactgcaagctctgcctcccgggttcacgccattctcccgcctcagcctcccgagtagctgggactacaggtgcctgccaccacgcccggctaattttttgtaattttagtagagacggggtttcaccgtgttagccaggatggtcttgatctcctgacctcgtgatccacctgcctcggcctcccaaagtgctggggttacaggcatgagccatcgcgcccggccttttttttttttttttttttttgagaccaagtgtcaccctgtcgcccaggctagagtgcagtggggcgatcttggctcaccacaacctctgtctcctgcgttcaagcaattctgttgcctcagcctccctggtagctggggctagaggctcacaccactgcacccagctattttttgtatttttagcagagacgggtttcaccatgttggccaggatagtcttgaactcctgacctcaggtaatccacccgcctcagcctcccaaagtgctgggattagaggtgtgagccactgcacccagccaaaaaatcattattttaaatagagacaggggttcttgctgtgtggcccaggctggtcttgaactcctgggctcaagcattcctcccacctcggcctcccaaagcgctgggattaccagcgtgagccactgtgcccgccgaggcacaagcattaaagcagcatggtgcctcccttggttctccatctgggagctcatgctgtggattcctggtgtgtgtttagaaatacatttgcaagggacggttattgattttctgtaaaagttaaaagcatcaggtaacttaaaatatctataatcagaggactctagagttctctatccttcttgtgtgtctgggtagtgagggtggaggaagttgttttatacagttgtttgtttgtttgtttgtctgttttgagatggggtcttgctctgtgcccctggctggagtgcagtggccctgtcatggctcactgcagccttgaactcccgggctcaagcaatcctcctgcctcagcccctgagttgctggggctccaagtgtgctctatcatacctggctaacttttcttttttggtagagacgaggtcttgctgtgttgcccaggctggtcttgagctcttagctttaagtgattctcccaccttggcctctttttgttgttgttgttgggattttttgttgttgttgtttttcctctccatactctcagcagaagcacctcagcctcttaaagtgctgggattatgggcatgagccacctcacgtggcttttttaaactgagcatgtactacttttagattttgaaatacagtagttttaaatattcataagaggatttcaggttcttttgcttgtgttccttccagctcttaaagctaagatacttgccttatctaagaagagctcctaggcattttcaaaactggtggcaggaaggggcctgcactgagagagctgtgcgggacgccccacacagggaggcctccgtgcctgccattgcagtggggcgccgtcttctggggagcaaggtcagggcagccaggacagtgttttccccgggccttggcacagtgcagttgagtgggctcaaaattaaagtacgtttctcgtctgtgagcgccagggagcacctcccatgggacctttccgctggggctgaggttggggcacagccgtgtggacatcctgccgcctctgtgtgctctggtgtggaggggcacaagataggggtctcacgaggccctcagggagcaagcagggcccagtgtcactgcctcttgtgagcaagccgcctgcccaccctaagcgcttggggtcagtgccaccgtgttctgggcctcctgcagcttcctggagtggccaccaggaaccttgtggttctcagggctgctcaggccgtcagaggcccctgcagccccaggtcagcaacctgcggtcagcccagcacgaggcctctggcatcttggggacttccccagcctggcctctgcccatctggtgtacaggaagaccctggtcagtgcaaagacactgtctcagtccggggtcctcaggagcagaggatctggaggcaggactcccagcacctgcgtcggaacctcctgggaacagcaggggcgggtggctatgcagttgcagtgcctagaaaacagctggatttcaggagtggagcctcagtagagatgagagttaaagctgaaagggcatagagaagatggaggagtggagaggctggagctttggacatccttgtttagggaccgggaaaggagaatatgtgtcatcagcagaatggggctgtacgaaggtcacaggcagagatctgaatctcaggacacagggcccgggagaggttctaggaaaggccaggtacctctgggagtggggcccccaggggcttccagaaagtatgggagcccctggcaggctgcagagagctggagtgaaggctgatggggccacagtggcatgtccacagagaccggggcctgatttgcagcttgtggcacctgccgaacccccggcgttggggtacatggcccatcatcaggcacagagtgaactgggtgaacgtggccctggtgtgtggtgctttctagcagcacgtgagccaaggaagcccagggaagccttcgcttgtgccacgtagcatagctcgtccttccagaaaatgtgagtagactcccctgagcctgataatgaaaggagagaagtcagaaagactgaccccagcactgggcagagccgagtgtgtctgatggacagcgagaggctggggcaaggaggaaagaaagaggggtcaggcctcgggaaggcagtgctgctgtgtgtgaagctgtgcggctctttattttcttctctttgcttatctgtagttttgaaattcaatagaattaaaacataatttgctttcataattatgaacaaaacatgcaagtgttactttgaaaggagaaaatagctgtgggtagagccgtctggactccagggttagaggcggagagtggaacttagtatgctccactcagcaaaacaacaggaaaggcagatggcaaaggtgcagcccagaaagcacagctgcacacactcctaacgcaaacaacaccctgcgccagcagctacaccggtgtttgcatctcggagcagccacatggctgacacggaccggggttcgcatctcggagcagccacacgggcgacacgcaccggtgtttgcatcttggagcagccacacgggcgacacggaccggtgtttgcatctcggagcagccacacggctgacacggaccggggttcgcatctcggagcagccacacgggcgacacacaccggtgtttgcatctcggagcagccacacgggcgacacgcaccggtgtttgcatctcggagcagccacacggccgacacgtgttggggtttgcatctcggaacagccacacggccgacacggaccggggtttgcatcttggtacatgaaggctcagaagtgggtagcaccaggaaccgtggaagttggataaaggcgaggctcacacaggagggtccccacccacatacagctggatcacacccatccccaccctagaggaggaatcgggactgcagggcgccagcacacaccagagtggcaccaccgagcgcccgggtcctcctgacgaacacctgaggccaggggtctgaccagccccagacaagtcctgggagcgtgcctgtcccgggcaccccgtggcctccccggcagtgcagaggccggccggtgctctttggaaggggttgcatctgctttgcccctggtctcaatcatcagtttgcaaagcaagagcaagtcccctcctgggtagaggacaccttaagcccttcccgcccagccctgtgctgcccctgggtttccacttacaccaaattctgggtgttggtgcaggttggattgaattagaagggacggcagggtaacgggatggtgaggacaactggattatggagaagatccagggttccttggagaaatggccagttctgaggctgggacaggctaagcctgcagcaatgtgtagtatctgaaaatgaggtgcttacactaaaaaccccccatgagcacagacactgaggttatctcagagggacatgggccagctgaaggagttgccagacgccaaagctggaacagtttaacaaactcatagtgacagccttggattacaatccaaagcataaagtgcgtgagtccatatgacacagataaattatcatcaacgaacagaaaagagggccgggcgcggtggctcacgcctgtaaccccagcactttgggaggccgaggcaggtggatcatctgaggtcaggagttccagaccagcctggccaacatggtgaaaccctgtctctactgaaaatacaaaaattagccaggcgcggtggcggccgcccgtaatcccagctattcgggaggctgaggcaggagaatcacttgaacctgggaggcagaggttgcactccagcttgggcgacaagagcaaaactccatctcaaaaataaaataaaataaataaatagagaagacacaaatcttcctcacagaggaattccacataatgtccgcagacactccctccaggaggcgggggctggacccagtgagcggcttccagaggacagagcgggcgggaaagcagggacctgtcagagtgcacacctggcaggcagaccttggccaggtgatcagaaagccgtgcggacgtcaggaccctgatacggtgtgacgggaagggccccgcacctctgtgggcatcttcccaaaacccatcacccagtctaattgcgagaaaacaccagacggacccaacgtgggggacgctctacagacaccatgacaggcctgctcgacaccgtcaaggtcggaaaacacaggaaagtctgggagactcacagaccaggggacggaggagacaaaatgcagtgtgggctgggcacggtggctcacacctgtaatcccagctctttgggaggctgaggctgttggaacctttaagctcagagttggagaccagctcaggcaacacagcaagaccttgtctctgcaaaaaatttaaaaattagccacgtgtggtggggcacacgtgtactcccagctacttgggaggctgaggcaggaggatctcctgagcccgggaggtcggggctgcagtgagctgagattccaccagtgcactctgggtaacagagcgagaccctctctcaaaaaaccaaacaaatgcagtgtggttgctggatggggtcccagaacagaaagggcacgcatgggaaagccacagtcttcagttagtgtggtctgcagagtgtcccaatgtggctctgtgactgtgacacataacaccacagtgaagaacagtgaccacaccaagggaggccagtgcagggcccacggggactacactgtgtctgctacttctttttttctttttgatacaggatcttggccgggcgcggtggctcacgcctgtaatcccagcactttgggaggccgaggcaggtggatcaccaggtcaggaaattgagaccatcctggctaacacagtgaaaccccgtctctactaaaaatagaaaaaattagccgggtgtggtggcagtcgcctgtagtcccagctactcgggaggctgaggcaggagaatggcgtgaacccggaaggcgaagcttgcagtgagccgagatggtgccactgcactccagcctgggcaacagagtgagactgtctcaaaataagtaaataaatagatacaggatcttgctttgtcactaggctggagcgcagtggcgggatcacagctcactgcagccttgtacttccaggatcaagtgatcctcctacctcagcccctcaagtagctggagctacaggcatgtgccactatgctcggctaatttttgtatttttttatagagatgggggtctcactatattgcccaggctggtctcaaactcctgggcccaagcaatcctcccgcattggcctcccaaagtgttgggattacaggcgtaagccactgtactcgccttcaacttttctgtaaacctaaaattattccaaaacccaaagtatattaaaaaaaccaccgtggatggccggcggggtggctcgcgcctgtaatcacagcactttgggaggctgaggcaagcggatcatgaggtcaggagttcgagaccagcctggccaacatggcgaaaccccctctctactgaaattacaaaaattagccgggcgtggtggcaggcgcctgtaatcccagctactcaggaggctgaggcaggagaatcgcttgaaccccgggagatggagcttgcagtgagctgagatcacaccactgcactccagcctggtgacagagtgcgactctgcctcaagaaaaaaataaaaaaataatactaaaaccttcaaggattacggaaaagctgtgccctggagcacatgggtgggcacataaggattggccctggtcgtttgggggcgtctgttggtcacagggcggccccagcagggtttccctgagacacagggcacactggccctgtagaggcgagcttcctggagtgagtttcagctttgttcttgtgtcccaggctacagcaactggacgaggagaacagtgaactccggtcctgcacgccctgtctgaaggccaacattgagcgtctggaggaggtgagctgccaacagcctggagctgtggccagtggggccagcccatgccctgcctgtggggcagctgaggtagccctgagctctgtgctgagcgggatactgtgctgtgtgtgagggaacggggccagctcagggcccaggccgctggaagacactggaccgtgctccacccacaggagcagggcccagaggctcactcctagatggacccagggctctgaatctgggaattgtcctccaaggggaaggcatcagccagccacttatgccccaaccactgccgacgtggaggcagaggctacacatggggctcccacaccccagcttgtcactgcgagacctccctgcccccacctcaccaggtgtgctctgggaagctcccaggaaggatattctcagagcacttgggccctgactcccatgaaccagaggagcccggctggaggtgcccacagccactgagtcaggtcctgtccacacaaaggtccttcctgcccctcgtgagaaacggccctcgtggcctgcgtgtgcgcctctacccagaagcaggtggccttgacctccactgagaggcaggaaggctcagacccagccctgtcgcgctccaagcacgggcgccaccgcgttgctgttgggagactcagagattggagggacagacggccggggcaagctgcatgcacaggtaggtgcgtgacccgcatccagggcaggtgtccacccctgcaggagaagcagaagctgttggatgagatagagtcgctgacgctgcggctcagtgaagagcaggagaacaagaggagaatgggggacaggctgagtcacgagaggcaccagttccagagggacaaggaggccacccaggaggtgagcacccaccctgccccacgcccagtcctgcgcccagcctgccccacggggagcctttgtttcctgagacgctagctcttggctgtgctgctttgggcatagccgctggtgtgtgtcgtcctcccgagagacggccagatcaaccctgaggttctacagccaagtgatggctgacggtggcccctgggagcccaggccccccggctcactgcacggttgccctgcagctgatcgaggacctccgaaagcagctggagcacctgcagctcctcaagctggaggccgagcagcggcggggccgcagcagcagcatgggcctgcaggagtaccacagccgcgcccgggagagcgagctggagcaggaggtccgcaggctgaagcaggtgggcaggcctgggcctccctccctcacactcctgcagaagcttccacaagactggttgggaagggggggccgtggagggtcagcatctgagctggaggcctttttccccgggcagtccttgtccctgctcagccaccagcaggggccacagcccagtagtgatgttgctgtgccttcaggacaaccgcaacctgaaggagcagaacgaggagctgaacgggcagatcattaccctcagcatccagggcgccaagagcctcttctccacagccttctctgagtccctggctgcagagatcagctccgtctcccgagatgaggtaacacatcccgtgtctgcacggtgtggcctggggtccacagtctgcactgtctgtgcgctgtggtttatgcgctgtggcctgtggcccatgcgcctcagctctgaccacctgcttgccctacagctcatggaggcgattcagaagcaggaggagatcaacttccgcctgcaggactacatcgacaggatcatcgtggccatcatggagaccaacccgtccatcctggaggtcaagtagaggcaggaaggtccagcctgagctggattcgggactccaacaccctggagtggttccgtcagaccatgaggagccaagaccagcaggtcccacagccgacagtgcccagagcatgcagggaaccctcgtgcagctgagctggggccgccaaagaccggggctgccaaaggggcagagggtggtggagaggagagggagaaagggaagtcccagggcccggggtccacagaggatgagggttgtggcagggccgtccatcagcgctgaccttccgggggcccagagcttcccagccctgagtcaagctggccatgaacgcgtacacttcagttcagcaggatgggctggagagcctctctgtgcagcggtgtggggtgagccctgctgtggcctccttgtggtggtccctcttcccacgtgcagccctgttgggaagaaaggaagaaaacaggtccctccaggggtgctgctgcctaagccacccacataagtacgctggtgccgtgtcacccatgttgagccgctcctgatggctgacgggctcccagaccctcacctcggacatggtggtgggggaaggacgggtgggcaaggctggtgcgttccccagctctccctacgctgctcgggccattgcccagccagatgtggtcacctcagtccagctctggggcctccaggccatgtggctgttcccacggcccagtcctcgctgcagtaacccctgggggctctgaccacctatgggggccgggcaggagcctctggggcctccactccgacatcaggacctgagatgaccgctgtgtggcgctctctccctgggcagggtggatgccacaggcccctctggctcccaggtgctgcttctccacaggtgcggcctggcccggcctcctaaaggccacaccctccccacgcacttcccaggccagaatccaaacatcgggaaccctgttttcttctgggtgtgtctcacttagaaatcgtggttcttccccgagggtgcatgttgcaggagggagagggcagggaagactcacagcagagcaggagggggcctgtgcttctcggggtctgcaccccaggcacagcggtgtcaccccgcaggaccgcgggcctgccccaacccccagcattcccgggtgggcccagaccccatcaccaagactggccacccgctgcgtgtgtgtgcgcgcgcgtgtacgtgtggccccacatccgccgccttccacgctaggatgtaagaggtcgcctcctattgtacatttggggaaagccttgggtgtaaatcagtgtaaacttggaggagagatttttctatcatgtagagtaggtattttttatagattgaaggttgatcaattttttaatactttcaagagaaaactgtgtatacacatgaaatatatatatatatatatatatatatatgtataatatataaagactggcaccctgcctctctgtgcccaggcccagccctggtgacatggcaccactcagcagtgctgtcactgtaagcatggactcccaggagacagtgtgggaaacgctcctgctttaattccccgagaaacggctcttcctgcctggatgcaggagggcaggggccaccacagattaaagctgttactgcacacgca

SEQ ID NO: 69 - DNA, 42977 bp, Homo sapiens
ccgcgccgcgcggctgggcaggaagcgccagacgcctggggcccacgccgtccgcgggaaaagggcaaggcgctgggttttccagcagcaacctttggaccccgcgatccagtagctccggtaactccacgcggggcgtctgggtggaggagccggtcctggagcacggctgcgaggagcacccggaccggagggtccccagaccgggacctccgagtcagggaggattctacgccagggagcgccccagactgagagcgccccagaccgctacactcccggacccggagcttcgcccgaccgcgggcagtgcccacctgcagcctccaccggccggggttagcagccaggagctgccagacgcctgacattcttctttctgttcctactttttttccttcttcttctttttttttttttttgtagccctctctgggtgccttatctctttaatcacacctctctttcactttccacggtagtcaggaggcggagatcgctgcttctcacctactttctgaacttggcctccgcagtcgcgacctggcgtgaaggaggagctgccgcccccgccccagcctcggggacgcctctctgaaggtaagggtgggctccgctgccacccgcatcccctccccaccccccagaggaagggaagaccaccatccggggagggattctcaaaacaagatcaattaagagagagagagagatagtgtgtgtgtgaatacgtgtgaataattgatgagacagcatcctgtctttctctgaaagtatagttttagaaattaagacatccccaattattttctggagaggtgagaacgactgaaataaatgataacaatagttgtcattttttaagtgcttactgtgtgcctgacactgtagaaaatttttagatatcttattttcacttaatcctcctaagggccacatgaaataggaactattattatgctttaataaaagggaggaggaattccgtcatttacccaagagtatccagctactaagtagtagatcccagatccacacctacagtttttctgattccagagcctttgtcttttttctgcccagccttgggaagttaaaatgcccagcaccttgcatcgcagttatcagacaaattaatgaggtgtcaattgcagccagatacagagatccaagattattgtattcatttcactgacttcccttgcttcattctcaagaccctttgcaaatactgattttgtgtcatacacagtgctgctattgggagcacacctctcaacctcagggccttggatgggctaggaggggtaaatttggggaattgggtttgtgcaggttctggggacagtgttttccctctccctgcacaaatatacatccaaaggctgagaactaaggctaaggcctaggaatgtggattgaaaaggcagggtctaaatcccagcacttgggaggctgaggtgggcggatcatgaggtcaggagatcgagaccatcctggctaacatggtgaaaccccgtctctactaaaaatacagaaaattagccaggcatggtggcatgcatctgtaatcccagctactcgggaggctgaggcaggagaatcccttgaacctgggaggcagaggttgcagtgagcagagattgtgccactgcactccagcctgggcgacagagtgagactctatctcaaaaaaaaaaaagaaaaaaaagaaaaggcagggtccctgccttcagggacctcaccagagagtgggagctagtccaggagtgatggaaacacctgcagagtgatggagacgggcttggacataggcatgtgccatttggggctgttgcagttggagagcttccttgagaaggcaaatactgagccaagttgaaaggactctagggacctggcatctgggataagtggggagggtggcccaggtagcacaggcataggcagatttggggggaagcataaggctaacaacagacacttgtgtgacaaggactatgaggtggcattgattttcttggccttacagatgagaagccagattccacacaaattattttgtttgttagagtttaagcgtgtgtgtgtgtgtgtatgttatgccccaagatcattttctcctctttgcatttggttgttttatcatctcacaggctgagtaaaacgactatgcatggaacactgtagaagaaaaattatattaaaaaaaaactggtgttatgattttcatccaggcattttgtctcaggagttgctcgattgtatgtgttgctaatgagtgatttatattgaggcatctacattgattcatgtgtgtccttgtgaatagctgtaatctgaggctggccatttcacttcctcaaatctcaggttcctcattagaaagagctttgaaatggctctttccctgtacattatgtgtttctgtgaattacttttagagaaaggtcagtttctcagggtgggacccataaacaagggcaactgggcagagccaggggttcaggtgactgtttggaccctctggaagggctttttactgtgctgccttgggagacagagtggtcagcttggaactgaccttaagcctaggtcacccaatttttgaaggaaacttttttttttcatttagagaaaacttcatgcctttgggtgattaggtaagtttgtgactattcgttatgtgtgtgtacacacacgtacgtacatatgtacatgcacaaatatttaatatgtcttagacacaccaaatatatgcatttaagatgtattaaatgtactttcctgagaatacaaataagtgccctacgtcggcggctctcttcctgactgtatgttagagtcacctgcggagttctgaggactcaagatgcccagtctgtcctccagaccactgggtggagcccgggcatcattatttttttccaaacttgggtgagagctggtggcctagacttcacattagttgctaaaacatactttccaagatatcatgcgttaaaaagcatttcaaaagtagattgtgcagatgtgccaatggatcagatgatcacctagattcaaaattatgtatattttatggatgtaattcattcaataattcagcaaataacaaagaaacaagcagacataaagtgaaaatatgacagttagtgataagtgctatgaatagaaaaactaaacatgggagggtagaggaacattggtgtgtgtgagcatgtgtgtgtgtgtgcgtgtgtgtgcatgtgcatgtttgcatttggaaaagcatgctgtgctagacttgcagtagagtgctcagggaggacctgtacattataagctagtgtcagcaaaccgtaggggaaatacaggattatttaattaacaatagagaagtaattagtaggtatttgaggaaagtaagtttagttactccctatcttcatgtcaatcaagaaaattaattgttggtggatgaaaaaagttaaatataaaaacaaaacaaaacaatactgagccataaaaatgaagaaactatgtaagcatctatttgaccaccaacaggaaaggatattctacacttaaaagcaatgaaaacatctcaaagcaaaagaatgatcggtttgactacatcaatataaaatttgtcatatattagcataacaaaagagagaaagtaaacaacaagttagacaaacatctgagaactggacaaaagacataaagagatggttcataaacatgaaaataaaatggctgataataagtgattaatatttgcctcatttatacccaaagaaatgcaaattcagaaaacaatgagataccatttttccattttggctgtctaattacattttaaaagtaaagctgctcagtgtgcttctgggtgtggtcgatagatgctgtcttgtgctattgagtgagagaatatgaatattgcaacacttctggaatgcagtttgtcagcatgcatctgtcaggtttcaatgtagtcttcaactcaatcactgtactgccatcgagtaacatccaggaaataataagaaatgtagacaaataataatagctaacatttaagcggtattaccattcaccagacacttgcaatagtaactcatttaactttcacatcagttccaggagatggtattattatccccttctatagataagaaaattgaggcacagaacaggcaagtcagttgcccacagtcggttagctggttgaaggtagaatggagattcaaatccacccaggctgccacctgagcccatcctgcaaaaaaactgagccatcctggcttacctgtgaagatggtcatgtgattatctcataatacatctggtaaatgataatatatccacatgaagtaatattaggtggcaattagaatggttttaacaaagagttttgtgacacaggaaaaatgctcattatgtaatattaggtggaaatgcaggatatgcaatcttttaaacatcttttattttttgagaaggagtcttgctctgtcacctaggctggagtgcagtgatgagatctcggctcactgcaagctccgcctcccggattcacaccattctcctgcctcatcctccttagtagctgggactacaggtgcctgccaacgtgcctggctaattttttgtatttttagtagagacggggtttcaccatgttagtcaggatggtctcagtctcctgacctcatgatccgcccatctcggcctcccaaagtgctgggattacaggcatgagccactgtgcccggccaaacatcttaattatgtgacaacatttataaaaagtacaagaaaacatgttaaaatattatacatgttgagattattttcttctttcagtcttcattttgtaaatctcctacattgagtgtaaattgctttggaaatcagaaaaactttaaaaagaaagaaacttaagagttacggaaaagcaaaaatattgatgttaaacataacaattaaaaacccttaaaattcttacatgtgagacatttaatatttatattcttctatgcctattttattaatacttgctagagtatctgttacatttatcagaatatctctttttctggaaatgaattcattatttaatataaccttaatctgttaaattcacacataaaacttaagtacattaaaaattttacatacacacatccacatttgcagaatggtgtgcaaataccagctaatttttgtatactgagatcttaatatgtttcatattgaaactcagagttaacttgtcagtttgctgagccatctcctgataactttgtctcttggtagatattgaatattttttttaaagtggtgctttttataaggttacatcagtcttaatcagagtgacataaaggaaataacattttttattctatccaagataaaagaataggcagagttaataataaaatgtgtgtggaggtagtgggggaggtttcaaaccatagacccagtctaatttgattatgcacagttggtactttccattcatacttgtttctttggcctttacattattgattattatctcttggaaattccaccaaatatttggtgatttttccataaggatgtatgtgaatggtttggcagcttagccattaagctttatcctggattcaggcattgacaactctgtttttaggatggaagatgagtagttgttggtgagaggggcattattctgagctgagaagctgccatgcactcaggaagtctccataagccttagatggtttaatcactcaataattccagaaacaggccttcttatcatctccattttggtaatgaccaaataggctctaagacttgctcaagttttgcacagcttgtcaggactcaaactggagtggcagcccaggtttgtgtgtttctgaaaccagactctgccatcaggctgtgctccctgcactcaggatggtaaacaagggatatggtgttgtttatgcagtatttagactctgaatggtctccactgtgggggatccttcctccactgggctcaaagttgtaatcagaactccgaatgctaggttgcagtaggatcaaagttcaatgcagatcttagttccactgggacacagtcaatgtaaaggaggggtctggagtgtaggagactgtcacttcatctctccatttccctaaagtaaactcatatgggcagccacagacacacgcgaacacatgcatacacacctatgcctcagtgacacatgttagtgagtgctggccatgtgctaggcatcgtgctggattttagtgatacagtgaagagcaaaatagacttagtgcctagaattatgaaagaattatgaaacctacgttctgaaggaggaagatggagttttaaaaattcaaccctaaatgaagatctcattacaattcaggaatgttttgatgtgaaaacacacacacacactctgttacatgggcagaactgccatacatagctcagcatgtcacagattgtttattcatagaatggtaatatttgtagcagtactattgttctgaactttggccttggaagcaggatttagtagaccaggcctgaaattcttcagactctgttgtatcagagaaataaattattagggatttcttccagaagaaaaacttcattgccttgaaattttattaattttatatggctgaaagttctgagaattggttactatattaaggattataaaaatcttctaggttgtttttttaaaaatctgtgtgccagaagatttttaaaccttcataagataggcacacttttgtttgaaagctttggctgaatctgttttattctgttttccagagaagccatttgaagcagaatccaaaccatgaattgtagagaattacccttgaccctttgggtgcttatatctgtaagcactgcaggtaagtgattatacatactctcaaacatatttcatgagtaattgaggaagaatgtcaaagtttttttttttatgtggtggctactgaagatgctgaatttattcagaaaagaaaagattctgcagtctgagttcatgtagtgagagcagagtgaaaaacttgcatcttgaaataaattacatttgtctgaggtgaaaatttatttcatgttatttgaaactgaggaggtggcagccatctttattattgggttttaggaagtttgaaacacactttctccttcctgagagggaggcaaagattcatctcattatttaggtaataatgagaaaagtaaacgacaaatatattagacagcttaaaaaaattagagtgagacagaatatacaaaaaagagactggctagaccaaggagctcaagtaggcttcatagtagatgtcaaatgccaattttaatttattagcagtgattgcctagagttttttttttttatttgagaaggattctgagacttcattctttagcgttccatgattgaatagcaaggcattccttaggctttgggggagaaagtgggagcacaaatattaatttgccttgatctattatctaggagagggaaacacatgggctcatttccctactttgataattactgctgaagagatagctgaattaagcttttggtactttcaaataacacaggtccaatctcagggtatatttacttacgtgaatccatttattattgagatccctgcaatggaaccctacccagatgataaaagaatgaggtagatcttcatttttttatatgtaatgatctgtcaaacaagtgagtggaaaagcaaggtacaggaaaatgtgtcatgagttccatgtcctgtggacatacactaatagccttactcctcattataatgagagcatgtttcaggcacagaaacagccatgcagccagttgtgcaaagttgccaagctcccagctgcctgccctgaagagcacttttcatgaatgtttcactctagggagacatgacaatgttctacatgtaggattcactgaacctagttgagtttaaatgacaaaatgctatgattgtccaaactcaagacagtttcaaacacagactttattccaaagggcattggttgttggcactgctgggttcttatactgtgtttatggaacaataggagtgcctattttggcacttggaactccacaaaccttgaattccacttatttatcccatcaaggaccatttccaacaagcattatggtaatcaacaaagcctctaatggtaaaccatgattagatatccaaagcttctagctgcctgaggaggggggtggtgtggactttcaattatcaacctcccacctctggagagtgtgtaattcacattaagtttcttcaaatggtaatacttccagagagcacatgtccatccaaacacagtcatatgtgtttatagaagctttttaagacaagcgaaaacctgaaaacctagaaataagccaatatccaacagacatttgtttaataaaccaaatccccaacatgcatccttttataaaatggataaattgcgaaatggtaacacgattagatactacattacaatgagaaaagaacacatcactgctacagcatgaatgcatttataacaatcatgtcaaaataacccagacataaaggagcacatattgtatagcctatgcattttattatattaactctaaaacaggaaaataaatgaactgttaatgactcaccagggttttgcatgtcaattgaagctgacacccacatatacacatgtatcacaccttctatgttgaagtattagtataaaatagagattgtattgcaaccagaaaacatgaagttggtgctccttaactcttgtgttttgtggtagattcgacatccatgttttcaaagaatgtgtattagtccattctcatgctgctaataaaggcatacttgagactgggtaatttataaaggaaagagactttattgattcacagttctgtatggctggggaggcctcaggaagcttacaatcatagtggaaggggaagaaaacatatccttcttcacatggtggcatcaaggagaaggctgagcaaaaaggggaaaagccccttataaaaacatcagatcttatgagaactcactcactatcaggagcacagcatgagggtaatcacccccatgattaaattaccttccaccaggtccctcctatgacacatggggcttatgggaactacaattcaagatgatttgggttggggtatagccaaatcatatcattccacccctggcctctcccaaatctcatgctctcacatttcaaaacacaatcatgcccttctaacagtcccccaaagtcttcactcattccagcattaactctaaaatccaagtccaaagtctcatctgagacaaggaaggtcccttcctatgagtcagtaaattcaagagcaatttagttacttcctagatacaatgggagtacaggcattgagtaaatacaccccttccaaatgggagaaattgactaaaacaaaggggctactggccccatgcaagttctaaatttaatagggcagtcattaaaccttaaagttccaaaatagtctccttcaactccatgtctcatatccaggtcacgctgctgcaagaggtaggatcccatggccttgggcagctatgctcctgtggctttgcagggtacatctttcttcctggtttctttcatgggctggtgttgagtttctgggctttttcaagtgcatggtgcaagctgtcagtgaatctatcatcctggggcctggaggatggtggctttcttctcttaactccactagctgtactccagtggggactctgtatgggagccccaacaccacatttcccttccacactaccctagcaaagattctacatgagggttccacccctgcagcaaacttttgcctggacatccagcatttccatacatcctctgaaacctaggcgtaggttcccaaacctcaattcttgacttttgtgcacctgcagcctcaacaccatgtggaagctgccaaggtttggggcttgcaccctctgaagccacagcctgacctggtatcttggcctgttttagcaatggctggaggggtaggatgcagggcaccaaatccctaggctgcacacagaaagggaccctgggcccatcccaggaaatcattttttcctcttaggcctctgggcctgtgatgggagggtctctcatgaagatctctgacataccctagaggcatttttccccttgtcttggcaattaacatttgagtcctcatttcttatgcaaatttctgcaaccagctttaattccatgccccccattcccacgaacatggatttttctctcctaccacattctcaagctgtgaattttccaaactcttatgctctgtcacctcttgaatgatttgctctttagaaatttcttcttccagataatcgtctctcaagttcaaagttccatagatctctaggacaagggcaaaatgcaactaatctctttgctaaacataacaagattcacttttgctccagctccccaaaagttcctcatctccatctgagaccacctcagcctggactttattgtccataacattatcagcattttggttaaagccatttaacaagtctttaggaagttccaaacttttccatattttcttatcttcttcaaactgttccaactgttccaaactgccctccaaactgttccaacctctgcctgtatgcagttccaaagtcacttccacattttgtgtatctttacagtagcaccccacttctggtaccaatttactttattagtccattctcacactgctaataaaggcatacctgagaccaggtaatatataaaggagaaagatttaatggactcagttctgcagggctggggaggcctcaggaaacttacaaaagggggaaaagccccttacaaaaccatcagatctcatgagaactcactcactatcatgagaacagcatgagggtgactgcccccatgattaaattcaagatgaggtttggatggggacacagccaaaccatatcagaatacttctatcacatcacttcctctttatgttgtggttaacaattttgagttaaaaccagactgctgctttgagaaacaaaccctgactatagagaaggcattctgtccatgtcctaagggaaatgtttcgttcagtttaaatactctcattctcaaaatgtggtaaaagtgcacccgagagtcactggagggtagattatgagaaagacccattaatgctgaacttgaagtaccacaagtgccgaaagaggggaacgagcacctatcctgggtagatgatggtcagatatatttccaaagccagagaatctgggtcaattgagaaagagggaaagtgacagatatgcaaatttggattgatattatattaatgaattcttgattatccacatggtgacctacagtaataataaatgtacacacactgtaagttacataggcacacttttaaccatccccacacttaccagggaatgttagataggcagggtgaatgcaaggtgagtgagatttctgatggtgcagaggaagaacgccaaggttgctagatttcttgttttcttttctactgagactcctcagcagggtatattttgaggtaggtatggcagcaccgtgacttctgtggctttccctatgaagaagttgtaatgtgtaatattttcttctaagaggtgacacaattatcagtcttctagctatggttggttaagttctgataccttcctgttggggagaaactgtcagaagttgtgttttcatctatgttctgaaagtgccttatcctttctagtgttggaaagattgacgcaaaaataaagaacccacaggaaattgacaccgagatttctcaggactttcttgctaaccttgcttcttcacctaatgcattaggagaccaaaaaaagttaccttgtcattttggtttttgtttttatttattttactttactaatcttttgaagaatcttgtacttcacgtccccacattactgtggttgaaggggaacctttctatctgaaacattgctcgtgttcacttgcacatgagattgaaacaaccaccaaaagctggtacaaaagcagtggatcacaggaacatgtggagctgaacccaaggagttcctcgagaattgctttgcatgattgtgttttggagttttggccagttgagttgaatgacacaggatcttactttttccaaatgaagtgagtaaccctttcttttcaaaatgtatttcacagccctcttgtcctttgttcagcaactcaaatatgcagtaatctgaaaggtcagataatcaccacatccttttctttcctactcttcctatgacatgaaatacattctttgttatggaacagaataagtttatctctctctgcttattttcttagtgaccttaatgaaaggagattactttgataggatttccttttaggggatccttaccaatgacaagtgacgattgcatgaaagtcagttttaaaattcagctgctcctgttgtctacatgcccccagtcaaatgaaatcagcagctcggacttcacgataatattaatgtgttgcgaatggggcagtgtcagcttcctgggtggcatccctggtggggagcagggatggggttgatgcagaaacaccctagtccagtctgcaggggctcactgggagccaggtggcagtgctagtggaggaagtgtgtgtctggcagccaatcgcaacccacagctggcggcagtgagagagggcaacacggaagggctttgcattttactcatgaggtggccctagattgtgccagaatactcgaaattgggttgcataacttccatgaaatgagcacagccaactgaaagcatcacccacacttaccgaacatgtttctttttagatgtacctacctacatatgtaggtagttttatagagacttgagactgacctgtaagaaatagctcagggccagctgaaggtgatggtgtgtagatttcatatgtagcagatttcttttagaagcacttctagagtgagtcctgatcattatcaaccatgctgttgagagcagagtgagctaccactgtgaaaccttggtagcacttctgtagttttgcaccaaatcaggtcatttttgtttgtttttatacataggaactcccaggcatcagaaaaaaattaaataactcttttgataaaaatcagtacatctttagatgaccttttaagagtgataattacagaaatgggtcacaactgggatttttcataacaagctaaggaagaatgaatactcacaaatggggtaaaggaaaaagaacaacaaacaccgccccccccaccacaaacttccaactcctgattgaatgaaggcacaatttaaaggaataaagtattctggacaggcctgagagagcacgttgagaggaacagccaggcatctatgatcatcacttggagataacagaagcaaatggcattggccatctttctgatacgggtagtagagaatacagcctggcttaggaagcaacaatggaagcaagagattgaggcaggatgtcagagagaggtgtggagagacagggtagcagataggagatgctaagaaaaatgaggtgtcccagagtggatattggagactgatcactatgagagtaaagtgttgaggagagaagcagctttgacaatggccttgaaaataaatgggattctacatggaagcaggttgttttagacacccaggagcatagaagatacagacatattcaaatatagcataattagtaagcagtatttactgcagatgtgtgtgtatacacatatgtgttctaacttaggtgtgtaaccctttgcagtttgatgtgggatctatcagtgaacagactttacacctgaaaatttcccgttagaacagtaattctttaatttttaggagtacattgctaataatcaaatgccactgaggactgataatttaatcctgcagtgaaaatcactttatcccaccaaattttaagaacgaaatcaactaagaaggaaggggatacaaaagggatagttttcaatgatagagatgaagaaatgaaggtagagggaaatgtacacacagaaatctaataaaccaatcctaggctgacaggcagcaagttcagcttggtgagcagcctcagaagtgggggctggtgtttatcccctggtgtctgtggacaaaaatgagtggttttcataaccaggatgggctgggcctgcagcaggaaagtgtggtcacagctttgggtcagttggcctcagtgttaaccctagccttggagctcctggatggcaggtgcagtgtgttgttgattgtttcagtgttcccagagcagtgtcctgcacatggagtgtcatcagtcctctagcatttgttgagtgttaggaattgaggattacagaggtagagaacaatgtagtctgaaaaaatggggatattcatgtaccctattccttttaagcaacaagtcatagagatccagaaatctctatctctccaattcattgaggtcaaagttggggagacattacgaaaacacacttgagaagaaggtgctgccaatgggatcctgaatccatttcaagagccaggtagctctatcatgtcccatggccatggacccactgcctataactgtgacaacagcctgccacattctccagtcacggccaatcttttataaattcatgcccaaggtgaaggggccagattcattggattgtgaaagtgtagaattgtgcagagcacttctggcctctggggccaaatagatgtgcatttgtatcctggccccatcttgtagcaagtgtgtggcctgagtgagttgtttaacctgtctgagatttagcattctcatctgagcctaaggaaaatagtcatctcccttgcatgtacatagtctaatacctggaactcagtaagtgttagtcttttcttccttctatcctattgtagacctaaaggggaactggaagagcctaaggtgggcacaaatgtgtcaggcatagaggataacttaaaaacacgcatctgctgtatttagcaaataaatctatacatcacaggtgcagtggaagcaaacatgaaatttgaaacattttctctttaaaatcttcatttaaaaaatactgtattgttttccaattccagatcacctttttttgttgttgttgttgttgtttttttgagatggaatttcgctcttgttacccaggctggagtgcaatggcgcgatctccactcactgcaacctccgcctcctgcctcagcttcccgagtagctgggattaccgtacccagctaatttttgtagttttagtagagacggagtttcaccacattggccaggctggtctcaaactcctgacctcaggtgatccacctgccttggcctcccaaagtgctgggattacaggtgtgagccactgcacctggcctagtgatagtcctgatcactaatttctgatcaggagtaacaacaactataaaatctattcacactcacttttggtcagtaaggcatttaaagagctaattcaattacactgagggcagcaactccagactttggtttattcaacagtaaaagaaggggattggaagaagttgccttgagaaacaaaacctaatatatatatacacacatttagaaaacaacatcaggagtttatagaccttttgaaaccaaagccaccctcccatcctgggccaagactctctgaacttatccatcagtgaagatcactgacattgtaaagatttgcttttctgacatccataatatattgtctgcagtaggatatgtgcgtgtgtgcgtgtgcatgtgtgtgtctctgtgtgtagactgcttaggttttcatttattaccccctgctcccatgacagtttttaaagttcttgctcttctgaatcaagcggaggcagagcagggtttgcacatcaatgaatcaatctctttaataaaaataaaggaaaaatattgtaactggttactaaagggaagatgggtgatatttgcaaagtttctgtagcattataaaatacctttacacttttattccatagaaattatactcagaaatggaaattaaatgtcatcagaagaaataaacacagctgtttcactgaaagacaagtaactagtaaaattgtggaagttaaaaaattttttcagataacctgtgaaaacagttactatcaaacactggtcaacagcacatcattgtataaggtaatgcttttataatattttaactttaagacttgatggaaaagataaaattcccaaatgaggggctgagagctaccattctggtctcataacaaataagctgcctgatcccacatggctcacttgccctgtttgagccaagtatcctcactggcttgttgtcaagagctgatacatagtattaaaatatgttccacagtagtttccctggatttggtgttcaataaatgatcacagtttcttctcccacactcttccttcattttccttctctttcgataagttagtttttaggaatgctagtttaaggatttccattttctcctgtcacatgtacttaacatgtaaaactcaattgtatatgtttttctgaatatattagttcattttataaaattggaaatggtaatgcttttataatattttaactttaaaactgaaaaatgaagaaagcaaaaatcactcataaatccatcacagactttttttttctgtgaagcatctgctttttaaaagtggtatattttatttttttatgttttttcctctaagaattacgttgtgactatcccttcacatctttaaatgatcttctaaacatgggctttcagtttttatgtgcctggtttcatctaactaacccccttgtttcgtctaactaatcccattgttattggacatttgtgaattgcctatttttcactattatttaaaggctaaaatgaataccatttccacaaatccttgggtgtttatatgatttgtccttcaaccaaatccctaaatgtagaattactggatcagaggctgtgagcatgtttttatgtctttttcctcacactatcaaacttgtctccagggagctctgccaattttaccccacacttgaaaaaagaatcccaattttttgtcacctccacaacacagggaaataatggtcccagaatgtttaaaatttgatatgaaaaatttctaaaactcctagtggttttttcacttttcttagtaataaattaaacttttgtatatatttattgcatcttactgcaatcaggcaattttgtgggttgcctgtttatttttttctgttttcttcagttggtataccttttacctgttgaattttaaaagctcttatacaccatggaatactatacagccataaaaaagcatgagttcatgtcttttgtagggacatggatgaagctggaaaccatcattctcagaaaactaacacaggaatagaaaaccaaacactgcatgttctcactcataagtgggaggtgaacaatgagaacacatggacacagggaggggaacatcacacaccggggcctgttgtgtggggtgggagggtaggggatgtatagcattaggagaaatacctaatgtagatgacaaattgatgggttcagcaaaccaccatggcacgtgtatacctatgtaacaaacctgcacattctccacatataccccagaacttaaagtataataaaaaaaaaagctcttttagaccacgctataggaattatatatacacatacatagcgtgtgtgagtgtagtgtgtgtatgcataaaaaacatacgcactcccatccacacacatacgcaacacaaattgtgtagttcaggggtccccaatccccatgccactccccctcactaacattaccacctcctgtgagatccgcagctgcattagactctcacaggagtaagaaccctattgtgaactgtgcatgcgaggaatctatgttgcatgctccttatgagaatctaatgcctgatgatctgtcactgtctcccatcacccccagataggaccacctatttgcaggaaaacaagctcagggctccactgattctacattatggtgagttgtataattatctcattatatattacagtgtaataacaatagaaataaagtgcacaataaatgtaatgcgcctgaatcatccccaaaccaaccattccccgctcaacccctgcccaccctggtccatggaaaagttgtcattcatgaaatcagtctctgtgtcaaaacggttggggacagctgatgtagtttatatggaataacaaatctgaataatatgactctgtcgtggaaactttaaagacctataagagagtggtctgaacagaacttgggaaatctgaagcgagtgatgataatatccttgaaatttttgtttgtgccttatgcttgaacactgtttacttgtgatttccaaagacagctcttatctgaaatgttttctaaacactcgaatcagtcctgagttgactttattctatttcccatcaatgtacaaatgtgttacagtatatgtaaattagtgaggcttggtgtgctgagttttaagaaattccgttcgggtgcagtggctcacacctgtaatcccagcactttgtgaggctgaggtgggcggattattaggtcaggtgatcgagaccatgctggctaatatgatgaaaccccgtctctactaaaaatacaaaaaattagctgggtgtggtggcacatgcctgtagtcccaactgctcgggaggctgaggaaggagaatcacttgaacccgggaggcagaggttgcagcgagccgagactgggccactgcactccagcctaggggagagagcgatactccgtctcaaaaaaaaaaaaatgaaattccaaagtgcagctatttaaattatgagcattggtgcaccaaggatatttagctaaacaattgaccacagggctaagtattctaagcctgttgactgatcatgacttcacccgagagcaaggaggctaattcagtagataattgattggaaaggaaaatgaagagtctctgatcttttctatagcttgaaaaaattagtttggctttataaaattttgacttatacataaataatttactgacgtgaggtacacatgtgggtgcttcacgggcacattctatgcacaatgggtctagccccagtggctgccagctctgagggagaagtctgtgggcagtaggttctccttgcttggtgtttgcagaaacagtgtccaatggtcaaggatggccattcagcccccagacatcccatgtggtccctgcatggctctgggacctacctctgggtgtcagatgtgctggattgaagaaagtggctttattacaattagtattaattcctgtgacatgtatggaaatgtgtgtgagagagagagagatgtttgagtgtacctatggatttgaatattgctgatgcatttctaatcagctcgctggcttctgatggagggtgtcaaaggtgtgggtggtctgctagctactcattctctgagtaattctccacccatcccactatccaccccttggatgcatagtccagaatacacaaaattggactgaacatgtatgaaatagagttgtgactcaagcaagggtttttgaagtagtgttctctctctctctctgtctctcgctgtttctctctctctgcatgtgtgtaaaagagagagatgaaagaatattgatgaaagcagctacagtgctcatattgccccatgctctacttcccagcatatattaataatgataatcatgccaacagcaatgggatcgcatttaattgtttcagtaaaagtagtaccaagtaactgggacatatgtccaggaattgctactttccattcttttttcctttttctctaaagatctttaactcaaaaatttggatcactgtaatatcaatttggcttttacttaaagtattttaacttgttttattaaaaacagaactgtaaaaagctactactggagaacaataaaaacccaacgataaagaagaacgccgagtttgaagatcaggggtattactcctgcgtgcatttccttcatcataatggaaaactatttaatatcaccaaaaccttcaatataacaatagtggaaggtaagggaaatcttagaattgggaagaaacagacgtattttagtaaaatggaattttttcattcttcaaaactgtgtaggaattgagagtccacttagttggggttgtgaccacaccactagttcaaatatgatggtcaaaatcttcattctggtgctcctctacttggctaaataaacctttctttttggcaggaaatgaaaatctgtatgaataaacctcacatgagtcagctctctcttatatatgaaatttgagtaaattgtggaatcttttgttgttgaatttacattttcactttacaagtatttagtgaagatatctatactcaataaactgtacttagcacaaggaggcagggaagcaaggaagtatgagatgaagtgagcactgtactattctcaagggatttgattctaatcaggagaggcaataagctacataaaggtgtatgaaacagcatcatctgtgaggctgcaagagtgcagggggaggttggaggaaggacagatgcaggaggctccatttgacctgggtcttggagggggagcctcatgaaacagtgacctgctgggggaagggatctccactgggagagtgtaaggaacactgatgtgctggtgggaggggagggatgatggacccaggctgtgtgtgatggaggaacagaatcctgggacattaaaggtatttaattaaacctcacccagtgaagatattcatcataaggcacagccaatgattgatcatccagtcccttcttgggaactatcaaggaaatgaccaaatcacacagcagtgtagtccagattttaatatctgattgttgaagtcttttttttccattgagtccaaatatcccttctcgtagcttccaaccactgattttgatttgccttcaagaatttcacagattaaatctggctccttcttaaaatgacagctcctttcgtgatttgaagacaggttgcttatccagtctggatttttttccccatcatcctgagaaactggaaactgtaacacttgtgtgggtggcttgttcaacaaaatctgtgggctcacatttgctacagcctttgctttagcaacatctttcttcttcactacaaccatatagctatatacacccacatgttgccacagtaacaaattatcccaagtttagtgtcttcggtaaaatcaaggttttgccagaattgctttacttctggaggctgtaggggaaaatgcgtttcttttatttttttatttattttatatttttgagatggagtcttgctctgttgcctaggctgcagtgcagtggcgcagccttggggctcactgcaagctccgcctcctgggttcacaccattctcctgcctcagcctcccgagtagctgggactacaggcacccgccaccactcccggctaatttttatattttttttagtagagacggggtttcaccgtgttagccaggatggtctcgatctcctgacctcgtgatccccctgccttggtctcccaaagtactgggattacaggcataagccactgcaccaggctggaaaatgtgtttctttgcctttgctttctccagcttctagagaccacttgcatttcttggcttgtgccacttcatttcagagccaaacacatttgcttccctcacctcatctcctttttgactctgacctttctgtctccctctgatgaggaccttgagacagcattgtgcccacctagataatccagggtgatccccctatctcaagatccttaatttaatcacacctagaggttccttttgccatgtaacatatcgtattcacaggaactcaggagtaggatgtgggaaacttcagggtctattattctgcctgccacagcccagaacctgggaaacccataactgaattttaaactcaaaaacttaaattctgtgtataatcatctaccctaaactctccaactttactttcctacatctatttttaatctcatataaatctctgttactttgatactttcagaacctacaccctctttcccaccatctttgctttctgcccatcagcagctctttccttccttctttgatgaagctgtaggaatatccattattaaaagggtgcttgttatgggccagggatagtgccaagtactggagttgaatcatgtcatataatcctcacaacagctctgtgagactgtggccttgggtgagttaatttccttagttcctctctgcctcagattcctcatcatgaaatgggacagtaatggttcatccctcgtagggttggctgacaatgactgagtgagtgtgtgtacagctctaggatggctctagggacagtaagagttctgctgtaatgaccatctcccactgctaggttcccaaacctcacctgcagcacaagctattcttctcccataattgtccatcttatttttcttgtcttcttggagaatgtcaactgagtctctcaggactccactcaaatgtcgctcctccttcatgcccccatggcctcttgtttgtatttctgattgctgtcagaattgcaatacatgtgtgtctctgtcaataacttgaaaggtttctggaaaggtttgcactgacttctgttcctcatctttgcatcttggatacctacaattggcacttggcacataaaggtgctcattacatgcctgttgtgtgcatcactgagacagaaacaactcctttgatgccacatacaacaagaagtctagacacttcaccatcctggctatttttctttggatttggcaaagtttgccacgagtctacagaaattagagcttggagttggggaagacagccaggaggtgttctgacctgtgttgaggacagagaggttctgagctcgtgccttctccatgttgtgtctttattacagtccccttgccttcacagatggagatctctcagctgctacatagtgactgctgtagtggtggaaaggtgtgatacctctcctccccatcctaagggtcatggcaatgttcccataacaaaagacagattaacaaggggcaagcaagttttatgtgacatgggagccttcagaaatgaagaccctggggccgggtgtggtggctcatgctggtaatcctagcactttgggaggccgaggcggatggatcacctgaggccaggagttcgggacaggcctggccaacatggcaaaaccccatctctactaaaaacagaaaaattagctgggcttggtggtgggcacctgtaatcccagctacttgggagactgaggcagggagaattgcttgaacccaggagatggaggttgcagtgagccgaggttgtgccattgcactccagcccaggtgacagagcaagactcggtctcaaaaaaaaaaaaaaaaaaaaaaggaaagaaatgaataccctaagactcagggaaacccgtttttttctttttaaatgcttaggttctagaagcatggacagccatgtagaaatgtgactggacaaaagggtatgacctaatgctaatggactgagtggggaaacccagcaagacctgtccagattcttcttggcctctctgttatatttccttttcctgggtagagggcagagggtcttaagacttactgtcagaccaaagaaggccaaagaatttatagccaactcctagacagaaaggcaggagaaggttagagtcatgcttctaggttctatggcttactttggggaaaaggattctagtttttatgatctgcctttgggaagagggagtctggtttctgtgacttgctttggggagaatggaggcatgaagcaggagggtcagagagatcttgctttttgaggctgctttgaggccttccaatgtcgttgagtttaaagtactcagcctgccaaaacaccatactttgggactgtttttggagcccaggagttccattgccttcagcttgtgctcgtgaatcacagtcacctgaattcctactgggcatctgccactttcctggtcttatgctctggctgatcgggtggcgtctcctcctactgctgacaacctctatgccattttgactctgatagcctcctaggtaggctggccatgtcaagggcatgcactaagatgttgtcttccttccatgacctacatgggactgcacccttcactttacaccagttgtgcaaactcagggctgatctggatttccaatgatataatttgagtgttagtagacagcatcctttgctgaagatgtacttcacactgccccttctcaagtctcccatgtaagtttctgggggaaaaaatggatccagagaaaggtagtcagtagcagttttccccctcacaccgaaattgcctcctgccctttgtctttgaattcaagccggtgttgcttcttactgtcagacctgagagttagttctttccctggatacatctcagctcctcctgcctgtttgccaacattccaggcttgcccagagactccaaatcccaggataacccagacctgactctgaactccggagtccactgtgctggtttcattctcctgttcttgctcacatatctgcccactgcattctcaactgctcactctggcactgcactttctgagagggctcagggaggtgtgggagctgcaggagcactcctgagtctcactgtactccactcaaccaggcattctgcttgctgagcacctgcaagtcccagaagggatgttctggacattgcttgggaatgcctccaaagcagtggggctactagcagggaacagtcctggtcatgaggaaagttaccaatgaggatatcagggctaacaataacttgactatgcaccagttcaaatctatgaccgcagctgctcttagggtttgcagttgccagctgccttaagcaagagcctgttgggtgatgacttacttcccaagcatcaccagatggggactgagggggcagaatttatgtgcagtacttccagtcggggtcagaagccactcaggagcagaagtagaacttggcctacaggcatgaacttaacagcagggccagggccaaggtgaggttcctggggcacaatattgaagggacactgctctcagcatcctgcaagggaacggtgggcacatagagtgagggatttgcttttctcaacctgtcttggccctgcaacctgtaaatccatcactggccagctgaggaggacagatggagagaatcgagacagggcagaaaggctcttcccagtgattttgcatggtttgactcttgcacgtttgatcatctgagagtcaggctgcagtggatgggcatcttcctctgccttttagttgaattgagcagaagctgcagatctgagtgagagaaaaccagatacaaggtgctttcaacatctgtgacctttagttaatgcaaataggactcaagtgaacgtaaaccagtaactattggaatctttgttacatgaaatgagcatattatcatagatgcttgtcataaagaagctcaaggcaacactaatacatttgtcttttcttttgtcacttctagatcgcagtaatatagttccggttcttcttggaccaaagcttaaccatgttgcagtggaattaggtatatttcaatatacatatattctgcatttataagtaggggacataatagagccttccaagcgtaaatatgattcattattgaatgacactggatacacatttcatatttactgaataacattacaaaactaagaaaagagtgccattttttgaatgttgccacttttaacctgacttaaaagtggcaacattttaaagttcaagagacagtggaactgcctgtggtctgtagactaaggtttttgttgtgctgtgtgtggcttgtctttaactctctctatggtcatttctaaatatgaaaatttaggccgggcatggtggctcacgcctgtaatcccagcactttgggaggccgaggcaggtgaatcacttgaggtcaggagtttgagaccaacctgaccagcacggtgaaaccccatctctactaaaaatacaaaaattagccaggcatggtggcatgcacctgtagtcccagctactcaggagactgaggcaggagaatctcttgaacccaggaggcaaggttgtaatgagctgaaatcacaccactgcactccagcctgggcaacggagcaagactctatctcaaaaataataataataataacaataataaatttaaaaattccgtgagagcactctggagagatgagtcaaactaattttgtggtgtgaatgtttgattaattgattcactttgaatcaattgactgaattgattgtatatttggagtttgtctagataagtcttatgaatcaacatgtccaattgagtaatttctttcaaaagagaaaggaaagaaagaaaggaagaaattcacatatgctaaatatgctaagccaggtatcatgctaggtcattgaaatatattgttgaattaaatcctccaagcaacactgaggcatgtattctcattttatgaattaaataattgaagtgcaaaaaggctaagtaacttgtctaaagttaaatcactaaaaagtggcaagtctctgtttggggactttgcttccaaagtccccaccttataaccacagttggggtcacagtggtttatatgaccacatgggcccagtgcagctgggtcctatgccatttgtacatgaggtttacctgctttatatttttatttatttctgtctttgtctttcttatttttttcttctactcagtggggcttaacttgtatcttttgttctagtttgttgacctgaagagttagataattaattttaattatcctctggtagtatataccttcaaactccaagtttccctgtaaacactactttagctgtttctcatattttcattctattcagtttaaaccattacttaaaatttcccttatgatttctttttccaacaaaaaaaattggtatttcttaatttccaaatatttggtgaactttctagttcttgtctcttattcatgtccagtttagattcattatagtccaagattatacacagtgtcatttcaaccttttggaatttgtagtgacttacttaaggcccacagtatggtatatcttgctgaatgttccaagtgcatttgaaacaaaggtatattctataggtttttgttttattattctttaaatgtctatttggttaagttcattaatggtgttgttcaaaaaatttatatcctgactaatcttttatctgcttgttccatgtgttgctgaaagagatgtgaatatctccagctattatggtcaatgtgtctctatctcctttagttctgtcaatttttgtcttacatagtttggagctatcttatatgcatacacggatttatgctcgttgaattaacacttttatcattatgaaatatctctctttatctatcataacacttcctctctcaatgtgtagctctgtcatatgaaataatcacacaagttttcttttgcttggaattggcatatttgtctttttttaaacatccctttactactaacatttttttttgttctatacataagtgtctctcataaactgcatgtatttgggtcttttttgaaatatggtcagtatggtgtttagtccatctgtatatttaaaattactgttacagttgctatatcatatatgcatgatatacaaatattcaatttattctttttaaaataaattacactttgttgaaaatgaccatatttccatccacttgtttatcttttcctctattttctttcaaacagttacagtttttaatctgctaaattcagcatctgtaggtctgcttctattagctgtcttttctattgattatggtgcacattttctgtgtctttgtatgtctcttaactttttattgttgttgatctttatgtatcaaacaattaaagtgaatacagtttgtgttattttttcttacaagtaggtagcctgagagttgagtatctcagttgactcagaattgagttggggtggctgggatgtaggtatgttcactccaatctgtcttcatctctgatagctggtgagggagggggtgctgcagtcatgtgtttgatgcaggcctcttctctaatgagacttgctctcctgattaccatgagactgcaagtgatatcatacagcctttacatccttttacgctgtccgagcgcttagcagtaattctgcaagcctgtgcagctgccgagagcttcactggattttcttgtttctatgagactctttctgttaattacaaaccaaagcaaattcttccatggaatgaaatggccacctatcttagctcaccctagaaaggatccttcttaagtacgcttgtagttcaaaaatttctctttattttctctgtactttgatgtctttaatgtttgcttaatttaatttttttgtgatttatccatttggtttatctagaagtctcagtgagagtattgtcctgatgctacgaaaagaaagtacactgatcactctaagttttaatagttgattaaaaaataaatgtttaaaaagaagccaaatcatgttttgatgatgacttgtaattgctacctatttcttctgctttatatattttgttttatttaaagcaaggcatatttattctctttctgggatggagcaccacgttttgctttaggttaacatacattgattatattgttttgaaacttttaagaaacctgagtttcaaaaatcagaactttagttgccaacttttaccaggaaaaaacgtaaggctcaactgctctgctttgctgaatgaagaggatgtaatttattggatgttcggggaagaaaatggatcggatcctaatatacatgaagagaaagaaatgagaattatgtatgtatgtgtaatatatatgtcatgatatataccatataacaatcatatatattatatataacatcatattaaaaacactgggtggctgatgtgtattttgggctagtttaaattataattataatggacatattttataattatagtggccataccctaggtggacgcattatgcagaaatgtattgccaagatctaagctggaaaagaaggtccatgagaaggccattgagggtatttagcatcaccttataaagtagcacttggtcagtcaggatccgatggggatggggattttacttagcttcttagaaaagggcagttgcctaggccaagcttttttttattttgaaaaatttgttaagttgtttatttttctaatgggccaaaaaggctccaaatggcatgcatattgatagttaaataagcctatattcttccattaaggaatggtcaaacttataaaaagaatcagtctaaacatatagtcacctaagcttttctgaatgactttgggtcatactgtaagtattcattattatactgatacactactcagggtctagtgagtgctgagcctaagttgtctaccacctttgctgcacttgttgagttttttcttctgctttttacacattttttggtaccttctttgttaccatgcttgcagctctacattcttgctgacacttgtctacaagctctttacaccacaaagtctggcttcttgcccgggagcaggcatgtggttcatgcccactacatgttgaattcatttgaaatttgtggatctcctgccatcatatctcatcctcagccactggcctccatttgagttttgtatttctccctttggataatctctttctaatttttagaggggtagaaaaccacagtgaatttcttagaaatgcagcttaagctacaaaagcagagaggtctttctttatagttgggtgcacacacctttgatatcatctgttttgtcctctcaatggcctcctgtgttttacttctggatttcattggttttagatggttgttatttctggatgggtgacttaggaaaagaattacattccaaaatgtacttgaggcagttggaggctacagtggggctctgtgtcccgggtcctagatatccctgttgctaggaatgtgggcacatggggcccatgtctggctgtgttgactggtgtagctatcagagcctgtcattggtgggggaagtggatgtcataagtgtttacctggcatcaaccacaggacaacttgaatcctttaaggaagagaaaaagaacgtgctgccagtggctttctcaagtcattttctgacactcatggaacaacttaactggcacttctcatgtgcctcggggtgcttgagaacagtgttatgttttttaatgctgaacacattaaaccagtttgttggattccatggacaaatgtaatacgaatctgcatctatgctaaacaacttacagccttgtcataattagtgggaaccactctgtggaaagaaccccaagttgttaggaagagagaagtagagaaaaataattgagagagaatattttcttatattttcaacttagcatcatgatcttccagccatttaaacttcaggtaattgacagcaccattcccaaatggcctcaggagggctgtttctgtcagttctgatgctccacggaggaggggacgtttattgtagtccatgctttaagagtactggccagaaagggaagaaataatgcaggcaacatcacagctgccttcaagcattttaaacatgtgaattcccctctcaagggtaacgaacagagcctactgctaaattattttgccctcttacaggactccagaaggcaaatggcatgcttcaaaagtattgagaattgaaaatattggtgaaagcaatctaaatgttttatataattgcactgtggccagcacgggaggcacagacaccaaaagcttcatcttggtgagaaaaggtgagaaagatttatttttggaagttttgaaacttagctcattgctactgagagacatttcaaagatggccactttctcattttccacaccagaacccagctcctgagaggggaaatcagtcacctcatgtcacaggcattcagtggggcccctctgtctcatgatgccaagcagagaatgaaaacagaactcattcacctgctctcacagtcatattccatcccatgtggaaatcggggggcctgaggcttggagatacagatgctgagagtgaggctcatggggaggccatcaggacaacccctgcacccagcactgcacccagagcagccagaggggagtttgcagatctgcgtggggtgaggccagtgcaaacttggtgtgactgctgctccagcctgcctcagcagggtaccaggctcagggtccttgtgtgtgctcattcattcattgcctcctgaacttggcaagcaggccattgatagccctgatctgtgggctcttaaagtttttcagtgctcacctgatggagggccccagggtcgccatccctttcctccaccaaagtagcacagcccagggccttcagcccagtagctgctcagaaatggctgtgactggagccagaaagctgtgatttccagttgtcactactcattcactgttcattcccaggctccaccatcaactccctggatatgtagagaaaggtcaagatctgcaagagagagagaaagggagagagacagagactaacacacccagagacagatggagacggagagagacagacacagagagaggagaaagagagatacatgagatggagggacagagacaaacagacaactctagagagatgaagacagaaagagaaagagaaagagagacagagacacagagagacagagaaatgagagagacagggagagacacagagacagaggaacagagaaagagggagatagagaggcagagacatgaagggatgcaaatacagagagatgagagtgaaacagacagagagacagagtaagggagagatacacacagacacacacaaacatgcagagacagccacacacacagactgggccttggctttgtgagaaacggaaggagtgggacaggaagagcacaaaggctggaaaccccctccagctgggctatcctggtgcccaggggcagctcccccagcacacatgttttagagccgcctctctaccatatgcactcataacaacagctcacatcccatacatgttaattacatgacaggatctgggtgaagttcctgccatgatctcatccagtcttaacgacaagctttatagaggtgaagaaacttgcccagggtcacacggcaggtgaaggtattgaaactcagacccgattaaatctggaatctgtgttcttaccttctgcagggcttgtcgcctgtggtcttccacccctgtgtgattgcctgtgctgtggtccactcacttgtgagggagtggggctcaaatctttgttggaccatcacctggccaggctttcctggggcctgctcaccaccggatcacctctcctttcttagaacagggcaggactgtcctattcctgccctagacgcttctggccagtcaattctcctgctgctgctctcacaaatgtaggtttagaaattggggctcacaacccaccatcaccccgtgccaatgtgtgcgtgcgtgtttttgcaaatgtgtgacacagttatgactatgcagtcctttccaaggtacaggagccccagaccctgagtctgctcagagttcactattaaacaacattagctgcttgcctgaatcctaaagatagtagaaagatatggaaagataatttttaaaaattgcaccaagatggcaaaagttttaagcacgtttatgctcattgacctagagatgcccccaccattacaatctattttaagaaagaattagaaatatggataaatgtatatgcctttttgtatatgtatatacatatatgcatgtatatatacacatatttgcaaatgtatatgcatatacatacaaggttacacatttatataaatattatacatgtatacacttatacatataaaatgtactgcaactttatgtctacttactaaaaattgcaatcaatctaaatattaggatattatgaattataattttaatgacctactgaaatgctcataatataatattcagaaataatgagtgattaccatataatctcagttaactaaaaagtttaagagacaaaaagaaaacccagaaggaaatattctatcatgttaacacagccttcaccacattgtgatttgttgttaaaaattactttattctttttattcctctgtattatctcagattgtccataataaacataaacggaatcaatctagaaaatgtatttttttccaaatgatacttttatacaaagaatttgctaaaattccaagagctgtgtgctgtattaactactttttgtgtaatatttcatttaatcttccccaaaggagcagccttgtaagtgaagcagttagtatcttcattttacagatgaaggtaccaaggtttaagggcattcacgatttttcctacaatacaaaataattgatggagcccagctgcaaacccagacaaatgtcaatccagtgctctctctcttctctcaaaactatgcacctcaacccacttgctaatatttctgtgagtccctatgtgtttcagcctagtatctcttcaccccagaaatctgatttccacgggtacggatagaatacattactgtgtaatgttttcacttcagttctctaaatatccgtgtacacatttttattctttaaaaatctgagtagaaatatcactactccagactaaaggcaggaatgtggagtcactcagtggaatgtgtcagcacgtgggttggcaactactgcattagtgttagcagtaaaaatggacaagcacgtgatgatggacaacactggtaagatttcttgattattttcttttcctttttccctttcttttctagcagacatggctgatatcccaggccacgtcttcacaagaggaatgatcatagctgttttgatcttggtggcagtagtgtgcctagtgactgtgtgtgtcatttatagagttgacttggttctattttatagacatttaacgagaagagatgaaacattaacaggtaacacatataatgctggaatttcttaccttatgttctcattaagaaatcagataaataggcattaatcttcatcttattgtgatgatattgtagaattaatctgtgggagaggttttctatgggaaatattgttctgcctgtaccatccattatgaatgttgtctatgtcttcttttcttgtgcttacttatgtgttgcccaaaattgttctgattgtctcgtgtatgtatgtcatagcttcctaaatgccctgggagatgctcgggcccaggaactgtatatctgggtgtctttgtgcatgcatcacttaggtatctttatagtacatacactcaataaagttgctttaagttagattgaattgtcctatcgctcattatttcaacctggcaaaggaggcttacataatggacgtgtaagaacccccagctggccgggcgcggtggctcacgcctgtaatcccagcactttgagagtccgagacgggcagatcacgaggtcaggagatcgagaccatcctggctaacagagtgaaaccctgtctctactaaaaatacaaaaaattagccgggcgtggtggtaggcgcctgtagtcccagctactcgggaggctgaggcaggagaatggcgtgtgaactcgggaggcggagcttgcagtgagtcgggatcgcgccgctgcgctccagcctgggcgacaaagcaagactccgtctcaaaaaaaaaaaaaaaagagagagaaaaagaaccccgagctggaagccaaatgatctggaatcatgtctcctagacctgccagtttttatctgctactatgtcgacccgctggctctatgcctcagtttccttatacttaaaggtgaccagaagtcctcaagtttccagataattactaatttaaaggaagtcagtctaattcattgcacttgattttgttttgcatgtatgtgtttgcaggaaaaaaaccttcacagagttcaaaacccaaaatgtctatgaaattatacttcagtagccccccttccagcctggtcctggatctatgattcccacccctcattgatagcacatctgaccaaatatcaatacagattcttattacacacctccttttaaaaagaacaaatcctggcttaatatgcgcactcttttcaactttgctctcttataccttagacacacttgcatgttactttataaagcagtccatcattttttagggccgcacagtattttatttgtgcagagctaccactgtttatttagtctccttttgatggacatttggcttgtttccaatcttttgttattataaaaatgctgcaatggacagctttatacattcatcgtttcatatgtatgcagtaggtctgaaagaaaaattctccaaaatggagtttctagaatacaagaaggagacacagccattattttgctagatactgtcaattcaccctccctactgccttcaaaagatgacagcaaattttttcccataaccttacccacaaccatttggagttgtgccaatctgataggtgaaaagttgtatttaagtgacattttaatttgcatttcccttactatgcaagagaaccagcaacttttcatttgcataaggctcagctgtatttcctttctcaacacacccattcatatcttttgcctattgttccatggggcaatggctttattttgcgtatttatttctaggagctatttatattttagggaggttagcttattatctataatatgaaatgcaaatattcccaggctgtaatttgtcttttgactttgcttgtagtggtgtgctatataaaagattttttgaaaaacatactcaaatgtatcttttatggtttctggatttgggatcataagcaaaacagccttcttaacctcaagttatacaaaaattatattagttcctctgagatttttataggtttagttttcacatttagaactttaaattgaacaacataaaattagcaaggttagtgaatttagctttgagcctgcatgtgcatgtgcgagtttgctatggggagagatgatgctgtaacaaacggggaaatctgtatttgatattttctgaatggtctctgtttgcataggccagtgtttgtcttcaaataaacattgactagctcctctctttctgactttctggagctaagatttcttttttccttctccagttgtgtttgacatgatttgcggtaattttttcaattcacacttcttaactgtcaatatggcagtgcagagacatttagagacatgctctaaatcacttccattaaattatggtccatgaacaaatgcagtccacgaaaaggacagaaatggagatataagtatgaagataaaaacttttatcacaatttaatactgctgcaatatctaagaaagtgttcagtattggtttctgaaggattggaaatgaaactaatcaataaacaacaacaaaaaaaggcaaatttaaattaaaacatggtcattcaccaagcatagtttgaggaacatttgtttaacttactccttgaagtcccaaatatccacttgaattataatttcctttataattttcctttatgtttgaatatagagaataaaaacattaccattagttttcaaattcctttttttgaatactttactctgtcaattctcaagtcccctaaaccttttaaaacctgaatttaaaatatattgtaataaaattagcatatttatattaaaagaattgcttaaaataaggaatttgaaagcaattaatagttgaaaagctaatttttcataggtaagagcaaagctatattgtatgtaatataaacccatatttgatgaaatcgtcttcccagtttgttgcaatccattacatcataagaaaattatgccctttaaaaaagtgtgctcatttaattgtcttacatgttgatgcctgttttgtcactgacacagtgacaaccctagtggaagcactagctcttacttaactagtagatagttatatttgatagcagtttaagaaaagtttgagggggaacctacttactgattgataactggttttatttttaccaacatttcatacctttgatatttatgtaagcctgaaatttttaccaacatttttcatctttcaatgcatgcaattctgcaaagcaattgctttaaatcaacaataggttctaacccaaattgctgaacagaatgctgtaagtagaactgaagaagattttgccagaagcagaaagtgttgtttggtgaccatgagtgctatggaggatgccaggctgggctgttaagcataaatgatgtggcaccataagagacatagatctagaatggttttatcctattagattttaataggggttgcagttatatgtagcctcaaactcagtagcaaattcattaatcccaacaatatgccatgcataaatcttacccatctgccatcatctgccatcaaaacaattgtcatgggataaaggtagaccattccccactactttccttctttctctacagatcccaattagcatccattgcattttttaggacctgactcaaaatttcctcctttcagaaagcatgtccatcgggatcactctttattctctggccaggttattttgtctgtgagttttgttattctttttttgttatgctatttttcttctgctaatgtgttgtctgtaactttttccaagttgttgcatgcatctgctttgcttttaaaaatagattggatgaagctagaagagagagtggtatcatgttttaattacccaattaggagcatggtctttgttatttaggagacattttcaccttcttgggggtctttctgagcatagaaattgtgatggtggtagaattaaatgatatgagtaaaccagggtgagattttctttccactcctggaatgaggacacctttgggctcttggccttctaaggaacttaaagacttaagttcctttagtgcccagatctatggctcatatatctctgtattcttctgtggtgtcaagcagtgggatcttaaagtagatgcttaaaaacacattggctaattggttgcttggttagcatgggaggtttaaatataaacaactttatatataatttgttttttcaatgattctatactcattacttacgacattcacttaagtttgtacttaaataaaattttatttacacatgaattaaaagagccaatcttacctcctagatggaaaaacatatgatgcttttgtgtcttacctaaaagaatgccgacctgaaaatggagaggagcacacctttgctgtggagattttgcccagggtgttggagaaacattttgggtataagttatgcatatttgaaagggatgtagtgcctggaggaggtaagagggaatgccagatagaaaaatattcaagatagtttctttttaaaaaatgaatgagctagcccccagagagctatcccattttccttaaaaacaaatgaataaggtcctttaagcaagaaataaccacgtaagtcaacaatcgatagtgagaaaacaaactaatgagcttccaatagtctcttctcttgggctctgttctttgtgcttcacggttctctgaaactttggggaaagggagagggcatttccttttcagaaccgggcccagagctggcgttatcatgaagcctttatttagaaatgacccacggtgagaatatctgtaccacagcagcagttcctaatttaacatgtgatgtgtggactagttaatcctcactagtaactcttactagaaataaacacgggttaattattactagaaaatgcatgggtttttattgtgttgatattggtgacgaaatttaagtagaaaataggaaaattgaaaagggaaaaataacaggaaagcggtgatccccatcagatcatagctatgaaattcaatgttttttttattaatataggaatacaaatggccatagtgcctatattaaagcaaattactgttaaatttttctttttaatgagtaacatttttagattttctctgaagtctttagaacaaacatttaaaatctggtgtcaaattattctggatactgatgcttaaaaaaaaaaaacaaatgtttgattattaccatcattcatgtattaatctaatatttattggatactattcctgtgccaagttgtgaactgggcatcaaagatataacagtgagaaagaaatagttacattcccccccatattacaaagtagaaaggaaaatattgctaacttacactactgtttagtaataaacaacttgtcaaaaaaatatgccagattatcagatgcatacattgtagtatttttggatagcagttctttgcatctaagaaggcatattgttacttaggaagcatttattctgggccatacatcaattttactatatttccgttattttctaggggcctttcttgaaaacagatttattcttaattcataaataaaaataatgtttgaatattcagctgtaattaggtttggttaaacctctatttgagaacagtgagaggtctagaacaggggttggcagtttaccagccacgggttccatcacacctgcaacccttattgaaacacagccacgcacattggtttacctgtcgcctgcgtctgcatctgagctacaacaacagaactgagtagttgtgacaaagacagtgtgacctgcaaagcctaacatatttactatctggccctttgcagaaaaagtttgccaacccctggtctaaaataatggatggttttgttttgttgtgcctttttgtcttttaatctttaaattctgattttagcatgctcttttctgcttgaggagaagcaggatagtataatagttagaaaaatgtattccacttgggtttagattctgattctgccatttactagctgtgtgactctgggcaggttacttaaccactctgtgctccggcttccttgtttgttaaatggaggtgataacagtatcttctctgtagcgtattatgatgattaaatgagttaatatacaaaaaacatttaaaataaggtatggtacataataagtgctaagtaggtgttcattattattgttacctagagattttttaataagcatataaaattaagaacaaatggtttgtcttaaagaaaaacttattagtgaggttaggagttaatataaaataagactgtgcaaaatgacttttatctcatgttccccctttcagttatcttaaattaataggggttatcttgcattttcagctgttgttgatgaaatccactcactgatagagaaaagccgaagactaatcattgtcctaagtaaaagttatatgtctaatgaggtcaggtatgaacttgaaagtggactccatgaagcattggtggaaagaaaaattaaaataatcttaattgaatttacacctgttactgacttcacattcttgccccaatcactaaagcttttgaaatctcacagagttctgaagtggaaggccgataaatctctttcttataactcaaggttctggaagaaccttctttacttaatgcctgcaaaaacagtcaagccaggtagagacgaaccggaagtcttgcctgttctttccgagtcttaatcttcagaaacagtgaacgccaaaaagaactcaagatattctggggactgagcatatgaacctgttcataacaaaggctgtgactcgaaataattaactttgtcaaaatcctgctcacaatttgaagatgaaacttgtcattaggttggcgggaatgagactaaagattgcgctgtgggctgtggtcacgtgctcccagaagacctggaattcaaaagaaatggagctattctttttctccctctttcataactggatgcagctgctcatactcaatcccatattcagcaagtgtgaagctggacgtgatgcaaaataaccgatgccctacaaaaagggcgcatctttaagagttttaatgccagtgcttaattcgaatgaggggattttaagtgtctgaagaggcattttctagggaccagtgggtgactgagtaactgaaatgctgctttcactccctaacaccatggatctggttgtgcataggatgtgggaggaggggctggcagggccgccttcagaggctgcagggcctcagcctcaggatgcatttaatgtatcctggccacagttgcagccaacggttcttgaaagctcggtaaggccctgcaacgcagagcctgcttatgtggatctatttatgggaacttcttaaaaggaccccagaatagctctttatctttcacaagagacacaaattctaattgagttaattatctgggcctttcactttggatgctctgaaacatttgttgattttgtgtgaatgtttatatcaaaatgtttgccaggttgtattagccattgaatagcaaaaaactgatagttacttgcttgttttttaaaaattacatattaaaaatgcccttggcataaggcagcatggtgtggcagttaagagatgggctgtgcagcccatcctgagctccagtcctgagtttgctacttacttctgtggcctctggaaccttatccaacctcttggtgcttcagtttcctcatctgtgaaattagaatttataataattgcacctacctcccaggggtaactaaatgaataaatataataaagtacttacagtggttcctgacacagactcagcactccgtcagtgttgccatgactatttttattatcattattaatgattacttagatcaattatttagcagtggactaatggaagctacagagcagggaagggaagcagatctagggaggaaggcagttttgatttgaggaggtttgcacatgtagagaagcatactggagaagcatatccagagggcgaaagatatctctccattgtgcatctgcctcttttgacgttggaagacacatgtcttaccccccaaagggagcccagcactgggagccttcttgatgatctcaaaaataatagctattcaagaaaatcaccaagtgactgtgaaaccgtcagttcggaaggctggttagaacatgtgggagcaacatgaatgttctacaaaagtttaaagcagagattgtttcaaatgggtgtagtagatattactgaaaaccaaaaaagagtgagattgtcagtgtaagaatgtgatttaatgtttgtagtgcttacaattttgtgtaccaactggatgactaaaaagagtaaaataatttaattaatagctcatattttatgtgtgaaaacatgttagtgaacatatataatcaaaatagatttcattgctattgcatagtctctaatacatagaatgattttgcttttctcttttattatacttgctttaaaatacttgaaatatattttgcattaaatgcatttcaagttaaatgtcttaaatgtatacattagatgtgtgttttaaaatgcataaaacacgttgaaatacattaatgaaccattag

SEQ ID NO: 70 - DNA, 28479 bp, Homo sapiens
attatgtaattttcccaaaagccccacctcgcctcagccgggcgggagagagggaggtctcgcgctttccccggggttgcgtcccgccccgcaggctgcgcgcaggcgctgacgagccgctcgcattctacgtaacggacggcggaggctacgtgaagagaggcgcggcgtgactgagctacggttctggctgcgtcctagaggcatccggggcagtaaaaccgctgcgatcgcggaggcggcggccaggccgagaggcaggccgggcaggggtgtcggacgcagggcgctgggccgggtttcggcttcggccacaggtaaggagcgggccaggacgcgctcgtcggcgtggccgggccaggccgagcggtgactccgagttgcttggcctgtagcccggtccggttgagataattgtaatggtttgggggaactttcccacggagctgtgagcaaatgatagccaaaagggcagagttagaggaaatgtacagtgtgtgccggaggatgacattaggatgtattgattctcttgggtggggagaaactaggcaaaggggtttaatagaagcaaaaacctctgtggccagtctcttctggaggtttctaaaatgaaacgtgtttgtatccaacacatataaagagacagaggaaagtctgcatgatttccagaatactcgttttggccgttgtcaggaagacctaatctaaaatgacaacaaggaatgatggcctcactcagtcctctttcctcaagtctagactcagtcgctgaggaactattggatgagcttgcagaaaataatcaaaccagacttgttagcgcttgtgtgaattttccttggtcctgtgttgcttgcttcaggagtcatagaggctgggtggtctggcaaggacttgtgcatttgagaactgacaggtgcagcggagacttctaagagggaaaaccaaggtaaaaatggcttggatgattgtaacctaaataaccttgaaggatctccattatagtgctgagttatctcagaagtgtttctatggtgtgaatattctaattggaaattcaatttgaaatgatcggatcttttggcaggctgttaatcgagttgactgttccggtgttaacttttagttgcttctatatgaaaaaaaagttttaagagtaggatttgaaaaggaggctgggcgcggtggcccacgtctgtaatcccagcactttgggaggccgagacgggtggatcacgaggtcaggagatcgagaccatcctggctaacacagtgaaaccccgtctctactaaaaatacaaaaaattagccctgcgtggtggcgagcgcctgtagtcccagctacttgggaggctgaggcagaagaatggcgtgaacccgggaggcggagcttgcagtgagccgagatcgtgccactgcactccagcctgggtgacagagtcagactccgtctcaaaaaaaaaaaaaaaaaaaaacccttggtacatatctcccgtaatacccactgcagccctaagaggcaagtagcaaatggtatcccttttttgtatgtggagaacagggaattttaagtaattaggctaaggtcatattgctggtaaatggtagagctgacattttattttattatttatctatttttttgagacagagtctcaccctgttgcccaggctggagtgcagtggcgcaatcttggctcactacaacctccatctctcgggttcaagcgattctcctgcctcagcgtcccgagtagctgggattacaggtgcctgccaccacgcccggctaatttttgtatttttagtagaggtggggtttcactattttggccaagctggtctcgaactcctgacctcaaatgatccacccacctcggcctcccaaagtgctgagattacagacgtggaccaccacgcctggcctagagctgacattttaaaccaagtctaatttcaccaaagtatgtgctgttttctatatttcttccacttttgaccaaatatcacaacatgagaactagagggaaagcctagaaaaactagaagagaaactttaacaggtagtaatttagaggactgaagacccttaggcctagtggaagtggaaaatatacattccagagtttaaaaacactcattagtaactaaagatggttaaaggaagctagggatgtttagagacacatcccatacctctttgaggctggcattgacaaagtggcatgctttcccatagattgtcccttgatactaacctgaaggatcaactagtataaaaagaatgtttagttctcccttgatatgtatgggggattggttccaggaccccttgagaataccaaaatccatggatactcaagtcccttatataaaatggtgtagtatttacgtataacctatgcacctcctaccatatacttatatatgtatatgtatatacactatataattatctctagattacttataatacctaatttaattgtatttttttttaactgttcttgcctccaaatctgttccatctgtggttggttgaatccacagatgtggaacccatgggtagggcctactgtaccgttggcctatcctttatggcatttctcaaaatcatttgtacctttcaaattttatgaactttaattctaagaacatttaatttctttctttctttcttccttccttccttccttccttccttccttcctttctttctttctttcttttttttttttttgacacagtctcgctctgtcacccaggctggagtgcagtggcatgatcttggctcactgcaatctccgcctcccaagtttaagcaattttcctgcctcagcctcccaagtagctgggattacaggtgtgtgccaccatgcctggctaattttttggtatttttagtcgagacgggatttcaccatgttgaccaggctgttctcgaactcctgacctccgctgatctgcccgtattggcctcccaaagtgctgggattacaggtgtgagccactgcgcccagcctttaagagcatttaatttcttgagcatccatggattgcaaggcattcgacaataaccttcgatattaaactgatttctttaagaagtttcagtgctataaatgagatttagaatattctccatctcagagcaccttgaaagagtagtacatatttccctttgccatactctcacttccgttaatactcaattgcttgcattatggcttccatccttatcacttccctgcagttgccagtaatgatttcatcatgacctggcccctgagggcctttccagcctcctttctcccacttgagtctacaaacccaatgtcctatcataccaggctcctaaaatatgctatttcaggcctccatgccaaacctgttccgcagtctgcaatgcctcttctctagtgacaaaagtacactacagaaaaaaaaaaattagtccgggcacggtggctcatgcctgtaaatgcctgtaatcccagcactttgggaggccgaggcaggtggatcacctgaggtcaggagttcgagaccaacctggccaacatggtgaaaccccatctgtacttaaactacaaaaaaaattagccaggcatgatggtgagtgcctataacccagctactcaggaggctgagacagaagaatcgcttgaacccaggaggcagaggttgcagtgacccgagatcacgccactacactccaacctgggctacagagtgagactctgcctcaaaaaaaaaaaaaaaaagaaagaaaaataaagacaaaatatccagaattctaccatacaagctaactaatatttgtatgtaaatgtatgtttttctaaaccaagcttgtccaacccatggcctgcaggccgcatgtgacccaggacagctttgaatgtggcctaacacaaattcgtaaactttcttaaaacattatgagatattttttagcttattggctatcattagtgttagtgtattttatgtgtggcccaagacaattattcttcttccgttgtgcctcagggaaaccaaaaaatttgacatccctgttaaacttttttgttttctttttcttttcttttcttttctttttttttttttttgagatggagtttcactcttgttgcccaggctggactgcaatggcgctgtctcggctcactgcaacctccacctcctgattcaagcgatcctcctgcctcagcctcccaagtagctgggattacaggcgcctgtcaccatgcccggctaatttttgtatttttagcagagacgaggtttcaccatgttggtcaggctggcctcaaactcctgacctcaggtgatctgcccacctcagcctcccaaagtgctgggattacaggtgtgagccatcgcacacagccaaacctttttctttatgtgcatttgcttctaaaatgatctgggtttcgacttcatttgtaacattttgttttttttttttcttttagacagccttgctctgttgcccaggctgtagtgcagtggcgcagtcatggctcactgaagcctcaacctcctgggctcaggtgattctcccacctcagccaccagaatagctggactacaggtgcacaccaccagacttggctaattttttttttttttttttgagacagagtctccctgtgtcacccgggctagagtgcagtggtacaatctcagctcacagcaacctctgcctcccaggttcaagtgattctcatacctcagcctcccaagtagctgggattacaagtcacgccacacgctggctaattttttaaatatttttagtagagacaggattttaccatgttggccaggctggtctcaaactcctgacctcaagtgatctgcctaccttggcctcccaaactgctgggattacaggaatgagcgtgagacttggctaatttttaaaagcttttttgtagaggggaagtctcactgtgttgcccaggctgtgtaacaatttttttttaattacttgggggtttttcttttgttatttgtgttttgttttgaggcacgtttcactgtcacccaggctggaatgcattagcatgatcacagttcactgcagcctcggccggcctcgtgagctcaagcaattttctcacctcagtgccctgagtagctgggactacaggcacatgccaccaaacccagctaatttttctattttgtttgtagaggtgggttttcgccatgttgccaaggctggtctccaactcttgggctcgagcagttcactcaccccagtctcccacagtgctgggattacaggggagagccaccaccctatgtaacaatttttaatggacaacagtagctttggtttttgatacatccatagtttaaccaaagagtttaaccaaatttcaccatcataaataatattgtagcacatgtccttgaagctgaattcctgtgcaaatttatgttcagttcaggaattgtgctttatcttggcatagtacctactgtggcgatatgcttagtgaaggtacatttaattacagtaggatcattgtgaaaagcagtgaatgccaaaggagtttttatattactttgcaataattggttagcctttgatgattattgaatccttatatgtaacaaaagttctgttttagacagatgctggtagtttttagggaggaaaagtagggagtggggagagcattaagacgataccatttaaaataatatggtggctcttcagcaggtgggggtaacttgtagtggctataggaatcaaagaaggaaacaccaggatttgatggctgatagatttcaaaggaaaaagaaggcaaaacattagatatcttgttcttttcaacaagcaagactggaaaaatgtgattgatattaatatacgaatagagaaattcagatacctgatgattttgagatgactataggcagggattgggtcagcctgaggggaggcctgtgaagtaagaatggtctttatattgttttaaagttttttttaaaaaaagaacaatatgcagcagagaccagtatgtaccccatgaagcctagaatatttactatcttactagatacacgaaaagtttgtagggcgtcaaaacagatatgtcttcaaggttacagtgagttatgacatagggctggtgtttagatgagggacaggactggaaatacagcctaaatgggtttgatggttgaaatatacttttcaaatttcagctcaaatggtctccccacttttttttttgtaaagccttacctatttgggaaaatggttacattgttgtccatgttttcatataatttggcacatattttgtcacagatatgatatcattatatttgttaatgcagaagcttttttcacgtattagaaaacttaatgttcttcaaaaagctataaaatgatgatacattgaattccatcatacacactaagaacaattggttagcaaaaaattactgcttctaagcaagtaatatgaaagcacagccacctaccacatttgagatgcagcctgagaagtggttcatagcatggactctggaggcaaaactctgggattaaatcacagctctttgtcacttggtagttgtactacttagcatctctctgccccattttccttattagtgaaatggggatgttaatgttgcagctttccttagagggttgttatgaggattaaattagttgctttttgtaaagtctttggaacagtgtctagcacatagtgatttaagtgtttgctcttatgataattatgttcatgcatgaacacaaatcaatctaagggtgaatggcttttttattcatggattattcttgttaccactaacagataaatagctacatcttattccttcatttttacctccttctcattttctatagaaagctttttaataggccctcaaaaaatgcttattgaatactctatgtaaatggacagagttttagaaaacccaacctaaagaaattaaatgacttgggctgggcacagtggctcacacctgtaatcccagcactttgggaggccgagacagatggatcaccctgaggtcaggagttcacaactagcctggccaacatggtgaaaccccatctctactaaaaatacaaaaattagccaggcgtggtggcacatgcctgtaatcccagctactcgggaggctgaggcaggagaatcgcttgaacccaggaggcagaggttgcagtgagccaagatcacaccattgtgctccaacctgggcgacaagagcaaaactccgtctcaaaaaaaaagaaattaaataaatgacttgatgacttgttgaagattttacagatatgtagtgccaggatccagactagaacccaagcctcttgaccttacttcattgttctttatataatgtggtctgaatctaatagtaccaaataagagaaaagcaggagaggtttatagatttttactgtttataaaatctgatcagtatgtatagaatggcaatccattttggggttctctttttttttaagctttttttctcaaggtgcaatgaaagccttccacactttctgtgttgtccttctggtgtttgggagtgtctctgaagccaagtttgatgattttgaggatgaggaggacatagtagagtatgatgataatgacttcgctgaatttgaggatgtcatggaagactctgttactgaatctcctcaacgggtcataatcactgaagatgatgaagatgagaccactgtggagttggaagggcaggatgaaaaccaagaaggagattttgaagatgcagatacccaggtgaggctctttttattaatttattggaaaaatttgtaactagcacctttcccaaacattaaaattaatcctcaggctcaagagacctttactgtctggagtcttcattttcattcactaggtagagctcttctaaatgttctgtggtaagtttccaccttttacattaacagaatgaattgtgttcttctattgaaaccctgactggaagaggggttagagaatagatactgtttgtgggtgagaattgtattatttagaactttgcaattggctgggcacggtggctcatgcctgtaatcccagcactttgggaggccaaggcaggcagatcacccaaggtcaggagtttgagaccagcctggccaacatggtgaaaccctgtctctactaaaaatacaaaattagctgggcgtggtggtgcgtgcctgtcatgtcagctacttgggaggctgagccaagagaatcgcttgaacctgggaggtggaggttgcagtgagctgagattgagccactgcacttcagcctgggtgatagagcaagaccttgtctccaaaaaaaaaaagaaaagaaaaaactttgtcatcaaaagcatggggactcatcattttggtgttttgggtgctccccagctttattgaggtgtaactgacaaaaattgtatatatttaaggtgcacaacatagtgttttggtatacctctacatacaatatgaagtgcttaccacaatcaagctaattaacatagttgcctccgtgtgtgtgtgtgtgtgtgtgtgtgtgtgtgtgtggtgagaatacttacaatatattctcttagcagatttcaagtctacaatacattattattaactgtagtcaccttgctgcacattaggtcttcagaactttctcattttaagctgaaatttgtacccaatcgttttgttaaaaacatgtaacatctgttttctgtgcttgctgcttacacgttcttgttttccccaacaaatgttgccaacaaaatgagacacagctgctggtgacatttgtagaggaaaacggatgatgcctcatttttgtaggagggagatactgagagtgaaccatatgatgatgaagaatttgaaggttatgaagacaaaccagatacttcttctagcaaaaataaagacccaataacgattgttgatgtaggtatccaggattctgaattcccaactaaacaacaaaatgtcttgtcatcaatcccagaaataaaattaatgatgtatagctggtgttaatgcaatagtgggagctgagaaggagcttgacatcaatttttctgataaaaatcaacacctctccgtctcaaaaaaaaaaaaatcaacacctacagaagcaacccctattcatcattgtagcacttctagttttactacttatcagggaataagtaaaatttattccttggtgatgtacagtacattgaatttatttgggggttaaggaccaagtgtaaaacaaagggctttccagcttttcatcccatttgattgtccttatatttccttaaagaatcttttatcaagctagcctagaaaagtaaaatggacctatttttcaaagtataaccttattcaatgacagatatctgaagtatcccttctgtttatggattttctcattcttcctgccatgaggtagatttcattcttcagtctcagccaacatttaatggaatgattttgcttttttaggttcctgcacacctccagaacagctgggagagttattatctagaaattttgatggtgactggtctgcttgcttatatcatgaattacatcattgggaagaataaaaacagtcgccttgcacaggcctggtttaacactcatagggagcttttggagagcaactttactttagtgggtaagtgaggccaatgtcagcccagcttcttgcttgaaaacaatctggtaaggatgatgtattcccctcagtataagcatctaactgctttcatggaataccaaagagggtgcattgttttttctctcaaggattccccctgctctttttttttttaatttaatttaattttattattattattactatttttgagatggagtctcactctgtcaccaggctggagtgcagtggcgcgatctcggctcactgcaacctccacctcctgggttcaagcgattcttctgcctcagcctcccaagtagctgggactacaggcgtgcaccaccatgccctgctcatttttgtatttttagtagagtcggggtttcaccatgttggccaggatggtctcaatctcttgacctcatggtccacccacctcggcctcccagattgcagggattacaggcatgagccactgcacccggcctttttatttttatttttttgaggcaaggtctcacgctgttacccaggcttgtgtgcagtggtatgattacagttcactgcagcctcgacctcccaggttcaagagatccttccatcttagccttctgagtagacaggactacaggcacatgctaccacacccagctaatttttgtattttttttgtagagacagagtttcatcatattgtgcaggctggtctcgaactcctgggctcaagcaatctggctgccttggcctcccaaattgctgggattacagacgtgagctactgcatccagccttgaggatcctgttttttggcccggtgcggtggctcacacgtgtaattccagtgatttgggaggccaaggtgggaggattatttggggccaggagtttaagaccagtctgggcaacatagtgagaccttgtctctacaaataaaataaaataaaaattggccagtcacagtggtgtgcttctgtggtcccaactacttgggaggatgaggtgggagaattgagctcaggagtttgaggctgcagtggtacagaatcatgctcctgcactccagcctgggtgacagaatgagaccctgtttctaaaaataagaatatattgtatttaataattttctcatctttcatgagtcagcagtaaaattgctaaacagcttctgattagtataatgtaatcgatgttttcaaaacaagttgataaaattctgacggaaaccaagaaagtttgacattttaggtagcttgataaatgctctcaattcatcttttagaaattgaaagtccctcaaaattcccttagaatctgacacttgagttttggatccactgctgaaatatacattgaaggacttcaaggaacctctgtagttgtgcaatgtagggaatgaggtggactaacctcacattcacctatttggcatttagcaccttatttctctttaatagtaagcatgtatccacctgctctgcaacacagtagtgtttatatattatgctagatactttgcatacagtgtttcttatttactttttgtaacaacactgtcaattggctatagttgctgttttcctaaggaggaaactgaagggcagaaatgttaaaacttatctaagctgttaaattgcaaccaagatatcagaacttatctacctgtttgcaaagtccaccccgtctccactataccatagtatttcagagtatgttttgaccaggaaattcgaaaaaaaataaatgagcagctttggctccttctacttccccttgcttgttttcatttggtgtatcagtccgttttcccttgtgaggttgagcaatttcttttgtatacttaatgaattaaatgaagagagaaagtattggaatttgagcttttttctagagttaaaatacaactcttaataccattagtaagacccagttatcattttgcattggaaaagaaagcttggttaaagttaattcataggagacatagtgagaaattgttgagtagtttgtattaatggtattttttattcactccataggagtttttaacttttggcagagatatttcaactgatttttttcccattttgtatgtactctgagagacttatactctaagctgatcatcgttaaactgacaagcatgtgcttagaatccatatttcttctaatacagacaatagttttaaaagtaaaacgaacagtgctaatctatttcagtccctgtccaaacagttctataagacagcaaagtattgctactctgaagctgtgatcattttgtggtcagggtagaggaacgtgaggtattcggccttgtttcctttttttttttttgagacagagtcttgctctgtcatccaggctggagtacaatggtgcgatttcagctcactgcaacctccgcctgccgggttcaagctattctcctgcctcagcctcctgagtagctgggactacaggtacgcgccaccatgcccggctaattttttataattttttttttttttttttttagtagggacagggtttcaccatgctggccaggctggtctcgaactcctgacctcgtgatccacccacctcagcctcccaaagtgctgggattataggcgtgagccaccacccccggcccggccttgacattttctgttgagtcacattaagtggttttacccctaggggatgatggaactaacaaagaagccacaagcacaggaaagttgaaccaggagaatgagcacatctataacctgtggtgttctggtcgagtgtgctgtgagggcatgcttatccagctgagggtaagtaggaaacttcttgtacgatatatatcttcccttaattttgtccagttgtgattcccagccccccaattcagcatcttatcccttcatgtttgacttaaaatgaggtctaaaagtgatatttatactaactggcaaatgtgtcgtaaagtatatttgatgaagcatttgattctccttcaaggccttttttttatactaagtaggagttgcagttggatttacttacttctctcatttttttcagttcctcaagagacaagacttactgaatgtcctggcccggatgatgaggccagtgagtgatcaagtggtatgtattcttcccgctggttttctgtgtacagactgaattatttgttttctttctttctttttttttttttttttgatggagtctcactctgttgctcaggctggagtgcaatggcatgatcttggctcactgcaacctctgcctcccgtattcaagcaattctcctgcctcagcctcccaagtagctgagattacagatgcccaccaccacgcctggccaatttttgtatttttagtagagtcagggtttcaccatgttggccaggccagtctcgaactcctgacctcaagtgatccatccactctggcctcccaaagtgctgggattatagacgtgagccatcacgctttccccagactgaattatttcctagagctttttccatttctgcctggattgtgtttggagtttctggcaatttatgtcccttgacaaaaaatggaccctttttctccttggacagagcatcatcttccactctgtgcaactgtcagggggccttcatgggccttttggtaggaaagaggtgatactctgtcaccacatagatcaatggagttagccttgacaatagagggcaaagcaattgtgaaaggtaatggccctcatgggtaacttggctccttgtatatgtttttatctttggcagatagctgggtttcttctcaaatatgttttgcttcaaataatacgtttctggccgaataagctccagtcatgatctgaggaccttatgtttggtgtatcttctttcctttattaaatcaatatgtttatctgcaaattgtgtcctttgtcacaaataccacattccttcttcattgtttctttttttttttttttttttgagacggagtcttgctctgttgccaggctggagtgcagtggtgcaatctcggctcactgcaatctctgcctcctggattcaagtaattctcctgcctcagcctcccgagtagctgggactacaggcgtccgccaccactcccagccaattttttgtattttagtagagatggggtttcaccatgttggccaggatggtctcgatctcctgacctcgtgatccgcccgtgttggcctcccagagtgctgggattacaggcatgagccactgcacccggcctcttcattctttcaataaataattatgctggctcccactgctacaagaaacaaaaatatagaagacagtttttttcttttctataatagaacaagagatagatatgtatatatgtgaaagtgtgaaatagtatttggttagtaagtgctttgttagtgatgtaaattgggtactttcaaatgttattggattgaaaatcattgttttatatatatatatatatatatatatatatatatatatatatatatatataaatatatatatatatatatttttttttttttttttttgggagacagaatctcactctatcacccaggctggagtgcaatggcttgaccttggctcactgcaacctccgcctccagggttcaagcgattttcctgcctcagcctcccaagcagttgagattacaggcgcctgccaccatgcccagctaatttttgtatttttagtagagacggggtttcaccatgttggtcaggctggtctcgaacttctgacctcaggtgatccacccgcctcagcctcccaaagtgctgggattacaggcaagagtcactgcacccagccccactgttatattttaaagatctcatttttacttgtaaacctgtatttttatttcagtttttctaacatggccatgatgacttagtccactaaaatttagaaccctatcagttaatatttctgtcatcctttctcccacaaactgccatcttattaggaggaaagtttgctgtatcctcagccatctttttgtaaaaattattctttaaaagtgttttaatcattttcagttctcattccctctctctctctctcctcctgctaagagaaattgcttcaacaaatatgtggctctttatattttatttgcccctttttttggaattctgtttaaggtttgctttgtgtaatttcccatcaatgatggaagagcagaaaacgttttcttttacagctgccatcttaccagttcttttcctatattaacattttccttcttccatatactaaaaattatttcacccaagcatttaaagatgtaattaatataacaaatatatcatatcagactcttttaggcttataattttttatctttctggcccagagtactagtaactgtttacttgtctggactgttttccaatacaaacagccaattctcagattctctgtataccaactgggtatcccacaattgaattcaataataataataattctttttaattttgtaaatttaaattttttttttttctagagaccgagatttgctatgttgcccaggcagttcatgttgccctgtccttaagtgatcctctcacctgggcctcccaaagtgctgggattacaggcatgagccactgtgcccagcctcaattcagttctgacactatctacctggagttagcttcaaatcctacagattaaagggctcagccccacaagactgccccacttcagatgcagtcgaatgtcccaggttacccatactaccatctggacttctgaccaactaactattaatcgggttcctatgacctccccactcaaccaataatttgttagaatggctcatagaacttgaaaagacacttatatttactggtttattataagggataaaactcaggagtagccaaatgaaagaaagacacaggaagaaacagggttgggagtcgttcggagctttcatgccctccctgagcacaccaccctcccagcaggttgatgtgttcaccagcttggaagctctctaaatcttgttcaagagtttttgtagaactcaatttcgtcctccctctctttcacggaggtaagggcaaggctgaaggtctctaccctctaagcacttggtttttctggttatcggcaccatcctgaggctaactagggtctatgttaagtcaccccattagaataaactcaggtgtgattaaaaggggctcagtataagtaacaaaagatactcttgttattcaggaaattcaaagggctttaggagctctgtgcctgaaacctgggataaaaaccaaatatatttcagtttattccacattattccatttaggttttgtttattttttatttttggacttgagtgctcctgtgtgaagtattgagtgtattcgtgttctattactacatagcaaattacccaagtgtagcagcttaaaacaaccctcatttattatgttaccgtttctgcaggtcagaagtgcagcatgtattgagtgggtcctctagggttttaacaggctgaaatcaagatgtcattcaggttagagttctctgaagcttagggtcctcttaatgtcatttgggttgttggcagaattcagttccttgtgggtgtaggttcctgttttcttttcctttttttttttttttaattttttttgagacagggtcttgctctgtcacctagcatggagtgcacgatcatcacttactacagcctccagcttctggggctcaatcgatcctcctgcctcagcctcttgagtagctgggactacaggcatgcatcacaatgcctggctaatttttctttctttttttttttttttgtacagatggggtcccattatgttgcctaggctggtcttgaactcctgggctcaagcagtcttcctccttttgcctcctaaagtgctaggattacaggtgtgagccaccatgcctggccttttctttcttttttagagatcgggtctggtctcaaactcctgacatcaagcagtcatgcctcagcctcccaggtagctaggcttaaaggcacgaactactgtagtccctattttcttgctagctgtcaactgggaaccactcagttcctaaaggccacccttaggtctttaccatatgtgccctaccgccaaccttcccataagccctttcatattttgactttcttcttcaagtagggctatagtcccttttaaggacttgcttgattaagttggatacacccaagataatgtcccttttggttaattcacagtcagctgattagggaccttctgccataaaacagcctgattatgggggtaatattccatcatatttgcaaatcccaatcacttaaagggagagtatatgcaccagcggggagggaatcttaagggtcatttagaaatctgcctatcacagaacctaacaggtgaattttgttgttttttacatttttttaaaagcaaataaaagtaaccatgaatgatgaagacatggatacctacgtatttgctgttggcacacggaaagccttggtgcgactacagaaagagatgcaggatttggtatgtcaggttgctccaactcaaatatacgtagaactgtgtctccttagcacacacatattcagcttcattgcataataaaaggtcatatcttactttcaattacttcttcctctagagtgagttttgtagtgataaacctaagtctggagcaaagtatggactgccggactctttggccatcctgtcagagatgggagaagtcacagacggaatgatggatacaaaggtaaatgcgacagaagacatacatttgccaggccttggcatttacaggacactctccctaaaagtctcattgtacaagttcatcattttatggcaatgtattagttttacattcctttcccacacaaatattaaaataccttctttaagcaataaattagcttgtcaaaaggacaatttgattagtcaagaagttctctaaatcaagagcaaattgttcctgggattgctaatgactttcaggtttttttttgaaaaaggaatatagcttctaatctttttcgtcatgtcatttagtcttttttttttttttttttgagctccagtttgtgtgggagaagagggatgtgtagagagccctcctcctttgtttttaaaaagatggggtcttgagatgttgcccaggctggagtgcagtggctattcatgtgtgtgatagatctcactgcagcatcaaaaacttctgggctcaagtgttcctcctgcctcagcaagagcccaccattgtgcctggctgagagagccatttctttctattggttgtgtaatggtaacagatcttagtatcataagaatacaggataactcagagatggttataaatgtaagttcaaggtgacatgtttataaaggatcccctgaaattattttaggtgttatctttatgctttcattcttgtttcgaccattattttgagaaatatttttagctgctcgaaaagaatcttaatcattggtatgactaaaaaggagtactactttttttttttttttttttttcttagtagagatggggtttcgctgtgttggccaggctggtctggaattcctggcctcaagtgatccacccaccttggcctcccaaagcgcttggattacaggcatgagccactgcacccagcctggagtactactttaattctaaagagattccctatcttattgaaatttaatttttaaaaagctttagccttgtccgcgcgctgtggttcacacttgtaatctcaacactttgggtggcggaggcaggagaatcacttgagtccagggattcaggactagcctgggcaacatagtgagaccctgtctctacaataaaaaaattagccaggtgtggttgtgtgttcctttagtcccagctactcaggaggctgaggcaggaagatcacttgagcccaggagattaaggctatggtaagctatgattgtgccactgcactctagcctgggtaagagagcaacaccttgtcacaaaaaataaataaaaagcaatgaacacgctttggtcttaatgaaggacattgtataaaagtaaggattgaaaggtgaatttctttttttttttttttcttttttttgagacagagtgttgctctgtcgcccagaccggagtacagtggcgtggtctctgctcacggcaacctccacctcccgggttcaaacgcttctcgtgcctcagcctcttggatagctggggttacaggcacatgccaccatgcccggctaatttttttgtatttttagtagagacggtgtttcactgtgttggccaggctgatctcaaattctcaaactccttgcctcaagtaatccacctgcctcccaaagtgcggggattactggtgtgagccgttgcaccatctcaaagagtgaatatctttaggaaaaaaagggaaatgcattaaaccttgcttttaaaaaatattattttctttttttcagatggttcactttcttacacactatgctgacaagattgaatctgttcatttttcagaccagttctctggtccaaaaattatgcaagagtacgtataagataaaattgttgaaattaattttcctcactagctttctgtgttgaaacacctgtaaggtgcttctgcaatatcccttaccaaatgtgtgaaggaagttggtgacaggcctccacattttcctttgctttgactgcatgcatcataagaggtcattgtaaacctatgggagagaaatgagcctcccctatcccagtttgtatgtgtccctgcatgtttgtgccactgactcagtgagatggttgggaatcttacagaatggctggtactaataaaatgcagtgggtttttttgttttgttttgttttttgtttgtttgagacgctgtctcactctgttgcctaggctggagtgcggtggcacaatcttggttcactgcaacctccgcctcccgggttcaagcaattctcctgtctcagcctcctgagtagctgggattacaggcgtgcaccaccacgctcggctaatttttgtatttttagtagagatggggtttcaccatgttggtcaggctggtctcgaactcctgacctcgtgatccacctgccttggcctcccaaagtgctggaattataagcgtgagccaccatgccccagtccataggttctttttttttatgataataatttgtgtgtgatgtttgacttatgtctgattacaaatctgtgtgttttgtaatttatggccttttctggcttccctctttgaatagttaagtgattgtatcctttcctagcatagaagcccacaatgtccatagggtttctagctttatagtaatactgttcaggagtacatattcaggacttggatttgttctttgaattcacagcctgtctcaggagagcatatttatttacctttatgctcggtttgaaactggttctgactaaatttttagttaaagactaccctctgataggctgtggagttgagcacaattcaagccaatctggattttagttgtatactaagattactcaggtccttatgcctctagatagtgctgcatcatccttgtcttgctcaactcagtggcactgaggacagtgtttcacattgtagcattcatcatgccttttaaatatgagatggagggcaattgatagtcaaaggattcatataggcagagattacaaaggaatcttcaatgacagaactaaattatatatgctgtagtagattatccctaaatttactctgagcctaactcaaaaataagataataagatgccttgttataggaagatagaataggagttggaaataaaacataaaaatgcatcaaaataagcaaaaatgtatctaaaatatgggcctcatacttaaatataggctcatttctggctccccaggtgagatggaatatacccttgcctggagggaacatcactggaggtgttcaaatataggataaagatcacttgagaatgcatccatcagatagacgagtggaccagatgacctgtaaagctccttcattatatttgacttgggtatgccaagccaaatactgtgctgattatgtgcaggtatctgttcatctaagtgtattgggtgacttgtgtacatggaaaacatctttcttgtattccttcttaattgccttttcttttatgacagggaaggtcagcctttaaagctacctgacactaagaggacactgttgtttacatttaatggtaagtattctgggtcctttctgggttcttagtcttctctgagatgaccttaaggagagtattgtttcctcctaaatgatagctttaaaactacgtcaaaactataagcctgtgcttgcttactgatttccagatttcttcaagaagaaattacctattatatattttaatttatattttctgctgcattttaactgcctaacaaacttagagaaatgagtctcttaagattaaaaaaaaaaaagagttgggtgacctggaaatattaatgctaccattaactcagtaggaaaaatggctttgttttccagtgcctggctcaggtaacacttacccaaaggatatggaggcactgctacccctgatgaacatggtgatttattctattgataaagccaaaaagttccgactcaacagagaagtaagacccaatgcctgtattatataaattggcacctttttttgtttcttctcaagggggagggcagctatcaatgatttcagtgactgaatttttgctagttgatttagaagtgccaaatgggagtagttttatgaaagaatgctaaacgggattttgttgctgttgactagaaatggatttcttatgaaatactttgtttcttggggaagggcaaacaaaaagcagataagaaccgtgcccgagtagaagagaacttcttgaaactgacacatgtgcaaagacaggaagcagcacagtctcggcgggaggagaaaaaaagagcagagaaggagcgaatcatgaatgaggaagatcctgagaaacagcgcaggctggaggttagacaaacttatcactggggtaaaactacgatttgtaaggatgactgcttgtgttctgttggttgttaaggtaatctttgtaggctaaaagtttagcattttctcaacatttgggacattgtatcaattgataacactataaagaagaataaataatccttcctgttcaagccgtgccacactgagtctgtgaacgtgaaaaattatcagtattatcctgttcccccagcacaatttcattttgaaaattccattatcagttttcgagccaaacactttggtagaaagaagttagaaattttaatagaaggcagcacatgcgccctattatctaaataaacttgctatgtaaaatttaaaatctgattatagaattagagatttccaatatttttgtttgtatttttgttttctgttttttacctaactagaatctcaaactcaaaagctttttgggtatagtatgttatatttgaaagctcggtatgatctgatgtgtttctgaaataagatgccatagtccagctctaaatttttttttttttttttttttttttttttttttttttttgagatggagtctcactctgtcacccaggctggagtgcaatggcgcaatattggctcagtgcagtctccgcctcccgggttcaagccattctcctgcctcagcctcccaagtagctgggactacaggtgtgcgccactcagctctaaattttagaccttgtaaatgctggtcaagaaagagaacaaaggccaggtgcagtggctcacgcttgtaatcccagcactttgggaggctaaggcaagcagattgcttgagcccaggagttcaaaacaagcctgggcaacatcatgagaccttgtctctactagtaaaaaaaaaaaaaaattagctgtgcatagtggtgcatacctgtagtcccaactacttgggagactgaagtggaaggattacttgaacctgggagattgaggctgcagtgagctatgatcacaccactgcactctagcctgggcagccaaaaaaaaaagagggagaggacaggccgggcgtggtggctcacgcctgtaatcccagcactttgggaggctgaggcgggaggatcacaaggtcaggagttcgagaccagcctgaccaacatgctgaaaccccgtctctactaaaaacaaacaaaaaaatcagctgggcgtggtggcgcgtgcctgtaatcccagctactcaggaggctgaggcaggagaattgcttgaacctgagaggcagaggttgcagtgagcagggatcgagccactgcactccagcctgggtgacagagggagaccctgtctcaaaaaaaaaaaagggagaggacaaagttctgaaagatgtgaattttagtaagaataatcttgagataattgaagaatattcttaggagcaaaggggtcacgtgtccaagaaaatgtgagctgctgtgcgggcctgcatttgacagcagtgtcattaatgctgttgagtgaactgcccaggatactgcaggcctgtcatcatcatcttaccccttttatcatttttttgttttatttgacttggtttagtgataggtatttttcccctgaaaatgtagctctgtgtttatgcagtcttctttataaataaatatggctttttatgtacatgtgaagaatctacagaggaatcattaataggtaatgcctttcatttttctataaaaggaagttctacatttctttctaaggtttgaaactataatgagttaaaggaagagggggcctgaaacttaacctgagtcagattgtaagcttcttgtcgatgtaaatcatttaatttttttgaactaccactttatagtatctggtctgggcaccttgtaaaaagatctggtgaactcaatagaacaacccacccaaccccctctaccagtatatgatatgaaagctcctttttttcttttaatttatttttatttttatttttgagacagggtctcactctgttgcccaggctagagtacagtggcaaaatcgtagctcgctgcagcttcgaactcctgggctcaagccatcctcccgcttcggcctcccaatatgctgggaatacaggtgtgagccactgtgcccagccagagagctcctcttcactcacatcttttcaaaaactagttattaatttttttttttttttgagacagagtctcgctctttcaccaggctggagtgcagtggcgcgatctcagctcgctgcagcctccacctcccgggttcaagcgattcttctgcctcagcctccctagtagctgggactacaggcacatgccaccatgctcagctaatttttgtatttttagtagagatggggtttcaccatgttcaggatagtttcaatctcttgacctcgtgatccgcctgcttcagcctcccaaagtgctgggattacaggcgtgagccaccgtgccaggtcttttttttttttttttttccttattctggtagtggggaaatggtatcccacttgttttgttttgttttgttttgtttgagacatagtcttgctgtgttgcccaggcagagtgcaatggcatgatctcagcttactgcaacctctgcctcctgggttcaagcgattctcctgcctcagctgggattacaggtgcctgcctccatgcccggctaatttttgtattttttagtagaaatggggtttcaccatgttggtcaggctggtctcgaactcctgatctcaggtgatccacccacctcggcctctcaaagtgctgggattacaggcgtgagccactacgcccagctattttttgaattattatttgaagttgaacatttttcatgtgtattgacttaacataaatatctcttaaatgtgctagcataaatatatttatcttttttttttttttttctttgagacaaactcactctgtcgcccaggctggaatgcagtggcacaatcttggctcactgcaacctccgcctcccaggttcaagtgattctcgtgcctcagcctcccaagtagctgggattacaggtgcccgccaccacacctggctaatttttgtatttttagtagagatgaggtttcaccacattggccaggctgatcttgaactcctgatctctcaagtaatccacccacctcagcctcccaaagtgtaggcgaggtttcaccacattagccaggctggtctcgaactcctgacctctcaagtggcccaccagcctcagccactgcgcccggccaatatttcttatacatgatattgtattctgtgtatcattagttttacacatgtgtgtaatatgtaatatgggagatagggatagatagtgctgggaaaagagtgaatgtggtgaaggtaggggttgggacaatgggaagaggacattgggatcgaacctgggaggcagaggttgcagtgagtcgggattgcgccattgcactccagcctggggaacaagagcgaaactccacctcaaaaaaaaattgaaaagaaacctaagataggccgggcgcggtggctcatgcctataatcctaacactttgggaggccgaggcaggtagatcacttgaggtcaggagttcaacaccagcctggccaatatggtgaaaccccatctctactaagaatacaaaaattagctgggcatgatggcacacacctgtaatcccacctactccgggggctgaggcaggagagtcatcccaggcaacagagcaagaattctgtctcaaaaacaaacacaaacaaaaaaaaaaacctggccaggcacattggctcacgcctgtaatcccagcacgttgggaggccatagtcggtgaattgcctgaggtcaggagtttgagaccagcctggccaacatggtgaaaccccgtctctgctaaaaatacaaaaatcagctgggtgtggtggcacatgcctgtaatcccagctactcgggaggctaaggcaggagaatggcttgaacccggaaggcagaggctacaatgacccgagattgtgccactgcactccagcctgggtgacacagcaagaccctatctcaaaaaaaaataaagaaaaaacctaagacagtcaatagttcccaaaccaggaatttacaaatcaccctttgaaacctaatttgttgcactatgaagaactatatatgctttgcacttcttcttttcttccctattttctccatcctgtaccagttgagtatatttctgagcacatttttaccccagtaccctaaaaataagaagtttgagattgtagctgaaataaacttttaatcaggtgtgaccactagtggccaacagtgaagtcatactttgacttgacctctaaggcttctatcagtccacgtaataataacctgaaccttcttactcttctatgtaacttcctaattcctaaataaaaatatgataaatttgataatttttatcacatttgataaatatgatgtctcaaatagagcattatgaatttaagtattatgtgcaggtatggtgtctgtgctaataagaaatttgcaatgaataacctgatggaacaagattcttaaaatttattgaactgaagtagaatgtatcttctggcagttatacatttatgatataatgccatcatgaatggtatggtgaacatcaggctaagtgttccctgggtacagaaaaaaatcaaaccagaataacaaaggctggttaattatagtagtttctttcaaaactgagattttagtttacctttgcttcatttgaagttgatttaatttttattcactaatgtagatattggcaattatttttataactatcttctagaatgttatggtgcaagcctaagtttttgaataatactataggcagtattctaatttggatttttttttaacatatgtttcaagcttaatttgaattctctcgtccccactccctttctctatttattaccccttctttctctaggaggctgcattgaggcgtgagcaaaagaagttggaaaagaagcaaatgaaaatgaaacaaatcaaagtgaaagccatgtaaagccatcccagagatttgagttctgatgccacctgtaagctctgaattcacaggaaacatgaaaaacgccagtccatttctcaaccttaaatttcagacagtcttgggcaactgagaaatccttatttcatcatctactctgtttggggtttggggttttacagagattgaagatacctggaaagggctctgtttcaagaatttttttttccagataatcaaattattttgattattttataaaaggaatgatctatgaaatctgtgtaggttttaaatattttaaaaattataatacaaatcatcagtgcttttagtacttcagtgtttaaagaaataccgtgaaatttataggtagataaccagattgttgctttttgtttaaaccaagcagttgaaatggctataaagactgactctaaaccaagattctgcaaataatgattggaattgcacaataaacattgcttgatgttttcttgtatgtctacattaaacttgagaaaaagtaaaaattagaacactgtatgtagtaatgaaatttcagggacccagaacataatgtagtatatgtttttaggtgggagatgctgataacaaaattaataggaagtctgtaggcattaggatactgacatgtacatggaaaattctagggacaggagcatcattttttccttacctgataccacgaaccagtgacaacgtgaatgctgtattttaagtggttgtatgtttattttcttgagtaacaaatgcatgaaaaattaatgcttcacctaggtaagatcattggtctgtgtgaaatcacaaatgttttttccttcttggttgctgcagcctggtggatgttcatggagaagctctgttctctatattatggctgtgtgccgttgcttctccctctgcttttatcttttccacagttgaggctgggtatgttctttcaaagaaatggccatgaatatgtgtaagtatacttttgaaaatgagctttcctaaactattgagagttctttccacctcttgcggaaccaactcttggaggagaggcccatgtatctgcacgagcacttagcttgttcagatctctgcattttataaatgcttcttaccaagaaagcatttttaggtcattgcttgtaccaggtaatttttgccggggatgggtaagggttgggttttctggtgggagtggggtggtgggtattttttgttgatgctttagtgcaggcctgttctgaggcaataacaagttgctgtgaaaacagcatgtgctgctgcctttgtaactgcatggaaacttttcacatgggtttttctccaagttaatacagaaatatgtaaactgagagatgcaaatgtaatatttttaacagttcatgaagttgttattaaaataactaacataaaacttaattactttaatattatataattatagtagtggccttgttttacaaacctttaaattacattttagaaatcaaagttgatagtcttagttatcttttgagtaagaaaagctttcctaaagtcccatacatttggaccatggcagctaattttgtaacttaagcattcatatgaactacctatggacatctattaaagtgattgacaaaatctca

SEQ ID NO: 71 - DNA, 9724 bp, Homo sapiens
ggtgagagctgcgcagcgctggctgctggctggcctcgcggagacgccgaacggacgcggccggcgccggcttgtgggctcgccgcctgcagccatgaccctcgcagcctgtccctcggcctcggcccgggacgtctaaaatcccacacagtcgcgcgcagctgctggagagccggccgctgccccctcgtcgccgcatcacactcccgtcccgggagctgggagcagcgcgggcagccggcgcccccgtgcaaactgggggtgtctgccagagcagccccagccgctgccgctgctacccccgatgctggccatggcctggcggggcgcagggccgagcgtcccgggggcgcccgggggcgtcggtctcagtctggggttgctcctgcagttgctgctgctcctggggccggcgcggggcttcggggacgaggaagagcggcgctgcgaccccatccgcatctccatgtgccagaacctcggctacaacgtgaccaagatgcccaacctggttgggcacgagctgcagacggacgccgagctgcagctgacaactttcacaccgctcatccagtacggctgctccagccagctgcaggtgggcgcccccacccccacccctggcgggaccccttggggagggacgctccaaactaactttgcagagcccatgccaagttgatcatcctagcccgaaggagacagctctcctggaaaagtgatttccatccccacccccactttctcagggactggaagccaaaacgttgtgtaagtcatctggcctgggaaagaacccactcttacaccccgcccttccgtttttctctcttgcccacccatgtctggcccagacccctaaccccagtggagctgagggttatctctgccaaggattctggccgccactgctcggtgggcgagtgggagggagccagctgcagctaagacttggagggagtgataaggagaccatccttcaccgaacttccttctccccactatttttggggtgttattaaatgaaacactactgcacctttttctgctgaatagccccttctcacgacgtcccgcagcgttttagaggtcatgcatgaaggagtggttgggttggcttgagttctttcttatcctcacagttgaaggcacgtttaatgcttggagggtgagaagaagctgcaggaaggtggttggtatattggaagaaatttttttgcagtcattaaaaaatgtaaagcatatctaatgatagagaaaatgtttattccacagtaataagaatttgcatatacagggtgattataatcctgcaaaataaaaaatttattgggataataaaagactgacaggaaaatttttaaagtgttaacattggttatgtttgggttggtgaggctgggtgatttttagaaatttagaaaagagagaagttgtgggaaaaagtagacgttagttgtccaggcttcagaaatctggtttctggccgggcgcagtggctcacgcctgtaatcccagcactttgggaggccgaggcaggtggctcacgaggttaggagttcgagaccagcctgaccaacatggcgaaatcctgtctctactaaaagtacaaaaattagccgggcgtggtggcgtgcgcctgtaatcccagctactcaggaggctgaggcaggagaatcgcttgaacccaggaggcagaggttgcagtgagcggggattgcaccattgcactctagcctgggccacaggagcgaaactccgtatcaaaaaaaaaaagaaaagaaaagaaatctgtggttctggctgtaacttctgagagataataaacagacatacagcttacttactaggtgcatgtttttacataggtcattttaaaacttggtttgtggttttggaaagatggtggggattagacctgttgctgctaaaatatccctttggaagtttcagaactttagaactaggttataaaagcttaagaaatgatcctccagctctcagtttggaaacagcacatatcctgacatcagtggcaatttgttggagaaacagcttttgcagggatatatatttttaattacatgtatcctggggaaagcggccaagctgttttgaaggacaagactggatccctttacatgctggaaaatagttacttgtaactctagacttcatagacaacatctgtaaggagccaagcagactgtttatcaatgctggaggaattgaggacagcaactggactctcccctgctggtactgcagtttcagcgacttaacatttacattttcctattgtgcttcattattattcattgaggaaacctggccaaacaaatccctagtgaccagagacctcaatctgcatcccatccttgagtctaacagtgtctcatttgggccattttttgtttcagtatgggactagtttaaacaaatttttaagggataaattagggagaagagaatactaacaggatctacatttttttttaacttttatttttaaaatgataaagaaacggggataaaaataaaccacctaaatgagtcatattagtttctttagctttttcaaatagtttctaaaatggaaggagattgaaagccagttttttaagatttatttcaagtgttgtgcaaagagggcttatgcaattcttcagaccctatttattttatttatttatttatgtacattcttctggaaaggattactaaagccaaactaagaaaagtatgtaagtgatggattatcaggcgcccttgtttgaggtcagagtaaacagacagactcccgataggttggtttaaaagtagatacctagattgcctggaagcattcaactcagctttgtgggagcatttggtcaaacttccaagtcattgttttttttgtgtgtgttcattttgttacttttccagttcttcctttgttctgtttatgtgccaatgtgcacagagaagatcaacatccccattggcccatgcggcggcatgtgtctttcagtcaagagacgctgtgaacccgtcctgaaggaatttggatttgcctggccagagagtctgaactgcagcaaattcccaccacagaacgaccacaaccacatgtgcatggaagggccaggtgatgaagaggtgcccttacctcacaaaacccccatccagcctggggaagagtgtcactctgtgggaaccaattctgatcagtacatctgggtgaaaaggagcctgaactgtgtgctcaagtgtggctatgatgctggcttatacagccgctcagccaaggagttcactgatatctggatggctgtgtgggccagcctgtgtttcatctccactgccttcacagtactgaccttcctgatcgattcttctaggttttcctaccctgagcgccccatcatatttctcagtatgtgctataatatttatagcattgcttatattgtcaggctgactgtaggccgggaaaggatatcctgtgattttgaagaggcagcagaacctgttctcatccaagaaggacttaagaacacaggatgtgcaataattttcttgctgatgtacttttttggaatggccagctccatttggtgggttattctgacactcacttggtttttggcagcaggactcaaatggggtcatgaagccattgaaatgcacagctcttatttccacattgcagcctgggccatccccgcagtgaaaaccattgtcatcttgattatgagactggtggatgcagatgaactgactggcttgtgctatgttggaaaccaaaatctcgatgccctcaccgggttcgtggtggctcccctctttacttatttggtcattggaactttgttcattgctgcaggtttggtggccttgttcaaaattcggtcaaatcttcaaaaggatgggacaaagacagacaagttagaaagactgatggtcaagattggggtgttctcagtactgtacacagttcctgcaacgtgtgtgattgcctgttatttttatgaaatctccaactgggcactttttcggtattctgcagatgattccaacatggctgttgaaatgttgaaaatttttatgtctttgttggtgggcatcacttcaggcatgtggatttggtctgccaaaactcttcacacgtggcagaagtgttccaacagattggtgaattctggaaaggtaaagagagagaagagaggaaatggttgggtgaagcctggaaaaggcagtgagactgtggtataaggctagtcagcctccatgctttcttcattttgaaggggggaatgccagcattttggaggaaattctactaaaagttttatgcagtgaatctcagtttgaacaaactagcaacaattaagtgacccccgtcaacccactgcctcccaccccgaccccagcatcaaaaaaccaatgattttgctgcagactttggaatgatccaaaatggaaaagccagttagaggctttcaaagctgtgaaaaatcaaaacgttgatcactttagcaggttgcagcttggagcgtggaggtcctgcctagattccaggaagtccagggcgatactgttttcccctgcagggtgggatttgagctgtgagttggtaactagcagggagaaatattaacttttttaaccctttaccattttaaatactaactgggtctttcagatagcaaagcaatctataaacactggaaacgctgggttcagaaaagtgttacaagagttttatagtttggctgatgtaacataaacatcttctgtggtgcgctgtctgctgtttagaactttgtggactgcactcccaagaagtggtgttagaatctttcagtgcctttgtcataaaacagttatttgaacaaacaaaagtactgtactcacacacataaggtatccagtggatttttcttctctgtcttcctctcttaaatttcaacatctctcttcttggctgctgctgttttcttcattttatgttaatgactcaaaaaaggtatttttatagaatttttgtactgcagcatgcttaaagaggggaaaaggaagggtgattcactttctgacaatcacttaattcagaggaaaatgagatttactaagttgacttacctgacggaccccagagacctattgcattgagcagtggggacttaatatattttacttgtgtgattgcatctatgcagacgccagtctggaagagctgaaatgttaagtttcttggcaactttgcattcacacagattagctgtgtaatttttgtgtgtcaattacaattaaaagcacattgttggaccatgacatagtatactcaactgactttaaaactatggtcaacttcaacttgcattctcagaatgatagtgcctttaaaaatttttttattttttaaagcataagaatgttatcagaatctggtctacttaggacaatggagactttttcagttttataaagggaactgaggacagctaatccaactacttggtgcgtaattgtttcctagtaattggcaaaggctccttgtaagatttcactggaggcagtgtggcctggagtatttatatggtgcttaatgaatctccagaatgccagccagaagcctgattggttagtagggaataaagtgtagaccatatgaaatgaactgcaaactctaatagcccaggtcttaattgcctttagcagaggtatccaaagcttttaaaatttatgcatacgttcttcacaagggggtacccccagcagcctctcgaaaattgcacttctcttaaaactgtaactggcctttctcttaccttgccttaggcgttctaatcatgagatcttggggacaaattgactatgtcacaggttgctctccttgtaactcatacctgtctgcttcagcaactgctttgcaatgacatttatttattaattcatgccttaaaaaaataggaagggaagcttttttttttctttttttttttttcaatcacactttgtggaaaaacatttccagggactcaaaattccaaaaaggtggtcaaattctggaagtaagcatttcctcttttttaaaaatttggtttgagccttatgcccatagtttgacatttccctttcttctttcctttttgtttttgtgtggttcttgagctctctgacatcaagatgcatgtaaagtcgattgtatgttttggaaggcaaagtcttggcttttgagactgaagttaagtgggcacaggtggcccctgctgctgtgcccagtctgagtaccttggctagactctaggtcaggctccaggagcatgagaattgatccccagaagaaccattttaactccatctgatactccattgcctatgaaatgtaaaatgtgaactccctgtgctgcttgtagacagttcccataactgtccacggccctggagcacgcacccaggggcagagcctgcccttactcacgctctgctctggtgtcttgggagttgtgcagggactctggcccaggcaggggaaggaagaccaggcggtaggggactggtcttgctgttagagtatagaggtttgtaatgcagttttcttcataatgtgtcagtgattgtgtgaccaaggcagcatctagcagaaagccaggcatggagtaggtgatcgatacttgtcaatgactaaataataacaataaaagagcacttgggtgaatctgggcacctgatttctgagttttgagttctggagctagtgttttgacaatgctttgggttttgacatgccttttccacaaatctcttgccttttcagggcaaagtgtatttgatcagaagtggccatttggattagtagccttagcaatgctacagggttataggcctctcctttcacattccagacaatggagagtgtttatggtttcaggaaaagaactttgtggctgaggggtcagttaccagtgaccttcaatcaactccatcacttcttaaatcggtatttgttaaaaaaatcagttattttatttattgagtgccgactgtagtaaagccctgaaatagataatctctgttcttctaactgatctaggatggggacgcacccaggtctgctgaactttactgttcctctgggaaaggagcagggacctctggaattcccatctgtttcactgtctccattccataaatctcttcctgtgtgagccaccacacccagcctgggtctctctacttttaacacatctctcatccctttcccaggattccttccaagtcagttacaggtggttttaacagaaagcatcagctctgcttcgtgacagtctctggagaaatcccttaggaagactatgagagtaggccacaaggacatgggcccacacatctgctttggctttgccggcaattcagggcttggggtattccatgtgacttgtataggtatatttgaggacagcatcttgctagagaaaaggtgagggttgtttttctttctctgaaacctacagtaaatgggtatgattgtagcttcctcagaaatcccttggcctccagagattaaacatggtgcaatggcacctctgtccaacctcctttctggtagattcctttctcctgcttcatataggccaaacctcagggcaagggaacatgggggtagagtggtgctggccagaaccatctgcttgagctacttggttgattcatatcctctttcctttatggagacccatttcctgatctctgagactgttgctgaactggcaacttacttgggcctgaaactggagaaggggtgacatttttttaatttcagagatgctttctgattttcctctcccaggtcactgtctcacctgcactctccaaactcaggttccgggaagcttgtgtgtctagatactgaattgagattctgttcagcaccttttagctctatactctctggctcccctcatcctcatggtcactgaattaaatgcttattgtattgagaaccaagatgggacctgaggacacaaagatgagctcaacagtctcagccctagaggaatagactcagggatttcaccaggtcggtgcagtatttgatttctggtgaggtgaccacagctgcagttagggaagggagccattgagcacagactttggaaggaaccttttttttgttgtttgtttgtttgtttgtttgtttgtttgtttgagacagggtcttgctctgtcacccaggctggggcgcaatggcacgatcttggctcactgcaacctctgcctcctgggttcaagtgattctcctgccacagcctcctgaggagctgggactacaggtgcgtgctaccacgcccagctacttctgtatttttagtagagacggggtttcactgtgttggccaggctggtctcgaactcctgacctcatgatctgcccgcctcagcctcccaaagtgctgggattacaagtgtgagccaccacacctggcctggaaggaacctcttaaaatcagtttacgtcttgtattttgttctgtgatggaggacactggagagagttgctattccagtcaatcatgtcgagtcactggactctgaaaatcctattggttcctttattttatttgagtttagagttcccttctgggtttgtattatgtctggcaaatgacctgggttatcacttttcctccagggttagatcatagatcttggaaactccttagagagcattttgctcctaccaaggatcagatactggagccccacataatagatttcatttcactctagcctacatagagctttctgttgctgtctcttgccatgcacttgtgcggtgattacacacttgacagtaccaggagacaaatgacttacagatcccccgacatgcctcttccccttggcaagctcagttgccctgatagtagcatgtttctgtttctgatgtaccttttttctcttcttctttgcatcagccaattcccagaatttccccaggcaatttgtagaggacctttttggggtcctatatgagccatgtcctcaaagcttttaaacctccttgctctcctacaatattcagtacatgaccactgtcatcctagaaggcttctgaaaagaggggcaagagccactctgcgccacaaaggttgggtccatcttctctccgaggttgtgaaagttttcaaattgtactaataggctggggccctgacttggctgtgggctttgggaggggtaagctgctttctagatctctcccagtgaggcatggaggtgtttctgaattttgtctacctcacagggatgttgtgaggcttgaaaaggtcaaaaaatgatggccccttgagctctttgtaagaaaggtagatgaaatatcggatgtaatctgaaaaaaagataaaatgtgacttcccctgctctgtgcagcagtcgggctggatgctctgtggcctttcttgggtcctcatgccaccccacagctccaggaaccttgaagccaatctgggggactttcagatgtttgacaaagaggtaccaggcaaacttcctgctacacatgccctgaatgaattgctaaatttcaaaggaaatggaccctgcttttaaggatgtacaaaagtatgtctgcatcgatgtctgtactgtaaatttctaatttatcactgtacaaagaaaaccccttgctatttaattttgtattaaaggaaaataaagttttgtttgttaggtt

SEQ ID NO: 72 - DNA, 661809 bp, Homo sapiens
tctcttcagcgcacttggcgagctggtgaggtgagagggatactgcgagagggctaggggcggccagtccggggctgccggccaaggctaggcgctgccagcccgattctcctctgctctccacccccgcctcacccagtggccggccggacctgcaccccgcgcttgaccccgctcatcctccccccgcccggccgggcgcgctcctccccggccggcccctcggcgcgcggcgcgctggaggcgaacgcgggctgaggcgaacgcgggctgagccgagcgcagtggccgccgaccaccgagcgccccgcgccgctccctgcatgtgcggcccgcggcggctcgcagctcccggcagcagcctcggcagcttcggccgcgcctcgagaggcggccgcagaggctccagcggcggccgagcggccgagcccgggctgggagacaccatgcgccgcgtccttcggctgctcctcggttgcttcctcaccgagctgtgcgcccgcgtgtgccgggcgcaggagcgagcgggacacgggcagctggcgcaactgggcggcgtgttgctgctggcggggggcaaccgctccggggccgcctccggagaggccagcgagggcgctgaggcatcggacgcgcccccgacccgggcgcccacgccggacttctgccggggctacttcgatgtcatgggccagtgggacccgccgttcaactgcagctcgggcgacttcatcttctgctgcgggacttgtggcttccggttctgctgcacgtttaagaagcggcgactgaaccaaagcacctgcaccaactacgacacgccgctctggctcaacaccggcaagccccccgcccgcaaggacgaccccttgcacgaccccaccaaggacaagaccaacctgatcgtctacatcatctgcggggtggtggccgtcatggtgctcgtgggcatcttcaccaagctggggctggagaaagcgcaccggccccaaagggagcacatgtccaggtgggctgcctccccttcgccctcccctcggggcttcgctctccctgctctctcctccccaccttcccccaggcaatggcgctccccacggtccccgctccccgcatcccagcctctccgctgggggatgtcaccgggaagccaacttcggcttggaacacggagaaggggcgctgggctcagcacaggtgtgggtctgagcgtgttcgtgtgtgtgtgagcgtgtgtgtgtgtgtgtgtgactctgctccctcaccctctggccgcctcctcccgctggtgactgaggcggacttgagacacgtagcctgggagcccgtggccccgaaatcttcgggtttggggagagggtccatggcacccctcggattccaggtgctagctttttggtaaacaggggcaggcgagcccgaaaggggaggggggcgtgtgtgagcccgagcgcgcgtgtgtgaaggagggagggtcagagtgagtgccgcctgcaactcgtacgactcgcgaaaaggagacgagggaggtggagtgaggggagggcgagaacaaaagccttgcttggagcggccgcctcgctttcccagagcttcgccgtccctggatttgggacctcagctgcccccgcccctttacccacctcatccctttctctggccaccacttctccctgcccggggccgtggccatcgctgcagattgagccccttgccctggctggcgtggactccgggggcccgagccccctcctcgcgcgccctcacttccaagcaccctgatttcgtcaactttcgggtttgccttgttcattatgcaagccccagcaccagctagttccagcagatgggagaaggctttgggggattaatggagctatttgccttttgctttttttaaattttttttattttaagtgtctaaatcgattcgcaaactccgtaactttggaggcggaggacgcagccactaggagcactaagcccccggccgcgggagaggctgggggttggcgtgaggtccgggcgggcggggtggaaggagtgactagcggcctgcgaacagctggatggttggggcataagctttaactgtcccctttcagagtctgggcaacgaagtcgctgtatttttctctaccctctccccaccccttcttccgcgccccctctgccgggggcctgtgtgtgtgcgcgcgtgtgtgcacgcgctccgtgtgatgcctaaaaaatctgaacaaagagacccaccaaaaataggcaaaggaacatcaccacctcactagtaattattttctatttatacgcagagtatccgatgagatttttttttttcccccagagagaagagattttgggggaagaggtgaggaagttctcggtttgggtcagcagggagctgtgggtggatggtggggtcttgctgcacagaagtaagctccgaggggcttcaaagaaaccctgacctactaaaggagtaaagctctggccccgcccaccttccgcaaccacagggtggcctgtccccagccccaccggccaggccagtccctgttaattccccgggtctgtgttaagatgaggggagaagtggtctcaggactgaggcagcgggtgtcgccttggtagggaaagattgactccgagacaggtaggctgccttgcagatttggttaactactgctgaaatctccatcaagccctgccctcgcgaaccagctcttaaaagagtcctccttgatggttggcctgacgggaggtgagcaggtggggagaggagctaacctttgggcatctgtgggagaaagtgatgctagatcagccctctttgatctgggcgttctggtgacagctctctaccggttacccaagggcccaacttcctggtcctgcccccgtgcagctctgctgggggaaaaatgaacacagctgagcgggttgcagctactttcttctgcaggtatagggagggtcggcctggtggcagaatctaggggacccagtcctagggtaccagagcctcaacacaggtcctcccagtatacatttttgagaattccagaatggagtggaagtgcatactcccgaaaagagagttgttgatttttactggcagcttctaaggtatgattttcaactgtaactgctgtgtagtattacctagaatgttttataaaaaaaatcctgtcaccaggggtcccaccctaggctacttagatccaaatctctagggtgggacctgagcatctgtattattatttatttattttttgtatttttagtagagacgggttttcaccatgttggccaggcaggttttgaactcctgacctccagtgatcctcccacctcagcctcccaaagtgctaggactacaggcatgagccactgtgcccgattgcatctgcaccttgaaaagctctccaggtgatgctaatgtgcagccaatcgctgttaaggaaaaggaactaatgcctgctgagcactgtgcagggagccaggcactgtactggggtgtgtgtgtgtgtgcaagtaaacactctctcatttagttctcacaactatcttatgagacaggtactattttaatattcacatacatgcaagaaaatcatggctcaggtgaggtgctgtgtccaagatcacacagttaggaaattatgcattaccagtctcctggttttaattgtgtctgggacagatgttttcagattgaataaacatcaggatctggggcagtgtcctaaaatgcagattcttgagttctatccacagagattgtgaatcaataggttctgggtgggcccgagaaatcttcatttaacaacccccactcccctaatggctttgagataaagtggtccacacttggggaaacattggtcttgggtttggggatatttcacagggctgatggagggataaattaatccaggagaaaggagaggagccactgtgaatctcttattttatttgcattttttttttttttgaggcagagtctcgctctgtcacccaggctggagtgcagtggcaggatctccgctcactgcaacctccgcctcccaggttcaagtgattctcctgcctcagcctcctgactggctgggactacaggcatgcaccaccacacctggctaatttttttgaatttttagtagagacagggttccacctggcctggggttggccaggctggtctcgaactcctgacctcatgcgatcctttcacctctgcctcccaaagtgctggaattacaggcatgagccactgtgcctgaccgtatttgtattctgttgcttgtttctcaacgtatgtaacttttctgtggtgctggggctaccccaggtacctgccaaatgcatcctgggctgcttacgcagttaatcacttggagtcccagctatggcaactgacccagtagcctttgccggattgtgccaagggttgctccagtgggtgtcaacttgccaagcttggcatcagagaggctgctatgacacaaagcagcttccaggtgaaattaacctgccagtcacaggcagcttccaggtgaaattaacctgccagtcacagcctcttaatttttgtctggagctgcaagggaccctgaatgggggtttgttctcatccagactgaaagcatattctcttgaaagacataaagtatgttgtcgcacccccattataaactttgcccctagtgaccagtaaacttgggttttgctgcagaggcctccaagataccagtttgcaggttcagagtcctgggcctgtggcctgcttgcttctgggctaattagggctgagaaaaggagaaagacagcaattccaggaagcggtggggggaggctcgcatgggatctcgtaagaaccgaacaaatgcccattgagcagctgcaagagcagccacagtcagtcactatttattagaataaatgactgcacatggcagccagctatggataccaaaccatgtagtcatgctttgcttgatctgcaaggtatttctacttaggtgtttttatttttaagttttcctcaattttgtgttgtgagaagttttaaacatacaaaaaaaccttgaaaaatcataacataacttcactatatcctttatctagatgaggatttctcaaccttggcactattgactggagaatcctgcgttgtacggggctgtcctgtgcatggcaagatatttggcggcgtctctggtctctgcccactgatgctggtagcacacactccacaccccagttttgacagtgaaaaatgtcatctaagggcaaagggcaaaactggccccagttgagaaccactaacttagattgaacaattattagtattttgtcatagttgctttattgctcacacactctttccatatttttttctttcccttctccttccctccatcccccttcccccttccctccttccctccctcccttcctcctttgttttttccttccttccttatttccttccttcctctcttcctttcttcttttcttcctttccctccctccctccctccttccctccatcccccttccacccttccctccctccgtccctccctccctcccttccttgcttccttcctcctttctttcctctcttcccttcctacccttcttccttctgtcttcttcccttcctcccttctttgcttcttttttccttcctcccttcccttttctcccttctctttccttccttcccctcccctcttctcatcttcttcccttcctcattttcttccttccctcttcccctccctccctttcttctttctttcttggctgaaacatgtgaaaataagttgcagacatgacacttagtccctaatatctcagcagggggctttcctgagagcaaggacattttcctacacagcacaattccattatcacacccaggaaaaagagcaaaaatcccgtaatatcatcagacatccagtcatttaaaaatttctcactcgcacaaaaacaggtctttcagagcttggttttgcacatcgggacccagctcattgtatttggctgtgaaatctctttagtctctattatgcgtggtgttttaaaaccagctgagactcagttgccaacatttacaaactgggagatttcacgcaggaatccagattcctgatttctcatgagaactcagtgggtctggtgacattggatctgcattttcacgcagcagctattggttgccactaagtgatgactgcccccttcaggaagctcttgggttcatctcagtcaccacctccacccaattcactctgttatgttaactgcagcctctagagagtcagtcaagttgctctgcatagcgcagactccagtcagatggcctgagattcaatctcagctcagccacttaatagctgtgtgaccttgggaaggttgcttcacctctctgagtctcaggctgttgtctgcaggtggaggattcactgagacagggcttggaaaacaatgagctcaggacctgtcacaactattacccttttatcatcatccttattattgacattttttacctcttgtctactgaagagaattatgttgtcatctggatctcggttactaacccttgctctgctatatttatttaactgtgtgacattgaccaagtctcctaacctctctggacttgcatttgaatctgagtgggaggggctggcaggtgcagaataggagggagggtctatatgtgactacgttaaatacattgcaaagtgttggcctaagtggtgttgaaaaatccttgttggttttgcaattttgccataagcttatgtgtaaattctcgtttaatttcatacccttcccccatgaggtaggctctatgacaatctgctgtttatggaggcacagatttctttccaagaggacgaacctgcccctggagagtggagtgtcggacttcaaacctggacagtctgagtgcacggatccttggccgctaggctgcactgcgtttgagtgcaaacctgcaggaattccagacttctcagatcacagagaagtacgcgatgccctgcaaacaacagctcatgcatcggggccagttcaagaagctaccgtaagatgaagtctaggaatgctttctatatcggccccggcaggcccagacgtcttggtggaggcgttggtgagaaatgaccttggggacagaagcacatatgtgaagctctctacacttgaagccagtagggaacacatgtcattattttgtccaccttcaaacagaattggaaatccaagtggcaaatggcagataagggtcctgtgtgtttttaaaacatgcttcagaagaactggcaccccttggaaagaaatagcaacaaataatgataaatgcacctcctcctcttgccttttgccttccagtttctctcctgcctctcatctttctatgcatttgtggttatcctaaggctttgaccagcttcccaggctggagaagtccatgtgtgcatgcatctactgttggccacagaaaagtcttaatttatttttctttgcagggtatgttgacttctctttgggcactgagtccttgcattttaaaaatcaacttcattgaagtataatttacacaataaaatgcacacattgtaagtgtgtagtttgatgagcttggacaaatgtctatacctgtgtaatcattactctagaaagctcactcatgcccattgcccttgcatttttgaaaaataattgatgcttcttgtgcaagaagaagtgctcaggaactctattcaagtgtttaaaagtcaacacatagattggacattgggatacctggaggctttgaagcaagataccgggactctgagttctgtttggaaatattggtgtcatatatttgtcattgtaattggaaagaaaagagatgcaccattttcttcttgttctttggataagctaagctcattcccatcttggagctgttgcactggcccttgtgtggctggtccctcctcatcaccagggtcccagctccaatgtcatcttctctgagaagccgtccctgaccaggcttagttgcttcccaccccagcctgacacactccagcccatcacccagtcagtgttatttgcttcatttttacattatggtctaaaattaacttgctagtttactggtttactagtttattatctgtctccttccattatccctctccttccctccttcccttccccttccttccttccttccttccttccttcgagacacagtcgtactctgtcaccccggctggagtgcagtggtgtgatcttgcctcactacaacccctgcctcctgggttttagcgattcttctgcctcagcctcccgagtagctgggactacaggcacccaccatgatgccaggctaatttttgtatttttattggagacagggtttcaccatgttggccaggctggtctcgaactcttgacctcaagtgatccacctgtctcggcctcccaaagtgctgggattacaggcatgagccactgcacctggcccttttattattcatagtaagacacacagggaccacaattgtctcttctactcagtagttggattctgagtgcctagttcagtatttggcaagtaagagttctgcatttgatatcctggtttacctggcacaacaaagtatctccaaattcattcattcattctttcattcattcgataggtatttactgaacatctaacttatgcccaacactgtgctgagagatatgagataaccatgaatagtacaaaagcaatccctgcccttgaagagcaaacagccaaatatcaggagacaggtaacacacaaggaaatgtacaagaaagttgagccagcacttttataagtactggttctagtactagctttcataagaaagtactggttctagtactagctttcagtactctcttgtgaaattttcaatattcagtcatttcaacctcaaaaatggcaacataattatgtttcaacataattgttgttttaaacaaacaattttgtttcaacataattctcctgaactgggtggaaggctatcaagaaaaagcttagcttcttcttcaggtaactgcaagagacagggttctctagagaaacagaacaaatatacaaagagattcattataaggaattggaagtccaaaatctccagagcctctgtacttgtacaagtctgaaggccgacaggcaggagaattctctctttttggggcaaaggtcagtgttttgttctatccaggctttcagatgattggttgaggctcactcacattagaagggcaatctgtcttactgccattagaatgcaacctgttttacttagcttactgatttcaatgttaatctatttcaagagcaccctcacagaaacacccagaataatgtttgatgaaatatctgggcaccctgtgacccagtcaagttgacacatgacactaaccatcacagtacgcttagggtcttgtcactcggagtgtggcctgtgaaccagcagcatttttatcttctgggagcttgggcacgatctcaggccccacctcctgcttattgattcagaatctgcattttaacaagatccccaggtgatctggatgcaccgtaacatctgagaagcactcaaactatgtgccgcaaacaaacgccaaattcttaggcatttgtgtggcttggagcacatagttggttctttctactgtctaattcattacattttttcagcacattcctgtctataaaatgtttttttgtatgcaccccaatatatgcacatttataagcatatgcatgaacccacgaacaatgattaggtacattatgaagcatacgtaaggacagaaatttcaaaccaagcttgagggtgaaataaatattatttgaaaacctgttgctaattgtgatgacttcatactatcattagttactatctcaatgcataatgtacagtgacgggtgaagtttatcattaataaaaaaaatctggattttaaccattcctcctgagcattttcattatttttatctgactttgttttgatctcaatagactgtaattgttttacccttgtgagaagcttttgaagagaagggaggggagtccagtttagtgttttcttgtgcttgcatgatcagtgctatcttcaggctgtagttttgttaagaaggggggcatttttaaaccacatgtctgctttgtgatggttagccaagtcaaaagtattaggtcggtgcaagagtaattgcagtttttgccattactttcaatgtcaaaaaccacaattacttttaccccaagctaataaataatttaatctgtgcatcccctttgggggcacatataattgccatacaggcagcacatcccagcgacgggactgctggtggtcatcttccttggtccaaggttcctgattcctgccatcttacatgggccttctgggagtgggtgccagcatcaatacacgtaagaccatacaaaaaagttctgacatttccttccccataccaaatcggtttatgcagtccctggagtgagcgagccccacttcaaagactctttgtccaggaaatgaaggtccctaaagactcttcatttctgccgcacactctaggaagggctgccctggggaaaagtgtccttggactttggggctgaaatttcacaaattttggtactcaagagaagcccaggggatctgcggatggcagaaccgaccaagttcacagtagccattctgattacgtactttgttatcctttcaaaagcctgaatagttcggagttttggggcgcgggagagtgggggacttcttagaaaatccgataaaagtgatggcttcttgctcgagaaacatgcacaaacacaatttctatgcagtttcagaggattcagcgatcccctgaagctcagcatgaagagcctgtttacaagtgaaaaaggcaagttaggtttggaaggcctctgtcttttgtctcaaaactttctttccctgtagcccctttgagtttcagaccctgcttattgcacggaggttgcaaggagcccaaactttgatttcaaagacgttcaggattgcatctcctcccaatccccgcactgcttagtgagttcacgtgggcagtatttcactctgtgaaacaggtgatgctgatggacaccttgtcacgtgcccctgctcgttggccctcttccagttccattggccttcttgcttgttctccgaatatctcagctcttttctgtctcagggcctttgcacttgctgttctttcagcctggaatgctcttcccatcatcttcacgtgtccaactcctcgctgttcaaggcccatctccagtgtcaccccctcacaaaggcatttcctgatttacaccgaatctctccctcctttctatttgtaacttaaaaaaaaagtatacagttcagtggtttttggtatatttaaaaagtgtactttaaaaaagtatagtgtgcgattcaatggtttttaatatataggttggtgcaaaagtaattgtggtttttgtcattacttcttttttttggcggggaggagggggactgagtttcactcttgttgcccagcctggagtgcagcagtgtgatctcagctcactgcaatctccacctcctgggttcaagcaattctcctgccccagcctcctgagtagccgggattacaggtgcccaccaccacgcccagctaattattgtatttttagtagagatggggtttcaccatgttggccaggctggtcttgaaatcctgatctcaggtgatccacccgtcttggcctcccaaagtgctgggattacaggtgtgaaccactgcaaccagcccatttttgtcattacttctaatggcaaaagttgcaattctttttgcactaatctaatacttacaaagttgtgccaccatcatcactacttactccaagtccagtatctaattctaataaggttttaatcacccttacaaaaaaaatccatatccattagcagccactttcctctcccctcactgtgtcccctggcaaccatgaatctactttccatctttatggatttgcctgttctggacattggatatcaatggaatcatacaatgtgtggccttttgtatctggcctctttcacggggaataatattttcaagattcatttacgttgtagcaggtactagtgcttcatttctttgtacggctggagaatattccatttcctgtaacacatctcgtgtgtccattcatcagctgacggccattcaggttgtttccgcttgttggctattgtgaaaattgctgctgtgtcccaggctctcttgatcacattactcttatttatttgatttgcagccctcgtttatttatttcttttttgtttgtttttctttttttttttttttttgagatggagtcttgctctgtcgcccaggctggagtgcaatggcgcgatctcggctcactgcaacccctgcctcccgggttcaagcaattgtcctgcctcagcctcccgagtagctgggactaggggcatgctccaccacgcccggctaatttttgtatttttagtagagatggggtttcaccatgttggtcgggctggtctcgaactcctgacctcgtgatctgcccacctcggcctcccaaagtgctgggattacaggcgtgagccaccgtgcccggtagtttatctacttaacatgtttgtttattttttttttaaatcttctcccatagaatataagctccaggaaggcagcaaccttgttcatcttgggcactgctgtatcttcagggccttatatagtgcatggcacatagtagacgataaatatttgttgaaacaatgaaagaatgatagctgttgttattctcttgtctcttagcagactcagtcttttcctctcattcatatggggctcttgctgttgtggcttctcacaacgcagctgttgtgagaagcatgtgcactagtccacgtaaagtccctatgtaatctctgtctcacagccgagatgtctcctcaccagctctagttcttaccctatcattccattgccccgtgatcgacagttccccatgcttggggcctgtgtggccttagcacggtctcaaatttgaatgtgtagcagattcttgcaggttgctgggtgaactccacccctgtagtttctgactcaggagggctagatggatctgaaaatttgcatcttaacaagttcccaggcgacactgctaggacactgacaccgttgataggtggactgttgtttgagaatcgctgctgtagtacggtaagttccagcagacaggctgggcctgctgaattcatgggtggtctgcgtgggttgcccccaaacagctcctcttccgactctgtctcccagtgtgtgggcttagagggctctggccagctaagggcatgggggtatatccccaaacacggcaattctacttgtgggtttgcaccctggagaacttctctgtggtacagaggaggccggtatgaagatgtttattggccagctgcggtggctcgtgcttgtaatcccaacactttgagaggtggaggtgggagaatctcttgaggccaggagtttgaaaccagcctggtcaacatagtaagaccctgagaccacgtctctacaaaataaaacaaagtagctgggggtggtggcatgtgcctgtggtcccagctattcaggaggctgaggagttcgaggctgctgtgagccatgatcacaccactgcactccagcctgggtgacagagcaagaccctatctgaagaaagaaaaagatgtttattgcagtgttgtttatcggggctggggagttggtgaccatctagatggccataattatggaaataacaaatggggctgatagtctgctggtttgcaatgatggcagctgtttgtagctgccatccattctgatgggtttctgatgggccagttcctccaccatactaattattgcatatgaaggctcattcctgaaggtaagtgaaatgtggggattgcttatgacggaatactatgcagcggctgcaagggatggaagggtttcacattcagcaatatggctaacactcacgtgtgaacaaaggaagaaacggaatgaggtttagggtaaaaacactgtttatgtaaaagacacacacatatacaacaatacctacaaaaatatatatctttcaaggatattcatatgatctaaataaacacatgatggagtgtaaagagaaaaaatgcattggtaggtctgatcttgggtgtggtatctgtttgacagctctctggtctgttctacgtatgaacactgagttttttttttgtgtgtgtgtgtgtgtttttttttttttttttttgctaagtttacatctaatcatgaaggtcactgtcacaggttgaattgtgtctccatccccctgcacactccaaaaatactcaggctcaaattcttgtgccacaacttactggctctgtgaccttgagcaggtcgattcacctctctgagcctttgtttacttatctgcaaggagtaataatcctcataatgtgttttgtgctgttttgtttagttaagacgtaatgcgattagcgtggtgcctggcttatggcaaatactcaataaatgttatctactgttactaatactgggccattgctgtacatgaagagtttgtatctagtgttagatataaagagagaactaaatctatggagtgcagacacattatatgtattcatcatttaatcctcttaaaaactccgtggggtagatagtcctgttattacatggctgctgtgagaagcatatgcagtagcctgcgtaaagtccctatgtaacctctaattacagtgattttatttacttacgtttttctctactccacccctaactagaatggtggctccatggagtaatccgccttgccatttgttcgcgactgcagtactcggcgcatagcagctgccagtcattgtgttttgaatgaacagatttaaattctttcttctttcagggcccttgcggatgtcatgagaccacagggccactgcaacactgatcacatggagagagacctaaacatcgttgtccacgtccagcattatgagaacatggacacgagaacccccataaataatcttcgtaagtacagctgcatgaaccatttccagtcccatggggtgacctgagcagtggtcacattgccagatttcgtggagtgtgcttgggttagttaagagctctttgtgggcaagttagaagctttctttcatgtcttttggatgaagctgaatttagcatcatccgatgtccgttggttgctttctttgttaaatggcgatccacttggttggtttcacatgattgatacttttagctagcagactgctcgactggttcatcttgattgatttattaactagattagtggccctcttggttgtttcatcatggttggatacttagttaaccaatggattattgggttagttcattttagctagtcaatctgttagccaatggtctgctagcttatacgtctgcctcctgaggtagaccagttgtgacttctaggtttcatgctgttttcaattatgaaatactagttcagaagaattatgtctattctttgtaacgctagagtttcataaaaataatccacagaatattccgtgtgtagggggtgcagggagtggttattgaatttcggtcctgttgatttgaggttcctctgtatgattcaacagcagcaaattcgtttccattgttctgccaggggaaaaaaaaaactgtgtttgctattgtgtttcaataggtatttttcacagagcatgactggggatcttggtatactcccaaagattttctttcctttcaaaggtctgtatatacaatatacatcgtggagctgatgctctgacctatgagactggagaaaaaataagattgtttagtttttgacaataatgtaatactgtggttaccccagtaattatgttttcaagtaacccccacattaaagtaatgtggagggtttggtttaaaataacaaaagccagacaatttaaagaatgcatttagttgtggctggaggttcctgaaaacagaaacaattctaatgatgcacatttttacagactgggtcgtctttgctgaggctccactaggagttgcctgggtgttttatttgctgaatcatagttttggactgtttggttgcaaattcttatgctcagtgggtagaggaagaagcctgtggaatttgacctaggcaatgtgaattctctgattctgcctagtgatgatttttcatggtttggaaattgttgcagtgtgttagtaaagtcaatgtttgcatggtttgaaaaataggccaccaaataggatgtgttaggtttaaatatattaaataatttaacattattagtgaactggatcacaaaagggtatgagaaatagcaacattttagaacaaaatacaccagcaaatggaagttttatgaccaaatcccatagccccccgaagatatggtaaatggcatcaattctgacacggcagttgctgtgtccgattctggctttaatggaaatgagcacattttctttcagttcgcactgggaaataagttgaacctagtcgtgtgcttcagtcccagacatcgtatacaaatgaacatgatcacagagcagagaaattgaaagggtgtcaagtccttggctgtaaaaggtgattgctaacaggattttcccttgaagttccaatctctaggatgatttttgaatcagcactcaaatgaaataacaaactcattgaagtcacctaagtttcatcattccatcaggtgggcgggaaaccttaatgaatgttgcttacataaggcgttttcattgaaagttgtactgaaaatggattactgctcagagatgggtgtccagggacagaagtctcttgcgccaggctgctttggtttatttatgattcttgcgtttggtctatatttgtgcctaagtaatcagtgatcttttacatcaagggagaaagtgtctcataatagtgtactgggtagcactagactagagaattcctgggaagctacaggggagaattctagaagtcattctacaaacactacattcttacaagaattgcccagatattaattttatataatccttccaggttgatccaattcttctttcctagcattgttgggaatatctgaataacaaaaataagaagaatgtgaccttttcaccggtttatattaataagcttaatatatgtaacacattaattcagcagccgacagtaataacagatttccttgtttatctttttattgatttacaggagctacttacatattatagatacagaaaaacatttgtatgttcagatgaacagatgatttgaggagtgcattgagagaataggatgagataactgatattaatcagttaagggtttaagaagccaagcagtcatcagagaacattttgattgatagcaaagtagaagggaaggtatccagtctgataaatggaaaattagaccagccctttgtgccagaaccagaaggcacccatttaatataaaacccttccctggacattatgagatgtacaaggatttaccattacacaaattggaaagaatgatgcatctatttgtgaaacaccaagaagggcacgtcatgctattttcagtttgttcttcactgaacatccaagttgttagatttgactgaggattcactagtctcaagttaaatgtcattttcatgtctattcaatcacccactcaacattgctttaagagaatactaatctccatctatttctctcttcttatcttaatattaaccttaggtctctttctattctttctcttaagttttagtcaaatggtaagataatagccagtgtagagatctggatatttgggaagagggccatggagagagacttgggtgaaggtgaactgggaggaaagagaacatttttgtcaacgtttctacattaattttctggggttgatttttcctgtgatatattggacttgcctttttatctaaagacggatttttcttcagcggatgctgttcatgttctttccaggcattcagtgatattgcctaaaaatatttagtctgataatcaaaagggcctcaacctctttgattaacaggatgtagtttcctgtgagatggtgattttctgcaaatgctcctcagcttctgtataattatcgtttgtttttgaaggcacattttgtccttaagtgctatgaacataccctacctcctgcaccccgacttccctgactgccagtgacacccctctccccctttcggggttcaggctgcatgtaggttccctttggtcttcttaaggatggaagacgtgagtgaggggctgtggctacagcctggatcaacgtttctcactcatttgtgttcacagcacacttcttgaaatacagtttttgtttcaagtcgtgggtacggggaggggggagggatagcatcaggagatatacctaatgtaaatgaacagttaatgggtgcagcacaccaacatggcacatgtatacatatgtaacaaacctgcacgttgtgcacatgtaccctagaacttaaagtatatatatatataaaagaaatacagtttttgtttctgagtacttttaaaaatatttacagcagaaaggttgcaaagatagtacccagaaaaatgaataagacctactgtttgatagcacaacagggtgactatagtcaatagtaacttacttaactgtaagttttaaaataacttaaagagtgtcattggattgtttgtaactgaaaggatagatgcttgaggggatggatgccccattctccatgatgtgcttatttcacattgcatgcctgtatggaaacatctcatgtaccctacaaatatatacacctactatgtaccagcaaacataaaacaacaacaacaacaaaagatagtacacagagttctgtatactcctcacccactctccccaatatcaacatttgacatcaccaaggtacctttgtcaaaactaagaaatcaacgtgagtactttccttttagctaaactgtagacatgtttggattttgctagtttcttcactaatattccttttctgttctagagtcccatccaggataccacgttgtctttaatagagcacactttgatcatagaattttggttgtgcagtattgcataatgatgtggtaaagacaggaaacaacactaaacaagccagaagcgattacaaagactttactgccacagtgtaaaacgtgtttcctagtgtctataaaaacaactacataaaattactctctttgggtcagtgttggaatggaaccagttgttggtctgactgtgctcttgtatatgttcataggacaaagactttcatattccatatacccttacaaccactctttgaaaccgggttatgcgataacataaatcatgatgttacgtgatttagtttgcagcataacctgagcaagtaaggagaaatgatgacttgatgttttagaacataaaatccatcagaaagagcaggatgctattccagccggtcacaccctgactctcctaggacagttcccaaacggacttacaaggaatcccaaagcagacctgcggcttagtttctgaggacgctgtatagctcatatctaggaccatttatgagtccatatttaccgaggcacctgggatgtcctacacttaacttttgaaaatattcccaagtattttaacatatttgggagattgagcatggctcagacctgtagtctcagtgctttaggaggcaaaggcgggaggatcgtttgaggtcaggagttcgagaccagcctgggcaataagatgagaccctgtctctaaaaaaagtaaaaataatttgaaaagtaattgggcatggtagttcacaccagtagtgacagctagttgggaggctgaggtgggagactgaacccaggaggtccaggctgcagtgagctatgatcacaccactgcactctagcctaggtgacagaatgaaactctgtctctattaaaaaaaattaaaaattttgagggaatttcctagccaaggcagacaaaatgataagtatagatcgaggcatatataacagtaaaaaatatgtaagatagtgtaatatcagcagtgacttacacagataacattataaaactccaaaacatggattcctcaaaaccttattaggctgatactattgtttttgccatcataaggatggggaaactgaggctcagagtggttaggtggcttgtctaaagtttgtatagctacttagtggtgacactgggatttgaactgagccagtcagggccccaaggtctgtgattataaccactacattctattgccttttcttgtgatacaggtgtttgcagtgtgagtgggtcttcctctgggagtagaaactattgaaagatatgctaagtaaatggaaatatccattggcattttaggaaagagagctgtttccaaaatatacatccaatttacagccttactaacaactaacatttattgagcaagttactacatggtttgaatatattagctcatttagttctcaatcaaccctcaaagagccaggctctattctgccccaggggctttgcacctgttgtgcttcatgcctacagcacactgctccagccctctgtgcatctgatctttcctctttcacctcataccccagtggctatctcattagagaggacttcactgtctacatctgcccctcaagtcatccattatttcccatttccccaaccttttcttttctttttgagatggagtctcgctctgttacccaggttggagtgcaggggcacgatcttggctcattgcgacccctgcctcccagattcaagcgattctcctgcctcagcctcctgagtagctgggattacaggcagatgccaccacacccggttgatttttgtatttttaatagagatggaatgtcaccatgttggccaggctggtcttgaactcctgacctcaggtgatccacgtgccttagcctcccaaagtgctgggattacaggtgtgagccaccacacctggcccccattttctttatagcattttgttctcttggaagttgtctcactcattattttatttatgcctcttctactacaatgtaagctgcaggggagaaaatgctttctattgtcacaactgtaccgcccctgccccaccaggaactgggctgactcatggcagcagctctatacattttattttttatttttgtagaaatgggtctcaccaagttgcccaggctggtcttgagctcctgaccgcaggtgatcctgctgcctcagccttccgagtagctctatacatttctgtccaatgaataaaaaagcccatggaagatactctcatttgatgaatgagaaaattgagattggtggaaattaaagaactaatctaccatgatgactgaggtttgcttcaaacatactccatataaaattgtgggagatggggccaggtgcagtggctcacacgtgtaatcccagcactttgggaggccaaagcagcagatcccttgaggccatgagtttgagaccagtctggccaatgtggcgaaaccgtgtccctacaaaaacacaaaaattagcttggtgtggtggtgcatgcctgtaatcccagctacttgagaggctgaggcatgagaatcacttgaacctgggaggcagaggctgcagtgagctgagatcatgccactgcactccagcctgcatgacagagcaaaactctgtctcaaaaaaaaagaagaagaaattttgggagacggtaatgaaacagtcggaaaaatattgagatttattgtagctggttaaccaaatacatgggagttcattattctattccatgtttgtgcctatttgaaaatatatataataacatattaaaaaatagaggaaaattagctgggcgtggtggtgggcgcctgtagttccagctacttgggaggctgaggcaggagaatggcatgaatctgggaggcggagcttgcagtgagccgagatcacgtcactgcaccccagcctgggcaacagagcaagactccatctccaaaaaaaaaaaattagaggagttatcagtgacatcatagttaataaatagaggatccaggattcaaacccaggtctgtccgactccacagcttgcacatgctttgtctcacagtgaatatttgagtctcaggaggggtagggatcaggaccatctcaagaacttcaggaggtagactgagaaaagcatcttttcttagtccaaattatccagagagagagagaatatgagtggtttccagccagtcagtggtctggcttcagtcaatggatcagtggtctgaccctgcttccatcagttgagtggggtggcgtgcattttaggattattccttagcactgtagtggagcaggttctccaagaaaggtgtgcatgaggagggaaaggcgaggtagacggctgtttgaatcttccttgggggtgggcagggatgcatttgctttattcatccctgtattgccaatgtctagacaatatgctgtattcaataaatagttattgaatgaatgaatatatgaatgactctttagcacaaacttgattaaaagcccagtgaaactctaggactcttaggattttgagttttgagagaacttgactaatttcaactcatgtgaaggtttgattcttttctaggaagtcacagccaccaacattcttattcctgaaacttagttctttttcatagttgggcagactagttgttctatctgaagatctatgattctaagggttttggcatatgggttagtaaattaagtagttactaagagtgaggggatgctctacactagattagctaaaatatgtttgtaggttcagcacagtagcctgaaatgagtttgattgttttagatcaagaaattggtttttctcttgaggtatggtattaagtggtatagatggatctctgacattgaacatggctttgagggagtgcaatgaagaagtgggggacacagacttgaggggtagacaaccaagattgggtatttgctgtgtacttgttcactgtgcagtcttggaaacattaatcaaattctctgaacctcagtttcccattctataaaaggagtaaaactatgtctaccttacaaggttgttgtgaggattaattaacacatgtaaagaacttagcatagtgcctggtaacataaatattagttgttactaatattgtttgtagaatgagtgactattggtgcgaaagttggctgttcattaggggacaatgatacaaatcggcatgaattcattgtgcagttgtcttcacagtgaaaatgttttcactctgcgtgccagttgataacaccgtgtgtgtgtgtgcatgggagtgtttgttattactaatgtttcaatgcagatgagaaatgaagaaaccgtcaattccttcccaaggaaatagcttggatggagcagctgtcctgttctttgccatttgttcctgtcttacggttttcttctctttccacttaaaacacatgagcttttgttctgttaggaattactgattattttgtcttactggcagaccaggtcagtaagaatctgtatggtccccagcatgtcttatatttgcacccagaaaatgagattgtgtgtgtgtatgtgtgtgtgtgtgtgtgtgtgtgtgcaagcaacagagaaagacaacccttaaagggaaaaaaatcactttctgtaagttgtctcctgggctcttttcaaaaattgctactaatgctggccacatggcatagcctaattagatttgcattgcctttcccaagtgcttccaaccagctgtaggactatttgtaaagaaagcctaagtgctcaacacagtgtctggtttagtttaaaagatgccaagttctgttccttccataccagggaaagcttatccttggacacgtttcttttcatagagcatttctattggaatatctggattaagtgataggaaatgcctactatagcattgatacttagtgtggattgaaaggagtaataaataaaacaattgctttttttctgtacttatcacatgcatgctctttttggtattattattattattctttttagtagagatggggtctcgctatgttggccaggctggtcttgaactcctgacctcagatgatccacctgcctcggcctcccaaagtgctgggattacaggcgtgagccaccgtgcctggactgcattttgcttctcacaacatcttcataaaataattgaaatgtgtattgcactcacatattgtagatgaagaaactgtgactcagagagtttaagtaacctgcccaaggtcacagagatatttgctgagtaattcaaaccacagacatgaactatgtctacctggctttaaaccttatactctagttatgacctttctcatgcctttctaaaggacctatactgggcgatataccagattatgcctctttttctatttgttttccttactgattgatccctgctgagaattgcagtattagactacattcacctttgaaaatggaccaaccgagataaagtcaccatttctgtcctggaggactcagattttagctaattgtttgctttcctataattaatatttctattcaatcaacattccgctgatatttattaaaatactgctatgtgccagtcaatgtgccaggaattggaggtacaaggatgaattagacataaataggacatatcctcttggagcttatgttacagtgggagaaatggaaaagtaatcacgtaattgcaaagtagcatggtgggagtaagttcagggtgccatggagccagaaggaggcctccacaaaacatctgcctagtaacataaatagtgcctggtaacattggggctagaagggagggaagagatactaggatggcctttcctgagaaacagatattttgctctgaaagaaaaatacttcccatcaacttgctacgaatcagagtgaagaaaagcagaacattttcatggactgactttgcccaccgctgactgaggggaggactatttgtcttacactatagatctttcttgcaggtctgattaattttgtacaaattgcatacagggagaagaggattttgttctacaaggaccacactgcttttggttggaaaataagaatgccaggtcggccatgggaggaccgaaatttcaggatcagctgttaggagctgaatacagattttttttcagtcagcctgctgttcctttaatagattagtgttgaattttttcttcttttaataataacagccaatataaaattaagtaacattactaatatcgtaatacatatattaaaataatttataataaggttttaggaaactgccaaaaagaaaaatcccaataagcattctcaataaagttaattacaaggtgaaaaggaaatcctgttacattagtctgagaatgcagttaatgaaactaagtataatcataatctgaatatttcattaaatggagacttaaactcattactttaggtattaggtctggagttgtgtgctcataccaagactgccaatctcaaagcatagctgttttttacttacttatttatctggtgacagggtcttgctctgccgcctaggctggagtgcagtggtgagatcacagctcactgcagtgttaccctcctgggttcacgtgatctgcccacctcaacctctcaagtagctggggccacaggcatgtgcaatcatgtcagctaattttttttgatttttttttttttttgtagagacagggtcttgctatgttgcccagactgagctcgagctcctggactcaagcaatcctcttgcattggcctcccaaagtgttgggattacaggtgtgaaccaccatgactgcctgttttttacttatgtagatccaaatctttggccacaaaaggacatgggctcccaccccccatagatctgtccccggtgctgaaccacaccatggagggagttatccagttcaaaccacccagccagaaaagtctatctcatcacattttggaggtggagggagctttaggtaccatcttgcctttggtataccacacttctggtttcaaagatgattaaaagttaaaacaattagaagaattggagaccagcatagtgtgctgacttttcgattttgccaaaaaagaaaattaagtaaaaagaaactacttaaaaacaattgctttcatttcacaaaagataagggcattttaacatcaaacaatttaggttagaagtagttctcaaaataaaagacaaagcctaagttaaatgaagttagcctcatgaaaaactaattccactgtccttactttttcttatcttatattttttttttgcccctaatcagttggaaatgagaacatagatttgcatttttggttcttttcttaatgaatgagtatttattgagtacctactaaatactaggcactggggcttgtcattaggggtgcagaggttggttgtgtgtgtgtgtgtgtatgtgtgtgtgcatgactttataggctttataatcagaccatccattgtctgcattttacaaataatgacactgaggtctaggaagaagcatgagcttcccttaaggtacacaaccatgaaacttgtctggttaatactgttttaaaaatagtcattgaatatttaggacacaattactgatcacaaatacatgttaacttttcagttctccaagacggacataaggatgtgaacaaaagggatggacttcattgttattggtgtagaacttctctagttttgatgcctcacctactatccaaaggaagccctttgaaatattcagatattcttgacattttaacaaaatattgaattgcctacaacccttgaattggaagttgtgcaagggcagcatgtggtatttactttcctttattgaatagcaacaaggaatggaagaagctcctcattctgcagaggcattatttttaaaaatttagtgcatatatcaagtcaaagaatgtcatcaaacaattctttgataataactgacaaagacgttgcataagcatattaaacaaactgtttcttgtgaacattttggttctgctaatcagcttagaagtggctaatttcagatactggtactattctttaaaaacatgttttaatgaacagatacttctgaaaagaagacatacatgtggccaaaaaacatagaaaaagtgcaacattactgatcattagagaaatgcaaatgaaagccacaatgagataccatctcatgtcagtcaggatggctattattaaaaagtcaaagaataacagatgctggcgaggttgaggagaaaaaggaatgattttacactgttggtgggagtgtaaattagttcaaccattgtgggagacagtgtggtgagtcctcaaagatctagaagcagaaataccatttgacccagcaattttattactgggtatacacccaaaggaatataaatcattctattataaagatacatgcacctgtatgttcatcgcagcaatattcacaatagtaaagacttggaatcaatctaaatgcccatcaatgatagactggataaagaaaatgtggtacagatacaccatggaatactatgcagccataaaaaggaacgagatcttgtcctttgcagggacatggatggagctggaagccattatcctcagcaaaccaatgcagaaacagaaaagcaaacactgcatgttcttacttataagtgggagctgaatgatgagaacacatggacacagggaggggaacaacacatactggggcctctcgggggttgggaggagggagagcatcaggaagaaaagctgatggatgctgggcttaatacccaggtgatgggataatctgtgtagcaaaccaccactgcacacgtttatatatgtaaaaaagccctgcacatcctgcacacgtagccctgcacttaaaataaaagttgaagggaaaaaaacatgttttaaatgtcccagaattgcttccacttcaggggttttacatacgctcttccctctgcctgcaacaagcttcctccagatctttgcaatgctggctccttctcattgtttaggtcttgggtaaactgttatctttttggggggccttacctacagaaaatatcccagcccatgtaaagatctcaccatcatccttctctattaggtcactgttttattttcatcatagttcatatactacctaaagtcatcttgtctacttgctcctttcacattttccccacaacatgttagctccaggaggccaggaatcttcctcccactccctactgtattcccagtgcctagaactgtgcctggcacacagaaagtgctctataaaaatttttcagatggaataaatgctgtcaacatacaatactgagcacattttatcaagtaaatgctgctattactttttctttgtcaattcattgggatcttatttcttgtggactaaaccttcagtgctgttatcagagtctagcaaatgccaagttgagtatcaagagttgttgcatacatttaaaagctcatgaatacatattccagcattacctggcgattatgaaatgtcacacaaaggcagtgttttcaaagttcggcccaccaattcaatcacaattgatttttgtcaaaagcattttcctccttttcatttctttcggcttctctgtatcatagtttgcctcctaatgtcctgatccatgctgaccctcaatttcactagcatgaaagcaaactaaggagggaattgggtgtgtttaatatttatgacatgactatgtcgtgttgatgtgaataataatgaaaaaaaccttaacactggtgatgcaaagtaaccttaataatctcctgcttagggtcacaatattgattttagtgcattgccaaacagactattaaatctctaacagttatgtttcacatttaactattatttttaaaagaaagtcttaaaacacagagagaggaagtgataggtacaaagggaaaaaaacccataacaactccacagatcaatttcatatcctataataaggcaatcatccaatggcaagccccaagccctggcttatttgtggttaaaatcaagcacttacctactctttgactttgaatccaaaaataccccaaatgtgttaccagatcttataatccccacccctggagcaaaatcaggtcaagctaagaaaagcacttaagaacaaaagatgcagtctctggatgttccgtcacgaatgctgggagcatcccctgtgctcccaggataacttttagtaaaagtacgggaggaaagtgggatgtattatgtagtggatacaggggatggagggaggaggttcttcttgcttaccttttcctggttttcgatctttgtgtgttattgaagttgcccattttatttcactttttaaaacaatttcagctttcattttagattcagggggaccatgcacaggtttgttacatgggtatattgtgtggtgctaaggtccggggtgcaaatgatcctgtcacccaggtggtgagcatagtgcccagtagatagttttccagcccttgtatcccatctctccctttctcgccctctagcattcccagtgtctgttattcccatctttatgtccatgtctacccagtatttagatcccacttataagtgagaacatgtggtatttggctttctgttcctgtgttaacttgcttaggataatggcctccagctgcatccatgttgccacaaaggacatgatttcattctctttttatggctctgtagtattccatggtgtatatgtaccacattttctttatccagtccatgtttattgggcacctaggttgattacatgtctttgctattgtgaatagtgctgtgatgaacatacaggtgggtatttacccagtcatgggattgctaggtcagatgaagttgcccattttattaagcaagtactgtatgtgaaacaccatatgaggcatactcagggtaaaagtaatgatatcgtttggctgtgtccccacccaaatctcatcttgaattgtgcttcccataattcctacatgtcatgggagagacctggtgggaggtgatttaatcatggagggcaagtttttctcatgctgttcttgtgacagtgaataagtctcatgagacctgatgggttttttaataaagtgcagtccccctgcacatgctttcttgcctgccaccatgtaagatgtacctttgctcctccttcgccttctgccatggttgtgaggcttccccagccatgtggagctgtgagtccattaagcctttttttctttataaattacccagtctcaggtatgtctttattagcagcatgagaacagactaatacaagtaataacactcatagttagcatttatgggatatttgctgtatgataggtgtttcaaatatatcttatttaatttacttcacaactctgcaaagtgggtaggattatctagatttttttcttttttgagatggagtcttactctgtcacccaggctggagtgcagtggtgcgatctggactcactgcaacctctgcctcccaggttcaagagattctcctgccttagcctcctgagtagctgggattacaggtgagcgccaccatgcctcgctaatttagtatttttagtagagatggggtttcaccatgttggccaggctggtctcgagaactcctgacctcaggtgatctgcccatcttggcctcccaaagtgctgggattgcaggtgtgagccactgtgcctgcctgggttatctagatcttaaagagtaaaagacacagactctccatcaagtatatagcagggtcagggttataatacagtttggtctgactctgaagcctgggctgtttcttccatccagagtaggcaagtaggtttcattttgggtgttgtcactgatgacatgtcgtggctccctgcagtggagtgttgaagatgatttggaggccatattccagctcagtgggcatgagtgctgtgattgattagccatgtctgctgtgagaaaagaacagaaggatggtgctcgtgtgccatctatttactctcttatttctgctacagatataataaaagtccctcaaaggacttatgattttgcaaatgaggggaggtaaatatataaaatgagggaatatagaccaaattgatggattgggaaggcctcaaatacgtagtgcctaacatatggtgtttggatgtatagtaggtgattagcatatctttgtttaatgaatgaatgaatatatgaatgaataatttgaaacatataataaacttttattcttttatattctctaagctatttccctgcatcgagtcagaccaccataaaaccacatatcagaactgcattcctttagttttctataggaatgccaattcagagttgtctttgttgtctttttttttttgagatggagtcttgctctgccacccaggctggagtgcagtggctcgatcttggctcactgcaacctccgcctcctggtttcaagcaattctgcttcagcctcagtccctgtagctagaactgcaggtgcatgccactgtgcctggctaatttttgtacttttagtaggatggggtttctctgtgttggccaggctggtctggattcctgacctcaggcgatctgccctccttggcctcccaaagtgctgggattacaggtgtgagccaccatgaccagcccagaattgtcttttaatagtatatccttgatttaaaaaacatagttgatataacaaagggaaacataaagaatggttctgtcttcttgcaaatctgctgttgaaaatggggcacattatgttgtgccatatcctttatctagagaatgacttccatagtacacattcattcaacaaatctttttcttgtgttatctagttaggcactgtgttaatgaaccaaaaaacaagccagggttctgaccacgggagcctatgttatagtgggggaagactgttcacacagccagtaaataaaacatttaagagggtgataagtatggaggaaaatgaggaaggtgatgggagaaaaaataacaaggctggtgtcactgagaaagtgatcattaagatgagacccaaggatgggaagaaccaatctagtgaagagtggggggaaagggcattctagccaaaacaaaaaacaaaaaactccgcaggatgtgcaaaggccctgagacaggaaagaaattcatcatgcttgtggaagtccagtggggctgaagtctggcaagggaggggatgagattatataaataaatgtagggaaatgctattcagaaaaaggaacaaagtaagatactgattatagactatagctagaattctggagcaactgctatgcgctagacagtatgttaggtgttttatacatgtcctattgtgtgtcaatgcttgacctgaccatccaataatgcttcccagtggatgctccattgaacactagtcctttgaaatgttcttcaaaattagagttccttggccaaataaattaaagactcctagaatatatgcaataaagccatttacatttatgttcatcccagtgtttttcaaactgatatatccattaaacacctttttatgtaacaactattgatatataggggaaataatgttctggagagaagactttgaagaaagctattggattaatgtttagctggccctccttaatcactttctatggtggcaaattcgttatgtctcaaggcaatacattttgttttcaggcaggcttcattcacagtgagtttgccctatggacatttcaaagttatcagccaagcccctttaaaatcgcttaccaaaggaagtgaaagccaaagccatcaataattttctttcctctcctctctgtaccctcatctctctcatccttcaaggcttagggtaaatagtttgtgtcaggaaattttggttacaagcaacaaaagtcaattcttcttcagacttaagcaaaaaagggaaatcttttgaagaatatgggttggctcatagaactgaaggaacgtctgatggtccaagtttgggatgtcaggaaccagggcagctccaaccatggtcttattggagctctcctgctgatatgaattattccaacaattttgtctctctttgtgtccattcaagtgtaagattcttaaacttgacggtctgattggtccatattgagtcacatgctcaccccttggctgggaaggacaggggctttgagtgacagtctcaccaaaactgcacatagtgaggaataggaaagtctccaccataaaattgagatgctggtcagaagaagtaggaaatggatcatgagtattcaaaaagggaaacaaacaaacctctaaagacccaaacaaattccatctcctctctgatctcttctctgcatttatgtatatcttggtatctgtccaagtcatttccatcccttagaattctaccaacatctagatgctgctgatgatatttcctgcgttattttcttgccctgtggcttagctcctgtggtgctccttatctgtgggcgtgtgtttgctttttgtctctaactaggcataataatgaagcctatggaatgtctccagcaaaaatgggcatatgtgatcatgggaagctcattcatggggaaggaaaatcgaataattagaagggacaggccgggcccaggggctcacgctggtaatcccagcactttgggaggctgaggcaggtggatcacttgagctcaggggttcaagatcagcctgggcaacacagtgaaaccccatctgtacaaaaaatacaaaaagtagctgggcatggtggcacgtgcctgtggtcccagctacttgggaggctgagatgggaagattacttgaacctggggaggttgaggctgcagtaagcagagattgtgccactgtactccagcctgggaaacagaacaagagcctgtctcaaaaagaaaaaaaaaaaaaagaagggacatatgagatggaggatatattgaggggaaggagatgtgagtggacatgagggccaggagggaacgtgttctcagaaggctactgaggcaggtggaaaggaactagccttacttgaagagaggggctgccttccagagtgaggagtgatgaagccgactgacaaatggaaggcttagaagtccaggtaagggaatttagaacggagtctctgggagttcttgagtagatgcatcgtctgatgtcccttcgctagcaggtgcttcgttgggttcttgggatgacgggtgagaaaggcctttaagacaatttggggaagctctccagcaatctcaaacagctgccaccaccttacccaggaagtccttgttcccacccttctccaaagccttttgagggttgctaggaaactggggatacttgagcagttgggatctgattataataattttctaggtttccatggctggagtaggagccaggttggtccaatgtcatattctcttaccttactgtggagcacagtgaggcataagtgtctttaagttatgtgaactcaactctgtgatctcagttcagggatgggagaagggatggaggaggggaagaaagagagagagtgtaacataaataatgtgagtatttctgtttcccattccacacaatgagcatatgctcaaagtgagatgggagacatgagtctgcttttgcttcagacagactcacttcccacgagcttctccagagtgtgattctagcatttaaagatatgcatttttcatataacttggcccctaaacacaagccagttacttcatctggtgctgaaccagagaaacagccatcatgggtaattttggctgaatatgattttagctgctccctctggcctcagatctctacacgagacaagactctactgttattttgtaaaacccctactcggtgcctatgaatgatgccatatggctcctgcttgtttacagatttgtctaagcccttgaggtaaacggaatccaaccattgacacccttgacacacagcacgggttggctagagggcggtggggtttgtgtatttgttccttactccaacactgtcttttaagatcactattgtaacctggaacacaggatatcccccaagtaatttcacatacttagctggtcctcttgtgaaccacagctccttcccctgtgttgtacaagcccacctatgtgcatattttttgaaattttaagaattgagttttagatgatttgtggagcttggaatttcccagaaggatgacttgctcaggtctctaggcagtgtcttatgtctagcagtctgtccatgtacatatagtacatttaaaaaaattaacgtatttatctatttgaataggtcaatatgtacatggtagaaaagaaagtaaagcaatattcaaggacgtgaagcaaacactaagtgccctctctcctcaagcactctaattctcctctccagagtcaaccactgtaataagtttattgtctgttctcacaaagatattctatgcatttactaacatttctgaacacttctgcaccttgctgatttcatttaatagtgggcatattagtctgcttgggttggcctaacaaaataacacagactgggtggcttaaacaacaggaatttattttctcacaattctggagggtagacataccagaccaagtccatcagggacagttttggagagggctcccttcctggcttgcagacagccaccttcttgctgtgtcctcacatggtggaaagagagagagcactctggtgtttcttcctcttctgataaggggacccaccctgtgagattagggccccatccttatgacttcatttgatctttgtcatcttctcacagaccccatcttcaaatacagaaccattgggggttagggtttcaacatatgaattttgagggcacacaaacattcagtccataacagtggatactggagacttttttttgcttttggtctatttagacctagatatatcttttgcccttttgctgtgagctgagcctggaggattggtaccagctgtgattttataaggtgaggcagctggaatccagagaggtaaatggaatccaactattgaaacccttgaggagcatacagagatcttggccagtggccaccagtctctccttgatgaactgttgctggacttgtagaatggattgtgattcttatgaggccatggctgtcctcaaagcttagtgtaagagggaaagccttggttaggtgttggggtccatcccgagaaggggaagaataaagctatgcttgttccaatctgtatattttccgatgggtcagttcttcatcttccagaagctcagcagcctgggggaattgagaccatagtggggctatcaatgacttactgcaactctccctggaatacctctctcttttcttgctagacaagtcttacacattttgagaactcaaggcaaagctcagctccttataatcgatctatctgtttcttccactcccatgactctttcttagtgatgtgctcaattctgttctctccaagtcagcttacatttattgactcctaggggctaattctctctctctctctctcttttttttttgagatggagtttcactcttgttgcccaggttggagtgcaatggcatgatcttggcttcctgcaacctttgcctcccaggttcaagtgattctcctgtctcggcctcctgagtagctgggattaccggcacctgccaccacgcccagctaattttttttttgtatttttagtagagagggggtttcaccatgttggccaggatgctcttgaactcctgacctcaggtgatctacccacctcagcctcccaaagtgttggaattacaggcgtgagccattctgccttttgactttccatgccatgttgcctttgactttgatttttgtggtgtatcttaattttcctaggagtctgtagttttctctctaactagattgaaaacacattgagggcagcaaatacttctaagttctccctcccatgttgagtatgtgccatgttccaagtaagcattgagggtggatattcattgagttagtacattcagatgatgttttgggggaaaaactccatcaggaagtagtttcatctcttctctcctctcccctcctctcctttcctcttctctcctctccttttctttccttctgatggagtctccctctgtcacccaggctggagtgcagtggcacaatcttggctcactgcagcttctgtcttccaagttcaagcgattctcctgccttagcctcctgagtagctgggatcacaggtgctcaccaccacgcctggctaatttttgtgtttttagtagagacggggtttcaccatgttggccaagctggtctcaaactcctgacctcaggcaatccacccatcttggcctcccaaagtgctgggattataggagtgagtcactgcgcctggccaggaagtagtttcttttgaatatccctgattggcccatacttttcctcccagaggtttgttgttggtgaaatacaacccttgtgtgcactggtcacaagcccttttcattgtactttgaatggaatcctgcagttgactatgagaatgagcgtggaccatagttctcatttatgatttaagtcaaccccatgggaaatttatactcacggaggttgtcacttgtccaagtggctatgttgggatttgaatccctagatctgtctgacttgtgctttttttccactccatcaacttttcccaaccttcctctttccccatcacctgcctctccctgtctattgtgctattcaatgaaacatcatagagaggatagatgtgattcagcatctggcatatacctgctgtagatgctgtagaacagattctctgcaagtgcttgttaatgtaagttctctccgcagaacctcattctcttgagacagcaatgctgagaaagcaaatctgggactggggctgtgatatattcaaatttgacagcctcatcctcctcctaggtgattctgatgtcagtggtcctgaggccatattttcaggaatactgccttaaaagtcattattatccaaccaacgaattcttactctgtaggcaactaaaggttgacccttcccaagggtcacattttaatggtgtgtttcacttttaaccctgctggggaggagagaatttttgattggatgatcttgaggggcagagtgttcttctgcctgcttgtggttccatcatggtcactttccaaggtctgaggcagaggccagagcttgggcttgggggcccatcttgccattgttagatacagttagtttccctcttctaacagcttatccagtttccctgttctctatactataattccaaatacccccttgcctttgctgcaccccagcttgtctgaatatgcctaggcatgcctgaacttgctacaaccccagtccacattcctttccttattcgggaataggttaccttcctagtccccccataaatgaccccccatctctctcttctcacctcactatgtgcctgccttatctaagaaagtttaaatgtcaagccaatcaggactagtttagactgtgcggtccaaccctagccaataggggaaagacacagaggcagaagctgcattagagaaaataaaaacccctgctttcctttgttctgtgtgctctcaccattgctccatatgcaagatgcacccttctacagaagtaaatttgccttgctgagagatgctttgtcctttgtctcagtgctagtgtctttgcggcactgagcatttgtttccaacatatgcattcaaatccatgggttctgtctctttctaatggtgtaacctcgggggaggtgcattactcctccttcctctcttaaaaaatggtggtgttactatccagttacttagatcactgtgtagatgaaatggaataatgcatgtaaaacccttggcacagttcctaagacaggcaaaagaaagaaacaaaacaagaagaaacaaacaaagccaaaccctgtcttccctaccgtcaccagttatcatgttttgctaccaacctggtttcatctgtggcacttgagtgaggcacacagttggaatgtacctttagaaaaatgtttaaaactttttggccaggtgcaatggcttattcctgtaatcccagcacttggggaggctgaggtgtgtggatcacttgaggtcaggagttagagaccagcctggccaacatggtgaaatgctgtctccactaaaaatacaagaaaattatccaggtgtggtgtgtgcctgtaatcctagctacctgggaacctaaggcaggagaattgcttgaacccaggaggcggaggctacagtaagccaagatcatgccactgctctccagcctgggcaacagagtgagattccatctaaaaaaaataatttaattgttatattttaatgtttttgatacataatagttgcatatatttgtggggtacatgatatattttgatacagtttgatacaggcatgcaatgcataataatcacatcgtggaaaatgggggtatccatcccatcaagcatttatcatttgtgttacaaacaatccaattatactccttcagttattttaaaatataaaattaaaactgtacaattaaattattttgtcatgcctataatcctagcactctgggaggctgaggcaggctcacctgaggtcagttcgagaccagcctgaccagcatggtgaaaccccatctctactaaaaatacaaattagctgggcctggtggcacatgcctgtaatcgcagctacttgggaggctgaggcagaagagtcgcttgaacccgggaggtggaggttgcagtgagctgagatcgtgccactggactccagtcttggtgacagagcaagactctgtctcaaaaaaattaaataaacaaataagtcattttgattatagtcaccctgttgtgctatcaaatactaggtcttatttaaaccttatcaaagcatcaccactccaatgcaggtttgggggcacagtggcgggttttgtttttgtttctgtttggctttgtaaggataggttacctggattaatttgttgcttgggctggagccatttgggaccctcagtgcagtgacagcctgatggtaatgtgagatcccaacagcttgaattaatcatggagacaggaggtaaagaacagggatgctgtggaggacagttcttgacatctgcaggcacctctgtgcaacccttctcagggatgaagggcaggaggtttcaattctcttgtatttccctcctcgggacgggagagtggaaccttcagaagttggtacaaatgagcttgcactgagagggaaagggcagaaatgggctgagagtcagttgtggctaaaatgtttggggaccagttcctggaacactgacacttgcagagagcctctggatgctggcatactcagaccacattgcctttcttccaactgcacagaatcaagttgaccaaccatggaagcatgagtccctcagtgttcataacagatgctctgaacagcagccttatacatcccattattgaattcgctgcaaagtgtcagttaatgaagacagcatcctccatatctcccagtagttccttgtataatgcctattgtgctttgagaaataagtgctagaaaaaagctttgctggtcctaaggaacttgagcattctcacttcatgcttaatgagaacaatgtagttgaccgaatttcccttttcactttgtttacccagaagcgcacagccacatttgaaactgcatccacctcatctgctttctgttttccattttgctctcatcttggcatatgccctgtagtatgccgtagtcttttaggctcaagggtcagaaacctaaagcaaagaaaaagaggagtttattgggacgtgtctctcacctttaggcacacgtaggtctcaacagatgttctcggggctctgactttatggctctatctctagattttgtgtgcctctcttggcttagttttcagacaggctctttccctgtggtggcaggatggtcaccagcagctgcaaaccagaattgtccttacagctccaggctccagagaaggagagagcacatttccctacagctgttgaaaacccttggaaagtccatgattgggctatgataggtcgcatgcccattcctgcaccagtcactgtgacgaggggaggtggtgctctgattggttggtcagggttcaggtatccactgttggagtgggtggggtcaactccacccaaatctcacaggttgaagagaattataatggaacagagtatggtgtgtgtgtgtgtgtgtgtgtgtgtgtgtgtgtgtgtgtgtgtgtgtgtgtgtgtgagagagagagagagagagagagagagagagagagagagagagagagagagagagagagagatcctcaggggagatcttcagagaacagaatagaaaacaatgacgaaacctctacctaccccttattctaatttatatttccctgttttgaatgtatgattgtttatttatattttactttgctgtcttaaatcctttgtgaaatgaggtggaataaataaatgataagatgtgtaaactgccttaataaacaagtgaatgcatctctccttacagaaggagggtagggttgattagaggtaacagtcaggaaactgagcatcagattgagctctggaatgtgctggaggtagaaagtttgtctcctgttggccatggtgcacagctgacctccattctgttctgggcatgcctgttagaaaacaccctgcctccatttgtagatattgatgaggggctcatctaatatagatcctattttacagattaataacaaaagctaagataaagacactagctcagggttcacatcttgaaattcttgacttacttgtttattgtcattctgcctttcccctccatttttacattattttacatttttaataatttatttatttctcaaccccaacactattgatatcttgggtcagacaattctttgttgtggggctgctggtgcattgcaagatgtttagtagggttcctggcctctacccactagatgccaatagtcctcgcttcccacccagttatgataaccaaatatgtctctagtcattgttgaggggtgaaattgtcttggttgaaaaccactgttgtattagaatatgacttccaagagaagaggaatcttgtgtgacttggtcactgtttaatttctcagcctagtacaatgtctggcacctaggagatgctcaataaatctttattgactaagggaattaatttgctttgaactcttatttctaggctgtcttgacctccaagcagcaacatttctttctagaagaaacctaaaattcaaagtttatgtcatcaccctctctcaggtacttgacagtcagtcaatacatgctagcatctggcattgttacgatgatgattgtttcttcctggaagattgctgagcccaaagccatggattattctgctttttttgttgaccttgcacgtttgaactaaaagtcactggtgaatcttgaacctgcagggagagactggattgaaatagctggagaatgggatgttggcagcaggcatagaggtttgaaggactttgggaaggtagcgttccatgaaatgaccctggcattgggttcttggagcctaagttctctagctagaaagcagctgtggaacttaaatgttccttatgcaggaatagtactgtaccctccacacctccctaagactgtttggaaaaacgtaggaatttttttcagtatcagtatcctgtggagctgccttggtttgactttcctacaagcagatgctgagacaaggatatgaggacaaataatttatttgagagttgatcccaggaaacactgttaggtgagcataagtgagatagggaaacccatcaagggtgtgtcatccagttacaaccatgggcaactggagctcagtcctgctggagaactctgggggagcaagaagaacgtgccccagagtcattgcaattgaagagcaaggaagctggggggcttatccaccaaattctagctcaacattgcttgagggctgcttccaggggcattgacactctagtacttctggttgttttgggtgagaaccacgtgtgttttttagccagagcaaagttaccaggcagagagccccaggtgtttgcagctggcactcttgagtgtggaggtgagtgttgaaggatcgctatagggaactgacagtgtctgatacaggacatctggtgggcaggggctgaatatctcacagcacatacggcagcccctcacaggtaagaattatccactctgaatgccaatagacatgcctttgagaaacatgatgaatgggaatggatatttcgtttggattcctggaagagagaactctgttttatttttatttataaaatcaataagtgttatttttcctggttataaatgtaataggtactccttgaagaaaatgtgaaaagtacagggaaaaaatccttaaaggagacacattttaatgcatttctttcttgttctatgtaaagtctgtagaaataattgttacaagaacaagttctgggttcaaattcagactccaccacttactagttatgtggccttgaataagttagttcacctccctgggccttagttttcccaactgaaaaattggaatgataatatcttatagggttgttttgagacttaaatgagatgatatatgtagagtacttggcttataataagaactcattaaatgtggtatatacatacacatctccttttaagaatgagaatatggccaggtgtggtggctcacacatcctggctcccccagagcaacgagatgagcactttgggaggctcagacaggtggatcacttgaggacaggagtttgagactagcctggccaacatggcgaaaccctactaaaaatacaaaaattagccggatgtggtggtgcacacctgtaatcctagctacttgagaggctaaagcatgagaactgcttgaacctgggagggggaggttgttacatgagttggctaacctgttttcccagcaccatttattgaatagtacatcctttccccattgattgtttttgtcagctttgtcaaagaccagatggttgtagatgtgtggtgttatttctgaggtctctgttgttttccattggtctatatatctgttttggtaccagtaccatgctgttttggttactgtagccctgtagtatagtttgcagtcaggtagtgtgatgcctccagctttgttctttttgcttaggattttcttggctatagaatctcatagtcttattgggaaagatacaacttgaaagcataagggaaccaagtaaaaagacaataccagcatggagctagattgtgtttcctagaagcaaagcctgagtcaaggatttgggggcatttaatttatcgaggagattctcttagaaggaggagagcaaggaaggaaggtagggcaggggaacagagccaagcaaggagatagtcttggttggagacaagctgcagcttgataacagagaaagttctggaacatggattgtaacaccaagttggtcctgatttgaggcaagtggctggtgttttgaacttttgtgtcagtcagtccccggctctggctgtccctctggctggaggttgggggccgagtaatttcctagaagagacattctcaatagccatggcggagaagggggcagctgtgagccattagcaaccaacattctcaacagctggtgaagggcatttgagcagggcactgcatggccattgcagttctctagggcaggaggcagcaactacagcccatgggggaattcctgcttgccccctgttattgtaaattaagttttactagaacacagacacgctcattttttcacgtattgtccatggctttttctgctgcaatagcagagttgagtcgttgtgacagtgactgtatggccttcaaagcctaacacattcactctctggccttttaacaaaaggtttcccagcatttggtcgaggggaataagagaaataagaggggttcactgtaatctgggtggtcccaaggtgggtgttactcttactctgggatgtggggaaatggcgaggtttgggttagaggtgagaaagctggaagaccttcaaggactagtgggttaatgcaggtacaggagaagcaagtatacctggaaaaaggtatatgactgtagcaaacaagcgtgataaggtacagatccttctctccaaggaccatgtggctatctgggacagtagcttgtttaagtgaagaaatccacttaaggctcatttccagggaagaattccatttagaaacccttaatcaggggagtgcatggtctggggcatgttaaacgcaaatgcattcaaacgtaattatttggagcagctataaacaagtctggtcacttaagataaagatgtaaagcacacgctttgccttcatcagagcagcaaaaggagaaaaggatatctcagtcctcgatgttggtgaatagttagcaggaattcattcagcttggggagacatcacgtggtggctaacagggacatcgggacagcagctcttgaaatccacgggctatttttgtcaaaggagaattcagttttaaatattcgatgcttttaggataactcatctatcactgggccaatttaagtctcattaatcacacgaaggaaagaactccctgccccttgaaggtatcagtgtatagctgcgaaatggaggcctggttcctctgagaaatagaacacaaatggtataattttgcaaagatgggagcaagagtgatcccccaagtagtgaccgttccttgactcaaaattgccggttgtgggttctgttgccaaacctggggccacctgaatcgacagggtttagaagatcatgatgggaatctgtggatcacatttgagaaagcatagggttggataaacaccatagcctttggggctaggtagcctccatttattgttttccctagtaagaaaagactgtgtactagacaatgtgtgccaaaccaattgtgtgccaggatttgtgtttaaggtgcttagtttaatctttataatgcgtctatgatatctatgccattagcccttttacatatctgaaaattgaagtttagagatgtctactcatttgctcagggtcatagaacttgaaagtggcagagccgggatttgaaccctggtttgactatttctaaacaaaaccaagctcttgaactattatatgatactgcactcaaggagagccactctcatcagtaaaggaggacttactcaccctggaaaaactggaaaatacagaatggtagaaagtagaagaaaaaccaacaaccattaattctaattgccccaagtaagttattgacaacattgtggtgtatttctgtctttgtttgagctgctataacaaaataccatgattgagtagctcacacacaaaagaagtttatttctcagagtttggagactgggaagtccaagatcaaggtgctggcagattcagtgtctggtaagggcctgtttctcatacacggtgacttcttgtgtcctcacatggtggaagggagaaacaagctccctaggatctgtctcatacaggcattaatcctgttcacaagggctctaccctcatgagctaatcacgtctgaaggccccacttcttaatatcatcactatggggcctagaatttcaatgtatgaagctggggtgggacacagatattcagaccatagcaatatccttctaggatttaaaaaatgttcatatctgaaaaaacacatatttgcaccatgcatttttgtcttatttttcccaataaaccaacattatgccataagcatttaaatattatatacctttgtaatataatttcaaataacctcataatatttcaccatgtggctggatatactcatctgtgttagtttccttatctttaaaatattagtaatatttcccactgcatggctgtgtggtaggatgagataatggcaattaagtgtctgatgcatgataggtactcagtagatatttgtacccttctctccctgtattaagaaagttccctaggagcagagcctgagataggaattcttatgcaaagcatgtattatgggagtactagcaggaaaagtctggaagggagtgatggctgcgagagtgggcaaggaagcaagtgagtcaagaacgaggtctccactggagcccagccacagcctgattccacgggcagctctggagcgtgaactgcaccacagtcagccccactttgaggcaatggggttggccttttatttttccatgtcagtagtcactggctgtggactgctccttgaggagagggaggtaaaatgtttgggtgaggcacctcctattcaaccaaggggtacagtttagagcaggcctttccaaaatgtcagcccctagccacatgtggctacaaagcatgtgacatgtggctagtctgaatcaaggtgcattgtaagtggaaaatacacactggattttgaaggcttagttgaaaaaatagatgtcaacatcattaataattttaaaaaattgcttacatgtctaatgtgataatattttgaatatactgggttaaataaaacatatgacatattaaaattaagttcacttattttttatattatctttttaattgaggcataataattgtacatatttgtggggtacttatgatatttcagtacatgcatacaatgtgtaataatcaaataatagtaattaggacatccatcacctcaaacatttattatttctttgtgttgggaccattccaaattttctcttctaactattttgatatatgtaataaattgttattaattatagttaccctactgtgctactgaacagtagaatttactgcttctatctagctgcagttttgtacccattaaccaacttttccccatttccacctccccactacttgtcacagcctatggtaaacaccgttctattctctagctccttgagataaacttttttcgttcctacatacaggtgagaacgtgcaataatttgtctttctgtgcctgacttatttcacttaacataatgtcttcggattccatctatgttgctgcaaatgacaggatttcattctttttaatggctgagtaatattcctctgtgtatatataccacattttctctatccattctttggtggacatttacgttgattccatatcttggctattgtgaataatgccactataaacaagggagtgcatatatctctttgatatactagtatcttttcttttgcatatatacccagcagtgggattcccccgggaaatgcatctcaaaatcacaatgagaaatcatttcaccccagttaaaaggctgttatcaaaagggcaaaaaatagcagatgctggtgaggatgtggagaaaaaggaactctagtgcactgttagtggtaatgtaaattagtacagccgctgtggaaaacagcatggaggttcctcaaaaaacgaaaaatagatctaccatatgaccttttaatttgttttttttttttgagatggagtgtcactgttgccaggctggagtgcagtggcatgatctcggctcactgcaacctccacctcccgggttcaagctattctcctgcctcagcctcctgagtagctgggattattagctaccacggctggctaaatttttttttttgtatttttagtagagatggggttttgccatgttggccaggatgatcttgatctcctgaccttgtgatccacccacctcagcctccaaaagtgctgggattacaggcgagagccactgcgcccggcccttttaatttttttttttttttaaatgtggctacttgaaaagttgaactcacacctgtaatctcagcactttgtggggacgaggcgggtggatcacttgagatcaggagttcaagaccagcctggcctacatggtgaaaccccatctctactaaaatacaaaaattagccaggcgtggtggcaggcacctgtaatcccagctacttgggagactgaggcaggagaattgcttgaacccaggaggtggaggttgcagtgagccaagatcgcaccacggcactccaacctgggtgacagagcaagactccttctccaaaaaaaaaaaaaaaaaaaaaaaaaaaaggcaaaaaagcaaaaaaaaagaaaagttgaacttacacacctggctcacgcttgtggctctcgttacgtttcccttgggcaacatcactggggggtagaagtcgacacactttttctataaaagaccagactgtaaatattgtcaactttgcagggtgcacagtctctgttgtagtgactccactctgcagttgcagaggtgaagctgccacacataaaatatatacaaataggcatggctgtgttccaagaaaacattatttgcaaaaacaggtgttgggctggatttggcccatggactgtatttcactgacctctgctgtagaaaaaaaatcagctgtgaactgttagcagccagtactcatattggctggggatggcggtgggggaggggtgcacctgcctggtaaaaggatctgggggaggaaccaccagtgtgtcctctatagttcaatttctctcctggttagagaagaattctttttccagtgattcttccctgccttcaccactgacctctagatactttgtctttaaaggaagaagctttgttaggggttgcggtggagcagggaacttcacttcagggagcttggagtatgaaacactcctgcctcagaggctgaagatggagaaatatgcaggaggacaaacaaaaccaaacatttattttcttcttacaattggaggaaaggaacatatgcatgtcaatatggcatttgaagatgctacttggtattctgcaggtctgtgcaactggtctaccctggaaggcggaggcagtgtctagggacttaaatgatttttttttgttttaaataacacattcccccagcttttgctaatgcagacgtaaacatggaatttttcaattgagagcaattaacatataatgccctaggccaggagctaattaatacaaaatcctggggaaacagcagcactgcagctcatgctttcccaaggtggaattgcttcatcaaaatgattcttggtctccagagaactttctgtgacctgtttaggctggaattggatgtctccactgggcctgtgcatctcctctggcagccccgtggcacggtccctcctcacaaatgtggaggatctcccagagggcccttcagctgacgtgtggttgagtcttccccagtttttatccattgatatattgggataatctcctctgtcttcagtgtcctcctgttagaatccttttgttccttaaagtcagaattgacatcatctgatgtggtttagctctgtgtccccatccaaatctcatgttgaattgtaatccgaactgtaatccccatgtgtcaagggagggacctggtgggaggtgattggatcatgggggtggtttcctctatgctgttttagtgatatgagtgagttctcacgggatctgatggttttaaaagtggcacttcctccttcactctttctcccttcttctgccatcgaatacatgcctggcttctccttcaccttccaccatgattgtaagtttcctgcagcttccccagccatgcagaactgtgagtcaattgaccctcttttcttcataaattacccagtctcagggagtagctttatagcactgtgagaacaactaatacattgtcctcctttctgccccctcttcctttcacaaatgtttattgaacacctactatgtactgagtgtgttttaggcactgtgtatgaggcaggcacagctcctgacttacatgctaatggggaagactaataactaatatgtaaataaatagtaaagtatgcaacttcaggaagataagggctgtgaaaaaataaagaaggacaaaggaatagaaggtgatgtgtgtgggatgtctcttttagatagagtggtcaggggacatctctttgaggaagtggcccttgagaggaaccttaaaaaaaagtaaaaaaaaaaagaaaaacaaaaaaacccctcaacaacaacaacaacaacaacaacaacaacaaaaaacagccaaagcttataaaggccaaagctcaaatagtgcctactctgtgctaggcattgtttggagtgctttgcagacattgactgattattcttcatgacaatgcaatgtggaactatgatgagcccatttggtagatgagaacctgaggcacagaaagatgaagctgttggccaaaggatgccttgttcatcagtgctaggatggactttgaagccagacacctaacaccaagcactcttaaccaacagaaagcataaggacattgattgattgaatatttgattcattgatttattgtaatctctcattcctagagcacccaatgagcatcaagtaggcataaataagacctattactcttttactgcctacaagtagagacagccttggggctcaggcttgctgagaaatattagataagatattgtgtcagtctgagacagtgggggaatatattaattcattctcacactgctataaaattctacctgagagtgggtaatttataaagaaaggaggtttaattgactcagttttacatggcttgggaggcctcaggaaacttacaatcgtggtggaaggcaaaggggaaacaagcagcttcttcataaggtggtaggagagaaagagtgagctaggaagtgccacactttaaaaccatcagctcttgtgagaactcactcactgtcatgagaacagcatgggggaaactgcccctaagatccagtcacctccaaccaggtccctgcctcaacctgtggggattacaatttgagatgagatttgggtggagacacagagtcaaaccataacaaggaattaacagccaagtccactcagcagaagtggcgagatgatttaagacttgaaggacgagtttgcaggaagacaatgttggactgaagatgtggaaaatgaggaaataggcctcaggaagggcatggctgagcagcaggaatagcctgtgcaaaggcgtagagatgtggtgtgcccagggaagtagaagtgtctaaacatggcatagggagcatgtgggcaaataacaacttatgaaacagcaaatgtgggcagaatttagacagaaacatgggcatacagaactcagattttatcttgagggccatggggaaccactgaatgactttaaataaagggtgatatgtttggatttgtgtggttggaggattacatggggaatcatgtgcatgtggttggaagattacatggggaacagtgtgtgtgtggagggtttgatggaggacaggttattccctcagtgcctcttgacaccttccatgtggcctagtagaaatagaactttttccttggttcttagacattttaatgaataataatggcagctaattcttaggaacatattaagggctaaatagattttatgctattttatatttttaccttatttaatcctaaaatatattctgtggaataaatactactatcatttttattttacagattaggaaacagttgtagagggtacatggcacatcttgagttacacagccattaaccagtgaaacggggattacagcctggggatctgaattccaaaggccagagtattaagcagtatgctattatcactcatctttctatgtgcacatgtgttatttccatatccagagggcacagcatgcataaatgcatttattgggcatctactatgcactcggtatgtgatggacagttccacacaatattatttgtgttattccctcacaatagcctggtacagggttatctccttttaatagatgacaaaactgaagccaggaggtgtgcattgctgttttttttttattcttgcctagtgtttccattgatttctccctgagagttttgtaagcctccttctacatctttaactacttttatttcctgtgggattgtctctgctgtccctgacaaaggctctagacaatgggcatgtcaggactggctggattccaccaattcccagacacaagtattttttctcctccatagtttggttcacttaatggccattgcttcctcattttcttgccaagtgacccctccaaccaatggcctcctctctaggctggttggtgatcaacacaccctagagaataaccagcacattcagtctctgggcagatgtgcctctgagtgtgtttcccactggggtagagtggaaggttgtattcctagagacaaactcatgtcccaaagaccttgagtttgctttttctcaaggtgccatgagttatttatttattataggccaaaaaaaaaaatgtgagcatggtactggtacaaaaatagatacacagatcaatagaacaaatagagaacccagaaataaagccacatacctacagtcaacttatcttcaacaaagtaaaaaaaaaaaaaacaatggggaaaggacagccttttaaataaatggtactgggagaattggctagccatatgcagaaaaataaaactgacatctaaactctcaccatatgcaaaaattaactcaagatgaattaagggcttaaatctaagacctggacctataaaaatcctagaagaaaacctagggaaaactcttctggacattagcctaagtgaataatttatgatgaagacccaaaaagccaatgcaacaaaacaaaaaatagagaaatgagacttactttaattaaaaagtttttgcagagcaaaataaataatcaacagagtacacagacaacctacagaatgggagaaaatatttgtaaattgtgcctccgacaaaagagtaatatcaagaatctagaagtaactaaaacaactcaacaagaaacaaacaaccccgttaaaaactgggcaaagggcgtgacagacatttctcaaaagaagaaatacaagtagccaataagcactaatcattagagaaatgtgaattaaagccacactgagctacgccttacacctgtcagaatggctattactaaaaatcagaaaacaacagatgttggcatggatgtggagaaaagggaatgtttatacactgttggtgagaatgtaaattagtttaacccttatgagaaacagtatagagatatctcaaagaattaaaaatagaactaccatttgacccagcaataacaccatttttatttgcctgaaaggaaagaaataattatataaaaaatacatctgcattcatgtttatttcagcactactcataatagcaatcatggaaccaacctaagtgtcccttaatggttgattggataaagaaaatgtggtatgtatacactgtggactgctatgcagccataaaaagaatgaaatcatgtcctttgcagcaacatgtatgcagctggaggccatttgtcccaagtgaattaactcagaaacggaaaatcaaatatcatgttctcacttgtaagtgggaggtaaacaatgggtagacatggtcataaagatggcaataatagacactggggactccaaaagaggggagaatgggagggagctgagctttgaaaaattacctattgggtaaagtgtgcagtatttgggtgatgggtacactagaagcccaatctccaccattacacaaaatacctatataccccccaaatctaaagttaaaaaaatgtgtatttgtgcattatttttcagttttagatatatatgaaacctagataaagttatagatatatgtttattaacaataatgtatatatattcatcaccaaatatttaatgtttagataaactgaaagaataaatgaaaaataacctttactcttatcacctacagataaacacaggtatcattttggagagtattcatctactctcttctccctccttccctccttccctctcccttacaaaatgaaatcatattgtattaataaatgctgctttgtcattggtgactccctttcacagctcagcagaggcaccttgacattcttctctagcaatgtctttcaaacttcttttagcctcttttgaaccctttctacaagcatagggcttggaaacataatttataactgattttcttagtctgcttgggctgtgtcttcatcagttcaggctgccataataaaataccatagagtgggtggcttataaacaacagacatttgtttctcacgattccggaggctggaagtctgagatcagggtgccagcgtggttgggttctggtgagtgtcctcttctgggctgcagactgctaacttctctgtgtcctcacatggcagggagcagagagggaagtaacctttaccagaactcttataaggacactaatcccattcacaaatgcttcacacctttatgacatcatctaatcctaattacctcccaaaggcaccatgttctaataggatcacattgaggggtaggatttcaacatatgaatttggggggaggtacataaacattcagtctatgacaggcttctataacaaaatactataaactaagagggttaaacaacaagcgtatttttttgttttcttctcacagttcttgaggctggaagtccaagatcaaggtgctgggtttgaatttcctagtgagggctctcttcctggcttgcagatggccaccttctcgctgtgtccttacatgatccagagacagagagagctctggtctttttctattcttgtaaagacactgataccagcaagggggctcgactttcaagaccttatttaagcctaatgacctccccaagattccacctccaaataccatcgcaatggggatgagggcttcaatatatgaatttggtggtgcacattcagttcataacacagataaaagcagtttaattggttgaagcagaggtagaggaaacaaaatgctgtctagttgctacactcttttgcccaaatgggccccgacatcacttctgtgaatctcctgtaggcttccaaggagcattgtttgcaaaaccgttatcatctgacaatatcttaaaggtagtgcggtattccattgcatggatgtacaccatggatttatctagtttctattgttggacatctaggttgctttccatttttcatcattataaacaaaattctaatggacatccttgtacttccaaccttgtgtgcacctgtgattgtttctctcagataaagtcttagaagtaaaaatctcttttgattcctggcttgtggaaatttccccctgaagcccaaatctctgctttggcatgccaggaggaaatttgcccagagtgtgggcctcagttcagagtgggtatgtgctggacacaatatgtcttcataatagatggcctggtgttggactgctgagtcatgctctgttgtcaggacagcaacagactttcccctgggtctgggctggcaagactggtgcttatgatgctgtcttatatttgcaataggcttttacagttttcaaagcccttttcatctgttgttccacagtcactacatgaggtcagctgggaagatatgaatgtatctttaaaagcatactgaagttcaaagaggttagaagactttcctgaaattatgtatctagtaaatggcagtactctgtactagtcagctattatggcaataatgctgcataacaaatactccccccacccccaggtctcagcacgttacatcaacaaacagtatttttctttctcccatgagagttgggtctgagggttggccatgatttagctgatcccagctgggccagtgtggctggtatagggggcaatgggtatgatgacacaagacaatgtcagaaaggaagccttgggcaaaaccttaaaggccatggtacagagctggaatcttatattgcaatgggaaaccattggaggattttccatagaggagtgacatgacctgatttgtgttttaagagcctgtttggatttgtttgttcaatgctgtattttctgtgcctggttaatcatagatgctccataaatattttactggattaataatgaacctgattccaaaaaaaggaatggaatgcaagactagaggcattggatatatgtccagcctctgcagggtgctggttaagctggttagcttcagtaggaaagatccattagctaatttatttattcatttcactcactgagaaaacatttgctaggtgcttcctctggggtatccacatcagcagaggaaaagctagggaaggctatgactttgcaaactctgtagaaacctctgatggaatcacccctctactgtccactgtagtcctctttcgaggaaaagaaaaaactcagggcagctggagaaaaaacagagctcagactcgagaaaaaacagagctcagacttgagacacgggcttccctctataggggtcaaaaaccagggcggagagagataaccattgttagaacttgaacctccttaactcatcatttcattcagctccattgtgtagaaggggaaactgaggcccctagggtgggggttgaactgccatgctcgagatgacccagcaaatgagtggcagagccaagtagagcccagaccttcaaccttctattcctggggctctttgcacagctctgccctgctgccctcgcctttcagccaacagtttccgcactctacatatgagtttgggggaggaacataatactgtttattttgaattgaaatgctttttaaaaaattaataaccagccacacaaagatagtttacatttaaaattagatgttaaagtgcaaaggtttccttcaggaataggaattatgtcttctaattatatagtatttggaactacgcatttcctttgaagaaatgccttataaataggtcaaaacagccttcacgtttcttatgtgtttacttgcgtggtgtgctcatttggcgtttggccctgatatcatgcagccttgaaccctggttacattttcttgtgtaaaggaattatctccacttagactgcaaacaagattttcctacttgtcattctttttccctccgtcacaatgtctagcgtagtgccaggtacaggcaatttgcaaatatccatttaaaaaattattttattattttttttaagttccagggtacatgtgcaggatgtgcaggtttgttatgtgggtaaatgtgtgccattgtcaaagatttagaactggaaataccatttgacccagcaatcccgttagtggatatttactcaaaggaatagaaatcaccctattctaaagatacgtgcacacatatgttcattgcagcaatattcacaatagcaaagacatggaatcaacccaaatgcccatcaatgatagactagataaagaaaatgtggtacatatacaccatggaatactatgcagccataaaagggaatgagatcatgtcctttgcagggacatggacggagctggaagtcattatcctcagcaaactaactcaggaacagaaaaccgcacatcatgtgttctcacttttaagtgggagctaatatccattctaatttccttttcatctcctcccctcacctgtcctcccttttcttccagttccgtcctcttccctcctctccaaccctctctctccctctcatccttcttccctatctcagccctgttttcctttccttccaggaacattttggtaatgtgccaagcgctttataggctttggggactcagtgatgaattaaagtgaacacgtttcctgctctcacaaggctttgagtctattttgggagtggtggggggcagacactaaacagctagcagtgcaatcatttgtgtaattatatctgtaacatgtgggggggatgatgaaaggagagtgtggaatgagggaatttggtcaggggtcaggggtcaggggacgttttcctggggaatccaggctttagctgagacccggaggatgagtgggaatgaccagctgaaggaagggagacagtggaatagcaacccaggcagagggaactgcatggtgcagggacaaccttgagtggggagtggcctagggctttggagggatggacaggaggccagaatggtgggagcagaggtagcggagtggaacatggagaggtgaacataaacatcacacaaggtctcagatgccacgaggaagagtctggtgtttttcttgacggcaatggagatccatggaaggaatttgagccagagaataacacagtcagaattccatttctggaaggccacttgaggccagaagtggaggcggttccatcaacacggagtggattaaataaaccatattacctcctcacaatggcacgctctgcagatgtaacagaaaaaggatgtgtctgtatcctgatgtggaaaggtccccagagcaccccggccaaaactgaggaagagaacagagtttttcagctgaagaaagaagggggaagaaggagaaagaaggagaacagtgaccgcatcatatattacaaaatgttagtgaacacagagcccattcccctgccaaaagcaacccataaatcagccccagaaggcacaggagttcagtgcactagaaatttccctccaatcagctctctcctgtgaacagcgagttccttgcgacaagtcaggtttcagctgagccctgcagattgggtggctgtcaggtgtgatcacacacacctgctacagctggcctttctctgccagggagtcacaccttccagtcttccagcatgactgagactgagaaccaagtggccagaacctcgggcctggtaagaataattaaaatgggatcagtgtctgtccctgtggcgacgtcaacatcagagctcccagcatggaggtctctggcatggctggacttacttgctgaggactggtgcttggcccgtcttgcctgcactggcctggcttactccagtcgatgcgaaggcactgctgtccactgcctggccatcatgtgctggtgctgtctgttgtcatttcatacacatgatctcaaattctcaagacaacagccctaggaggcaggaaggggaaactgagactcagagtggttcaaggacttgcacacagacagtgagagagccagagtcagggttgaccccaggccttcaggctgctgtcattctgggttttctgagcttcctcaccattatttcccagttccccagttgcatgaatgatagttgccaggttcacttgtgttatggactgaatgtttgggtcttcctgcaaattcatatgtggaactctaacccccaatatgctgatatttagagggcccctgggagataattagagttagattagaatatcatgagggtggagctcccatgagggaattagtgcccctataagaagaaagagaaagagcagagttttctccctgtctgccccattgggacatagtaagaaggtgtcatctgcaaaacaggaggggagccctcaccaggaaccaaatgtgctgctgccttgatttggacttcccagcctccagaattgtgagaaataaatgtctgttgtttaagccaactggtctatggtattgtgttatggtggcccaaatggactaagacagcatacatttcccctcgccactttgaatcaccctgattttcatttggaaagttacatcccccttcctaggtgtatcttgttgggcctgaccaggggtagctgtgtgaccactcagagctcttctttcagggcctggcctcttgagtagattcttttagtccagtaccctccttccactggggtgctcaggaaatacagggagggagcacaatttctgttgccccatcctgatcctactgccaagcccagtcctccagccttcaggtccactctgttagcaaccttgggtccacacaatcacacccctttctgcttaggttcgccacagttgtttctgttgcttgcagtcagaggtgcctgagggaagcaggagcctgggtgtaggcactttaagtgccatttgttcttagttgtcagctgacagtttgttgtgagataatgtgtgcctgttgtgatgagatgagtgggaatggtgaggacatggagtgcatctctgcaggacccagtattgggggtggaaggagatgtaaacaaggtcatagtctctgtcttttcctccaagaaaagctgggggctggagaccaaatgtgtatgcaacatggcctttgtcttcaggagctcctagtgtagcaagagatgtgacacagacgtaaataaccataacatcagggtggatgtcataaaagtatgagggagaccatatggctggcagggagttggagagaaagattgttcagtgtgtgggataattaataatagttgacattcatcaaatccttattatgtgccaagtgccttcctaaatgttttatatacttgtgtcatttaattttcatcataacacttggaggtagctactattagttctcccattttgtaaatgtggagactgaggcacaaagggattatataactggcttatgattataaggctaggaaggtgccaggtgggatttaaatacttccatttctggctctccagtctaggtttcacaaagtatcatacaggtggaagcttttgagttgagttgtgaacggcagaaaatttagccccgagttagcttatgctcacctcaggcagaaggcattaaagcaagcatttttacatgttttggatgtcatagccgagggaagaaccatttatgtaatcccttccctctggtcctcaccaagggggcttcagaagcccttcaagtcatagcctcataattaagtaaatgaaaaccttcctgtgaacaaggaatcttcaaagtgctactgcttacagactaataacactgacagatcatggttttcattagaacaaattgctgctgaagttgggccaggccctaggtctgttctgaatatgttaagaatcagtgcattgccagatctggtctaaggtgctaaatttgaaaaggatttagaaccaagatacagatggagctgatcttgaaggaaacaagaatgtgtccactgttttcacacctagggctttagcacacagcaggcattcaataaattatccattgcctgaccaaatgaaaaaggtcccaaattaattccatggagcaccagaggtgtacaaaccacaggggtgatggtgtatcaatcaaaacattggactttctgtttttttttttttcaacagaaactcaaactgacttaaataatagaatttattagctacctaactaaaaagttcaaaggtacagtggccatcaggaaaggtttgatccagcaatgttaatgtcagcaagtttttcttggttttgtcttgagagctcagcccctaggaagtttaagacaggatgtgtttatactacagccctgtctgaagtctgatgttgtggcttggtcaagggtaatattttacagacacacaatctggcccgagacagaaagaattcaccagattgccaagacttttgtagagtacagaggagcagatcaacacaattcaagatcgtgacagggaatgtagggaattcctagctgtgttaaacctcaaagaagttacttaacccctgagattcttgtttccctccacagtaagcatgagggaaacataatttctgtcctgtttatttcttggggttgtcaaaaggctcaattgagaacatacttctattataattctgcataaaagagcaatataattagtgatcatgggaattaactgattatcaatgatggtgatttctcctagtagatgtttaggctgattcattagtttatccttatatatatctccatgcacatacgaataaatgaatatctatctatatatacacacacatacatatatatatgtatatacctttccttcaggaaaggtttggtctagcaatgtcaccaagttattggttttgtgttgacatctcagcctccaggaaatttcagagattgtgtgttacatcatattacatcaatattacagccctatttgaagtctgaaacatgtatttatgcatgtgtgtttgaaatatatgaggtataattaatataccataaaatttcagccttttaaggtgtacaattcagtggttgtccttatattcacaaaattgttccactatcaccactgcctaattccagagcactttcacctcctcagaaagaaacactgtatttgttggcagtcattcctccttactcctttctccagcccttggcaactaccgatctcctttctgtctcttttattgggcacctatcgtgtgggaggcactctaccagttctggagatacaactgtgagacaattctcccaagtgatttggaatcagatgaacaaaccctgaattactcaggcaaaaaattaatgggtctggctagcttccaacgtcacttaggaggtggctgctttttcagggagagacaatatagaatggagtgtgcagggtctggggtttactccccctcccacatcgtggcagccacgtggccttggtgttttcgagtttgagtactgtcctctataaaacggcacctcccctctagggttttatcctcatgaatataaaatgagatgatatatgtaaaacatcagtacccagcacatagtcagtgctcagtaaataagaacactattgtaattgaaatgaatgacaaaaagtgtttttcattgaagaaatagcaaagggcgataagtgcttatcttaggaatagaagaacaggggacattttcttaacctcatacttcactgcattgaaactgaggtttcctgaccttggctgtagcatcatcttggactggataattctctgttgtagaaggcttcttgtctattgcaggatgtttactggcatctctgggctgtatcccttggatgccattagcatttcccaagttgtaacaaccaaaattgtctctaaacattgccagatgtcccctagagggcaaaatattccctggttgggcaccactggctgaaactgaatgtgttctgtgctggatacttcactttcctacatctatgattttgctcacctaggggacatctgcttccctaatcctacccttggcctttaagaccaagctccagtgctatctccttcctggatcttccctgatgaaagagtttcctcccttctcaaatcctaaagcgctttatctctgcatcttgtatgacaagaaggagtgccaactatgtaccagatatgtgcgttctttctttttttgtagagacagggtctcaccatgttgcccaggctggtctcgaactcctgggatcaagcaatcttcctgcctcagcctcccaaagtgttgtgattacaggtgtgagccactgtgcccagcagtgctttataatctttataacaattccacaaggaaggcattcgttatccccacttgcagattaggaagccaaggtacaaaatatccctttctctggaataatctgtatgcaaaacttagccccttggaagactgagaaggccctgtctcattcatttccagcacagtgcctggcacagagtaagtgctaagaaaatttactgagtaaatgaatgaaaagaaaaagaagccttggaggaagatgttcagcatagttatcaagcctttgaacatgggaaagactcagatctgtcctgggtggttaaatattcatcttcctgtaggataattagctgtccagacaatctcttgaaatcttgcctgattctagccattcaacaggtttcctgggtgcctcctgggtgccaggacttgtgatgatctctggggaggtccagaaatgaataagacatggtcctgttctagaactaggaataccatttgacccagccatcccattactgggattattacccaaaggattataaatcatgctgctataaagacacatgcacacgtatgtttattgccgcactattcacaatagcaaagacttggaaccaacccaaatgtccatcaatgatagactggattaagaaaatgtggcacatatacgccatggaatactatgcagccataaaaaatgatgagttcatgtcgtttgtagggacatagatgaagctggaaaccatcattctcagcaaactatggcaaggacaaaaaaccaaacaccgcatgttctcactcataggtgggaactgaacaatgagaacacatggacacaggaaggggaacatcacataccagggactgttgtggggttgggggagcggggagggatagcattaggagatatacctaatgctaaatgacgagttaatgggtgcagcacaccaatatggcacatgtatacatatgtaacaaacctgcacgttgtgcacatgtaccctaaaacttaaagtataataataataataaaaataaaaaataaataaatattattatccctgttttataaccagtgttatggacatccaaggacaatgttgattttgttaataaacagtgcatcaaataaaaaaaaaaagaaatactctggagattgaagatgcctatgagctccaaagcatcgattcctctcctaagtgtagctcctaaagatattgttgatcctgggcacagagagacatgcaaataacagttattgcaatgttgctggtaatagtggaaaaattggaaacaacctaaatcagtgattctcaaacttgtctgcatgttagaattaccaggagatctttaaaaaattccagagctaagccaggcatggtggctcatgcctgtaatcccagcactttgggaggctgaggcaggtagatcaccttaggtcaggagttcaagaccagcctggccaacatggtgaaacctcatctctactaaaaatacaaaaattagccggatgtggtggcacatgcttgtaatcccagttacttgggaggctgaggcgggaggatcagttgaatcccagaggcaaagttcacagtgacctgaggtggcaccactgcactccagcctgggtgacagaggaaggctccatctcaaaaaaaaaaaaaaaaaaaaaaaaaaaaaaaaaaaaatccagagctcaggctacatatatcccatatcatataaatcacagtctcaaggctgggacacatttgtcactatgttttgaagatcctgggtaattccaatgtgtagactagtatgagaaccactgacctaaatatccattataaggtgggtgaataaataaattatggtctacgtatatgatggattaccttgcagtaattacaatgaatgaactataccaaaagacatggacaagaatgtttatagcagcactattcataatagccccaaactggaaacaactaaaatatccatcaatggctgaatgaataaataaattgctttgtaatcgtaaaatgaaatatcatacatttttgagaatgaacagctacaactgtatgtgtgaaccttgcaaatatgctgttgagtgagagaagccaggcacaaaggtgtacagactgtgtgtggttctgtttatggaaagttctggaaaaggtcatctgcaaactttcctggaaagagctcagtagtaaatattttaggcttgtgagtgatgtggggtgtctgttgctacccaactctgccactgtggtgcaaaaccagccatagatgatatatgtaaatgagtgagtgtggctgtgttccaatagaattttatttataaaaatgggaggtgcaggctgggcatggtggctcacacctgtaatcccaacaatttgggaggccgaggctgaggtcaggagttcgagaccagcctggccaacatggtgaaaccccgtctctactaaaaatacaaaacaattagctgaacgtggtggtgcgcacctgtagtcccagctacttggaaggctgaggctggagaatcgcttgaacctagggggcaaaggttacagtgagctgagatcctgccactgctctctgtcctgggtgacagagcaagactccatctcaaaagaaaaaaaaaaaaagaaaaaaaaacggaggtgcacacgattcagcccacagtttgtagtttgctaatctctattctggagcaaacaccattcacctacagtgaacctgccatggaatttgtcaccctgggtggagggtggttaatgtaaaaaaaagcacaagagagctcctgggatttgggagatgattttttttttttttttctgtctgggtgctgattatgctatagtgctcacttggtggaaattcatcactccttgcacttataaagtgtacactcttctgtaagtgttgttctccaggcggggtgcagtggctcacacctgtaatcccaggactttgagaggcctaggcaggtggatcccctgaggccaggagttcgagaccagccctgggtaacatggtgaaactctgtctctactaaaaaaacagaaaaattagctgggagtagtggagcatgcctgtagtcccagctactcaggaggctgaggcgggagaattgcttgaacccgggaggcggaggctgcagtgagctgagagcgtgccattgcactctagcctgggagacagagccagactctatccccacgccctccccaccaaaaaaaatgttcttcagtgtgaagtgtacactggaaacagaaaacaaataaatgaatgagctgaaactgtattcattaaatcagcacgcaaaaaagtaagttttggaagctatattcaaaatgtagaacgtgcaaaacaatatagtaaactgtttagggaccatgtcacagatctaaaagatatgcagggaaaaaataatcactacattcagaatggcgaataccttgagaaaaatgagatggggagaggcacacaggggcttcatggatagccctaatttttttatttcttgaactgaactgtgaataaatgggctttattatgttatcctttatttccctttatgtatttaaatattaaataataatagtaaaaagaataatagatactatccttatttttaaggaatatatatattttttcaatgacagatttagggggtacaagtgctgatttgttacatggatgtattgtgtagtggtaaagtatgggctggaaaaactggattgccatatgcagaagaatgaaagtggacccctatctctcactaggggtatatatacatatatatatatatatacatatatgtgtatatatatatatatacatatatatatacatatatgtatatatatatatacatatatatatatacacatatatgtatatatatatacacacatatatatatacatatatgtgtgtgtatatatatatatatatatatatatatatttttttttttttttttttttttttttttttgagaccaagtctcactctgttgcccaggctggactgcaatggtgcaatctcagctcactgcaacctctgcctcccaggttcaaatgattctcctgcctcagcctcccaagtagctggaactataggcacacaccaccacaccggctatttttgttgttgttgttgttgtatttttagtacagacggggtttcaccgtgttggccaggctggtctcaaactcctgacctcaggtgatctgcccacctcagcctcccagagtgctgggattacaggtgtgagccaccgcgcctggccggggcatatgttttaaagtgggttcagaagaatgtaagcccatgaggcagggatttttatctatttcattcacttactgtatttgtctgcagtgcctcgaacagtgtctgatacatgggaggcactcgcaaagtatttgttgaatgaatgaatgaaacagcacgtggacagttagagattgactgaagaatacactttggtagtgctgagggaatttggacaggagaagaaccaggaaatctcgaaagacacccacctgggatcctggcaggaagctaggcattgctaagtctctcttttagctgtctgcacaggtactaattttccagcctaaacttcaagactaaaacttcggggcaaatatttaaaaggtgacacctgctgcccttatcccccctccaaatcaggactctgtgtagctaaggctgttgaggacttctcagcttgcctgtttcctagggctgtctagtaaatcctgaagcctttgccagtagccaggaagctgagatcacctcggagcacagatggggaaggaggttatgggggagacagagactgtgcccagctgggttggagaggcaggcagaaaccctcttgtctcttggctggctgcccagtcttgaatgggagagaggtcttcccacgaaggatgagtcagccactgaagcttgggagaggatggggtggggaactgtgacctaatttgctgcataactggggaggcaagcctcctccctgtgctctggggatgctgttttttaaacactttataaatctccctactcaccccatgctgttgtgtggatcatctctctttaggagcaggggctgtaggaacgacatatcgtaccagattaattttatgactgccattattatgaatgccatcatcattgttgtaggggtggatctttggtgcaattcatcaaagcagccaaagtaaggaaaatcctgcagaaataaggaaagctaatataataaagaccttcttagctcctttccagatcagtgtttagctcaattttagtggtacccaggtttattccttttagctttctctttagagaactgtcctatagattccggtctgtctttgcattgtagtctaattagtccacaaaaatttctcttgcatgcttaatctatgccagacacaattctagacattggggatatggttataagtaaattaggcaaaatctctgctctcttggagtttgtgtgtgtgtgtgtgtgtgtgtgtgtgtgtgtgtgtgtgttgagaggggcaagtggaggaaaaatgtaaataaaaataaataatgataaataaaggtaaataaaaataaattatgatcatttccaatggttgtaagcactcacatttaaagggtagtgtcatatattagcaagagtgatcagggaaggctctctggaaagaatattttaattaaaaacagaaagataagaggaaacagaagagcagaatgaaagagtattccagccaagaagcaccacaggtgcagaggtcccaaggtagaaacaaagtctggcaagtcctaaaaccaaatgagtggccactgtgggttgggtcatcttcctcacccacacctccgtatatcactaagtgagcaaggatgagagtgatatataatgaggtgagggatgttggaaggatgaatcatacagaatcttttagactccagcaaggagtttagactttcttctaagtcagcactgtccaaatcaacttctcatgaaggtggaaatactccgtgtctgttctattcaatatagcaggcactaatcttatgtgactgttggaccattgacatgcgggtaatgcaactgagaaactgaattcttaattttatttaattttaactaattcagagttaaatttgaataattgcatgtagctatcggctaccatattggataatgcaattataagtgacccaggaaatagtgagggtgttggtgcagtggatggtaagattgggtaatgcttttttaaagaatggattttgtggctgggtgcagtggttcactcctgtaatctcagcattttgggaggccgaggtgggaggatcacttgaggtcatgagttcaagaccagcctggccaacatggtgaaaccctgtagctactaaaaatgcaaaaattagccaggcgtggtggtgggtgcctgtaatcccagctacttgggaggctgaggcaggagaatcgcttgaacctgggaggcggaggttgcagtgagctgagattgtgccgctgtactccagcctgggcaacagagcaagattccatttcacccctccgctccccccacacaaaaaataatagattttgttagcaagaataaaagcagggactcatgaaggatcctattcactttccctgaggagcctggcagctgaatcccatattcacagaaagttttccttttgcccttcttttccttttcaaatgctaacaggtttcctggaatgatatgggatcaggagggccctctggactgaactgattcttcagggaaatagaaagtcaagaaacatgtgcctgttgtttcgctggagagttcaattctagtgctgcttgggaagtgattcttaacttccataaagatataggctacagactacgctagttaattccatttgggcagtcactggatgagtgaaacatttcgacttcagagcagagatttggcagacaactgggaggcatcagactaattcatcccatcactctccttcctcctgcagacaaaaatgaacttaataaaatctgcagatgctagtgatagttgcttttttttagtgcctatgagctaagcaacttgtgtatatgtaacacattgaacttttccaaccactctacctactagtgaatgattcttaagaaattttaaactataaatatttacattaagactcctagaggtggggatagtagcactgatttgggcacagtggaaagagcactgaattgggacttcagaaggctatgttctggtctaagttttgccactaattgtctgtatagcctcgaaaaaggctcttctcttgtgtggatattatctggaggggattagtaacgtattcttcaagcacccttctggattttgttgcctgtggcataaaagtatgcttgctttccttattatgcataagtggcatcaaagtattattggaagtgaggcccagagtgggctgaagacacaagtcaagggtctccagcactgcctgccaggattctttggtggtaagccaaagagaccaattagaaagtggaaggcctaggaagaaaagggaccagggagttccaaggtccctagagaacggcaatgaagtcctatctagcgtccgtccttgtattcactgctcatgactcaaattatggggagaaagcgtatatctggacaagcttgggccactccttggccaggagagggcaggacatctttattgataatttctctaaaattttatccaatggaagagaggtagttccctaaaggaaaattgacatgttcttacccaaagaaggaggcatggaaaccaggcgggcaaaaatgaccaagactccctaaaaacacagactatagtttctaaaaattaagaatatgactttcatgtccatataagccatggctagcaagtgatttctggtggtttttttttttttttttttttttttttccggagtttcgctctgtcgcccaggctggagtgaagtggtgcaatcttggctcactgcaacctccaacccccaggttcaagcgattctcctgcctcagcctcctgagtagctgggattacaggcacccaccaccatgcccagctaatttttattattagtagagcggggttttgccatgttgaccaggctggtcttgaactcctgacctcaggtgatccacctgcctcggcctcccatctagcaagtgatttctaagtctatgtgaaattgtaatttatcagaatcttcagttcactgggattcttaggttgcttattatgaaaattattctgaacctgaaactatatatgtctacatctataactctatatttatctgcatttacatctatcacatccatatctgtatctatatctatctctctatatttatataaactttcagggttgctatggagccagctgagattccagcattggtaccttgttaacctacatgcacaatattttaattaattgattaattaatccatctgacaaatatttgttgagcacctgttgtgaccgggcactgtgtttacttatctgagcaacattccctgctcttgaggggcttttgtttaagtgtgtgttgttatctttgctgataattccactaaaactgtacccagtggaagaggggcagttcacatacagctattatgttcacataatcaaagtgttggggagggcgttcaagaatagggtattggctgggcacagtggctcacggtgaatcacaaggtcaggagttcgagaccatcctggccaacatggtgaaaccctgtctctaccaaaaatacaaaaaaatagctaggtgtagtggctggcacctgtaatcccagctactcaggaggctaaggcaggagaatcgcttgaacccagaggtggaggttgcagtgagctgagattgcgccactgcactccagcccgggcaacagagtgagactccataaaaagaaagaaaggaaaaaggaatagagttattagctctgtcagaataattggatttatgcaagttgtgtgtttaaggattaataaacatatttaggtgataatgaccagtgaaaggcattcaggcaatggtaaatgggtggggtgggacgggggcggggggggtaagggcatgtcactatgaataggcctggcctaatcaggaattggtgaatttaagatggaaattgtaggtggggctgggaggggggactggaaaaagagggaagatggcccagatatttggaaagattcttggtcatccttgaaggacttgaagccatgcttagtggcctgagtgataaagaaggataatagcttcatttatttgaacagcaattttttttttttttgccagtgaacattaagccaacagaaacttttagttaaattttaattcatcagcaaatctgatgacccggggcatcctgactaatcaaacttttactgtgattctcaattagtttcacttggcaacatgttggaaccaatcatgggttggctgcaaattcatgagttgtctttcctacttattgctctagaaaaataaacttattattattatttgagacagagtcttgctttgtcacccaggctggagtgcagtggcgtgatcccggctcactgtaacctctgcttctcgggttcaagagattcttgtgcctcagcctcccgactagctggagccacaggtgtgcgccaccacactcagctaactttttttgtatttttagtagagacagggtttcaccatgttggccaggctgatcttgagctcctggcctcaagtgatctgcctgcctcagcctcccaaagcgttgggattacaggcatgagccaccatgcctggccaaactcgttaattttttatgggtgtggctctttggattttcttctgttcttttgagccattgacatgggtgcatcatctttagcttgaaaggtttgagactgagcattgctttctgactaattcctattccgctcctgtgtcaacagaatcatggggatttggaaagacactgaattcctctgaaattcagttactctagatattcaggctgaaggtactttcctcattctcagaatctctctgaatcattttaggtgttctaaggtgtagatgttgctttctatttcgagtgtgccttgcagggggtaagtaagtaacaagcaggtttcaagcaggtgagtgtgacagtggcagacagcaaaacatcatggttgagttagccctgccctaatttcacctgtggctttgcctggaatgtcaccccaagcagaggaaatgaaacagcatggtggaagagggaagaaatatttgggacctcagagagtggctgaaagtgagccaggggcagcttttagaaagaagtggcacttaacaatgaatcaaaagaacattgagggttgcgtggtttctctggaggaggagaacattgtaagcttgagagacatgaaaaaagagggagcagtgcgagcagagaatgccttggacacttttcttccaaggcccctgaggtttggccatatgacttactgttgccagtgaaatgtgaatggaagcctttaagagccactgtgtgactcactgcagtctcttccccctgtcttggagacgggctgtgttccagacaatggaggctcggttgggctgggttcctgggtggataatcctatagtaggcactggggttgcgtaaatgaaagaaatggcccttgctctcagggaattcatgatagggggaagaagtggtgatggggagagcacagttcaacttaggggaatcaggtaagacttcttggggactgacatttgagcaatgttgtaaagaatgagaagttaaaaccactgtggaagacagtgtggcaattcctcaaagacctagaaccagaaatgccatttgacccagcaatcccattactgggtatatacccaaaggaatagaaatcattctatcatgaagatatatgcgcgtgtatgttcattactgcactattcacaatagcaaagacatggaatcaacccaaatgcccatccgtgatagactggataaagaaaatgtggtacctgtcaccatggaaaatactatgcagccataaaaaggaatgagatcatgtcttttgcagggacatggatggagctggaagccattatcctcagcaaactaatgcaggaacagaaaaccaaacaccgcatggtctcacttataggtgggagctgaacaatgagaacacatggacacagggaggggaacaacacacactgaggcctattgagggtggggaggggggagagtgagagcatcagcaaaaatagctaatgcatgctgggtttaatacttaggtaacgagatgatttgtacagcaaaccaccatgacacacattcacctatgtagcaaacctgcacatcccgcacatgtaccttggaacttaaaattttaaaaaaaagaaagcataagaaaaaaagaatgagaagtgaagtgggtgaataaagatgggggagaggtaggatttttgcagagggactagttggtgcaaagacaggcaagagaaacaaacagaaagggagtacttggaaatgggcagatgacacaacaatgggatgcttttctccagaaaataaaatggaaacctgaatttgacccctgtatagaccctaccatcatctaccaaaatggcaccactgacatggtatagaatcatccaacagcttactgtttattctggaagaaatgagcatgacttctagtctcccctgggaaagaattttcataagtgcagccctgtttcatcaaattatgatagccgatttatatagagaaggaagactactacgtaacccaaggagtagatgttgattgtaactgatgtctgaatattatttgaagcatgcagaatgtaattattctccatgtagatggtaaataatttgaaatattaggcagtgagtgcatttccaaactgcagagcaactgccagtgatgcacattactacttccataaaactcccataaacaacaattaaggacatcaatatttgcttccaaagtaatctgcttattattaatgtgaatgatgtgataaatagccccaaaggagtgttttgaagcagtgtctcatcaccttggatgaggagatggcttgacatcatcgtagaccatttggtttctgtgtttaaggagatgagatattttctttgaaatttgttttcttcccattgcaatgtaacagaaccgcttccttaaaaatatatggattgatgagtggctggagggatggatagaaggatagatgagtgtgagacaaaatacacccaagtagtaattgtagaatctagatggttagtatgtatgtgttcaccacacatttctttaaaattttctgtatctggagaagtttccataatgaaatgttgggggaacaaaacagtgagacatgaaatggctcatgatctgtttttgggatcccaaatcctcgttatacaccttgactcatctctcctcccaatctccacgtctaatcagtcatcgagtcctgtggattctacattgcattaaaccttcagacaccaccctctccttgattgttcccatcgctcctgccttcagcaattcttgcatggtttatagccacaccctctctgctggtctttgcctgatctcactctgatagatccttacattgttgtcaaagtaatgattaattccagaaacatttttcgagtatctgctatatgcaagacactgtgcctggtgctgaagttttttttttttttgaccttagggacacaaaactggactgcttatgagtcttggtttatgacatactcccatcgttccatgcaggacttgcttttgtctagttaattatatttaatagttatagttcattatttttaataatgtgataagcgcctgtgagcccatgctccaaacgaaagctagaatattgacaataatgtgcttctaaccacatagttttgtatcatcagtcttggttcgtcatttacttgttttccttttgatatctgtattgcttctcgtatagtcttgaacgtgtatatttttatgttgcttgctttttaattttatggtgtatcatgctgtatattatcctttggaattttcttttcttttttttcctcacttactaagatttatctataacgttgtgtgttgctgtggtacatttgttttgactgctgtttatccatttaagtttctttctgtctgtttcactttttaaatttttcatccttgttttcttctcaaaaatagatgcctgtatttccctctaataaaatacgagcttagcatgctctcccatcccttttttctcttccttctttactacgacttcttttaggttgatattatctattctcaaactttaatgtgcattcaaatctcctggggatcatattaaatgcagagtctttttcagcaggttgtgaatggggtttaagttcctgtatttttacaaggtcagatgaggctgaggctactgattcaaggaaccacactttgagtagggttttgcgacttttaatcctgtgcttttatagatataatttccctttttatgatcttttaaaaatttggtcttagctactctttaaagacagcgtcaaactttaccaaggcatttgattatatgcatctgtacatctggtaccatctccactgtatgtctctcctcttattcgtgtaatttattcaaaagtagttttaatttggggctttctatggcaaatctttgaggtctcgtacatctgaaaatatttttattgtactttcatatttgaatgacagcttaattggatataatatgttaagttctatttttctcatttgattatttgaaaatattacttcatgtattcttgcatctagcattgctgatgaaaaattctgacatcaagataatttctttctttttaaaaattcgatgtgctctttctccatgggtgcttttagaagttcctgtgtttttaatagtttctgaattttcactacaatgtgtctaaatatgtttttttttttaatttctcttttggaacttttttaaaatctgagaaatttgtactcattatttcttaaaatatttactcctacttttatttctctttctgggagtcttattattttgacgttagtgtttctcttctatactccatataatttacctttaattttttttctatttttttagtcatgacttcttcctctggaagacttcctgaatcttgtcttccagttgattaattcattctttagctgtatccattttgtgtccattatccattcattgtattttttatttcaaccattatatttttcatgcctgatattttaaattggttcttttaaatattttcttattcctactttatgctgttaatatctttccttctttctttaacatgtttaatagaaggctaattaaaaaaacttaagtccatctgttctaatgtttttgcttctgttggaatctgtaacccaatgtgttgtttttctttcaaaatgattgtactcctcaaatatcttgttattatggtttgtgagctcactttaccctggaggtattgggtactttgatgggcaatgtggatgcgcaaaggccagagccccaagtcagccccagtgagttcaggggctagggggtaggtgagtcctaggatggggaaccccagataccagaaacctacagtcgatcactcacagacccagaacttttacccagccctgattttatctctggcagcatttggagcagagttctcagttgggacataggggcaggcactgtttgccccagggcaatggcaggggagcagacagagccatactccttcaacccttctaatcccccattccagtttatcctttcacagccttactgggcagcttctgcctcagattcaagccatcccccgcatcccagtccaaatcagcacgcagccactccagtagtttaccacaggtcctctgctttcctggaaattccttcaaggttgattatggtggaggaagccagcagtctagccagctcagcatcatgatcagagaactggccatctcgatttttaatcccctgggtcttcgttacaggctgaattgtgtcttcttgcccacaattcatatgttgaagtcctaactgccagtatctcacaatgtgactatattcggagacagggtctttaacgaggtaattaaggtcaaatgaggtcatatgggtggactctaaccccatatgactggtatccttataagaagaggagattaggacacagaaatgcacaaagggaaaagactgtgtgaagataatggagaaaaggtggctatctacaagtcaagaagagagacctcagaggaaaccaaccctgctgccatcttgatcttggacttctaacctctggaattgtgagaacatacatttctgttatttaagccacccagtctgtggtactttgttacaaagaagagctccccatcaactttcaaattagacttatggtcgttgaatgcgattactatacgccaggcactactttacaaatggaaacactgaggtacagagaggttaagaaacttcctctgagtcatacagccagctggagatggagccagtatcacttctgcctcgagagctcacagcttaactgctggattcggccatccaatatggtggccagtagccacatgtggccatttacatttaaattgattaacattaaataaaattaaaaattcagtttctctgtcacactagccatatgccaagtgcacagctagtgattgccatagtggacaggaaagatttagaacacttccatcatctcagaaggttctgttggacagcactacactagaatatattgcctctcaagtaaatgattacacttcttagtgcagaaagtcattcacaaactggccctgcttacctttttaatctcattttctggcattctcctttacattctctatcctcccattttacccaattccctgaagtcccccagcagggcatgcatggtacttttgtatgataggtcaggccaactcatcattcagactgggttcgtgagacaccatctccagaacatctcccttcacttgctaggctagaccaggtttagttttttgcaagatggcagcactccttgtttctctcagccacagcatggtgatggtttacttatgtgtctattccaggcattgtgagtgggcaggtatgataatttcttcatctgtaaagccctggtacctggaaagaataagatacttaaaaagcattgcataaataaacgaggacattataggtagctgtcagtttccttactcacacgctcgcttctagctgtcctgattctgtaaggtgaaatcttccccatccccatcatcttagatgaagatgtaagaagccaattaggctatttgagaatttgaaccaaaagacacagctactcttgtgaggtggtattgggtgctattgaatgtaactgttgataagggtaggctcaaatctcccatgtggtgtttttctctgggtgccatttagaatcaggtttggggtgaccattttttcattctgcaagcctgctgaggcaggaaaagccaggctgcagagagaagtgttcagaatataataggcccagagagcgaagctgagacagagcttatgtggcttgtggcagcggggagtggcttggaggacaagttttgattccttatcctgccactttcaagctgtgtgagcttggaaaatttcttcaacctcttggaaccttggtttctccctctggaaaacgggaatgtttgtccctcagagatattctctgtgagttaactgtcagaaaatgcagggaaagcattcagcactgcatccaacacatagtagggactcagtaaacattattttttcttatgtggagtcagagagcagagagtggttttgggtttttttgagacggagtcttgccctgtcacccaggctggagtgcagtggcacaatctcggctcactgcaagctctgcctctcaggttcacaccattcttctgcctcaacctcccaagtagctgggactacaggcgcccgccaccatgcctggctaattttttgtatttctagtagtgacagggtttcaccatgttagccaggatggtctcgatctcctgaccttgtgatccacctgcctcagcctcccaaagtgctgggattacaggcgtgagccaccgtgcccggcccagttttggtttttaactgctccgttattcacccttttgagctctgtcttctactcctgattctcagttagagtcctctttagctcaggctactttgaggggtttctgtttcttatcaccaaatgctatgtgattaagataaccagtgctcttggttgttggttttggcttctgttcataattcctacattggtacccattctacttggctgttggtgtttttttaaaaaatgtaaatacttgcttcttaacattggttttggagttctagtccatctggggctcttcatatgggacctggcatacatgtaatcccaggtttttcagcccaggggcccctggccttcctaccaattttcccttgtcactccatggccagtgcactcatccccacctctttaagcttcctttatcttggagcctctagcatcaaggaaatgagcagaggaggtgctgagtgccagaaagaaatgaaaggtacattcagtatctgctgtgtaaaaattgaagcccctgtaatgtataaaatcatcttccttgtggaggacttcacattaaatttcagctgccttttactttacccccaaatatgagctcagtttgctgaagttctatgaacagtcaaattctctcttatttactgatattgtgtgaataaagctgaatatccaggggcaagttactccatgacgtgtctctctctagaggtgggaaatgggacactttccttagattagagctgtgtttaagtcagtaatcagctcttgtaagtggttcttgaggtgatcttcagaatatcaggaaaggatgcttttttctccccagacaggagggaaattggttcttggggtttaaaacctagggtttttgaaagagctactgggctttaataagaaccatgggtgtcctgatgggtgctgcctgtgtgttctccagatagcctctgattcctttggcatcctctgatttccttggcatgcttctgtgggccttgcttctctgtgactctttgaaggattctggtgggctgctggagccaccctatatgggagtaagtctgtacggcctgaggtgcctaaagggtgcaggcatagaagagcccagttctcttgcctccagttggaacaaactctgaagcctaatgtatgtccagagctcccgacgggattaggctgaggccgagacttgccctgaaattgtcccttgctcagtttagttcccttccctgtcctgcccctgaacccactccctcattggtttatcctctgagcacttcctgaatactgtgttatatattacatgaattgcacattaatcctcatctcaggatctgcttctgggccccgtttccatcaaaaggaggtggtgttttgtatatatctatcaaagcattatgttgtacaccacaaatatctacactatatctgtcaacgaaaaataaataaataaataagtaaataaataaataaataaataaataaataaatggaagaggtgttggatgggagagggtgttggaaagaatactggctctgcagatctgggatttcttggaatttctctgttaccacttatttctggtgaacccttctccaagtttctgaaacttgctgagtctcagtttgtgcatctgtgaaaagagaagactatgaccaccttgaaaacttgtgaggttggacaaatcacctgcctggtccctggcacgctgtgggcactctattacgttttaactcttgttaccattgggcactgaaggggctgagactggaggcaaggagctcatccagaagtgaattacctaataaaagtaatgttgagtaccagaagagaggccccatgctaagatgtcatcatttgtctgccatttcttccctaagggtttgggatgacaaacagctggtgttgtgacaatgttggccttacacccagatctcctggaaccctttcaccatttttgtggtctgcaatctttgactttcctgtgcttttgcttccaacagccagcaccagtggctctttctcagaggacttttctggatactggagctgctttatctgtatataaagagccagaaatgcctaagagtttgtatcctgcttccaggacaactctgaactcattactcttgtgtgcacaaatttgagaaccctgctgtcttacctaagaccaggccagcggtggggccgacttacactccagagcacccctgtgggataagattgatgttaccatctgtgggacttcgattaaaggccccacgcttcagggcttccttcctttctatgtgctgtgtcacctgcatctttactgtattttttttcataactgggagtagtttttaaataaattgctcatatacaaaccctctttaaggatctacttctacagaaccccattgaagatagccggtatgtacaagtatttccatagtgggtattaaaatattgaaatacttcctttttttcctttggacacagggaaagggtctccctctttcttttcctctttccttccttcccttcttgctttcttgcttgctatttgtgtgtggttggggagacgagggtgaagtattgtttttagaagtaatttggagtttcatttccgtttagaaaatgaatgaattactctttacagccacaagtattttgtgttttgtggagcggtaattaaaataatggaagtgtccatcttgattctcaagaaagtttcctttggacctgtgtggtggtggtaaagggaattcaggtgtggtgagatcatgagctcggaggtcttttcagactggatattggaggggatggctgaatcccacggggaagatcccaccctctgcagagtcagggaatcagactgtctttctagaatccatacacctagcttcccagaatttaatagtggtaacagctaacatttaggaaacactaactgtaccagccatggttctgagggttttctcttatttagtcctgacaattctacgaaggagaagaagtacaaccattatccccaatttaaagatgaaaatactgaggcttagagaggcaaaggaacctgcccaggttcatgtggtttgcaagatctggagttaaaaccagccagtctggctcaagggcctgagcccttcaccatgacagggtacttcttcctcttctcattagatgatatcacacctgagtgaaatgtagctgtctcttccatatctgtcttctccactgcagaggaggacagggactgtttcctggtcatctcaatattcccagtatctgccgaggaactggcacaggtaaatcaatgctgaagggggaagagaattgtggtcagagtgttgtgttgagccctggaacaccaagaagtcttgatggggctaaagagctgttgtctttcatcctttgtgcctctgtccgtagatctataccaagtttgcagtttcaaaagggtaaattccactctgagaaaggttcaaattgtatatttggagtaacttcaaaaaagcaattagtaattgccattctgacaggtgtgagatggtatcccaaaggcatggaatcaacccaaatgcccatcaatgatagactggacaaagaaaatgtgatacatatacaccatggaatactatgcagccataaaaatgaatgagatcatgtcctttgcagggacatggatgaagctggaagccatcctcctcagcaaactaacacaggaacagaaaaccgaataccacatgttctcattcatgagtggaagctgaacaatgagaacacatggacatggggaggggaacaacacacaccagggcctgtcagggaagctgggggagggagagcatcaggataaatagctaatgcatgtggggcttaatacctagggctgataggtgcagctaaccaccatggcacacgtttacctataaaacaaacctgcacgttctgcatgtgtatcccagaacttaaataaacaagaaaaaagaaaaagaaaaagcaattagagctgccattttgttgagtactggctaggtgctaccaggcacgatgctaaacattttgtgtaatatagattcagctgtccttgtagaggcggcaatggaggcttccatccatgaaataagtaacttgctcagggttacaatagctagtatgtaaagaagccataattcaccccagggggctggtctccagtgttcctattcttggatactaagctatgctacttctttaaatacaccaataatcagatacccaaagaggaaaaagaatatgcaggacaagacagcaagaccctgaagccaggtctccagattcttcaccatatcccaaaggcagcaatgcactgagactcctgtgtctctaggctccagtccagatggaccacaacaggcactgtgacatttccagatcaaattcccagtgcctctttggaaggtccttttctggtagtttaaattgttagtcagttaaattcttcatggctgttgacacgtcaatacgcttgacttgaagcttactcaccagcctgtccaattcaaataacattctcccgcaggtcgtccccttctgccagttggatttttcatctctgtcttcattctaccactaacagatttctgcccagtgccaaacctccaaacacccgtgatcactcattctcagacagggtctctccccagagaaaatggacaagttccttctggcttggtgttttgtatttgttttcttatattttattgttgttgttgtttgttttgttttgtttttgagacagcctctcgctctgtcaccaaggctggagtgcagtggcgcgatttcagctcactgcaacttccgcctccccagttcaaccgattctcctccctcagccacccgagtagctgagattataggcgccccccaaccatgcccgactattttcgtgtttttagtagagacagggtttcaccatgttggccaggctgatctcgaacccctgacctcaagtgatccacctgccttggcctcctaaagtgctgggattacaggtgtgagcccctgtgcccagcctgtatctgttttctaagaaaaaataaaaaatttaaaaaaaggagtacttgttaatgaaattcgcctgttgtaagtattcacctgagtacttacaacctgccaacaccttgctaagcattttatttgcataattccacttactgtttaccactctttgcaataagcacacggttatctgtgttttgtagatggagccacagcagctcagaagatgaggtaagagctagaaagtggcattgctgaaacttaaagtgagggttttcagactaaagatccattctctgagcttatagaaccagtagatgctttgaaacagaaatgaaaactgcttcttttaccacctaaagataatgacaataggaatttgctttgtttccttttaggctgtttttttgttttttgtgtgtttgacgatgtcaggctggggtgcctgacctctgcctgccgggttcaagtgattctcctgcctcagcctcctgagtagctgggattacaggtgtgcaccaccctgcctggctaatttttgtatttttagtagagatggggtttcaccatgttggccaggctggtctcgaactcctgacctcaagtgatctgcctgcctcagcctcccccgggtgttgggattacaggcatgagccactgcttctggccaaactcattaattttttatgagtgtggctctttggattttcttctgttcttttcagccattgacatgggtgcatcatcttcagcttgaaaggtttgggactgagccaccactcctggcccagcctgtttttttctaagaatgtatgtctacttaaataattttgttctttgctttttgtcacataccatttttattatgattaggtttccgtgtcattaattactcattaaaagtaacattttagacaaatacataatattctatcatatgaacacaccatgaattgttattatttttcttcgacttttgctttatgttcaggggtccatgtgtaggatgtgcaggtttgttacatggataaacgtgtgccatggtgatttgctgcacagatcatcccgtcgcctgggtgtgaagccgagcacgcattagctattcttcctgatgctctccctttgcacccctcctgacagaccctggtgtgtgttgttcccctcgctgtgttcatgtgtcctcatcattcagctcccacttataagtgagaacatgcagtgtttggttttctgttcctgtgtcagtttgctgggaatgatggcttctggctctatccatgtccctgcaaaggacgtgatctcatttcttttttatggctgcacagtatcccattgtgtacacataccgccttttctttatccagtctgtcattgatgggcatttgggttgattccatgtctttgctattggatgcatagtgcagcagtgaacatacatgtgcatctatctttataatcaaatgacttatattcctttgggcatatacccagtaacaggattgctgggccaaatggtatttctgcctctaggtctttgaggaatcaccacactgtcttccacaatggttgaacaagtttacactcccaccaacagtgtaaaagtgttctttttctcagcaacctcaccagcatctgttgtgttttgacttttcaataatcaccattctggcatgagatggtatctcactgtggttttgattcacatcatgaattatttaaccattttattatacttggacatttaggaggtttacaagttttgcttttggatcagcgattctcaatgcaggttttgcctcctgggggacatgtggcaatgtctgaagaccattttgattatcaaaactggaggtggatggggggtggtgctattggcatctagtgagtagagagcagggatgctggtatacatcccacaatgtagtgggcaggccccacaacaaagaattaattgtctagccccaagtgtcaattgtactgtggttgagaaaccccattcttagatataccatcatgatgaacatctctgcgcattaaaccaaacatatttcacccatagcttttctatggttttcttgggattgattgctagaaggggaattactaactcaaagattataacttctttgaaagatcttgaaacacaatatcaaatagctttccagaaatacagaaatattattcttccaacaacagaatctatttcaccccagtcttgctagcatgaaaaattattataagccttcgttaatttggaataaaaaccctctgctctcttgttgttttaattggtattctttttgattattaaggagttgaatacctttttatatgcttattcattgtttgtatttattctgtgaattattagttcatgcccctcacccatttttctactgaagttgtaagggattttaattgatttctgggaaagttttccctttcagatctttttttgtatttcaaaggcaactcagaacatacatttttgactcattatgcaaaacttactgaacattgtttggtaagagctgtctagtaggatgatgatgatgattgttaatattttggagcctttcccctgtcagatatagagaggtcatttaaagttgataatattctttgaagatgaaaacaccttcacctggatgtaaacaaacgtcccattttactgaagagaaggctatgaaagtacctgaagtttggagtgtgaattgaaaacagagaactaagaagttcaagcatgttcttgaactgacaaggccctagtctcaggctcagaaaacaagttattgcaattgctgaataattactcaattaacgtcactctgttcattgctctatcagagtgggttggaagagaggaagatgagctgagtcaatcttttcttcagaggaatttagaatggcacaattttaagagtcgcaagggatcttagatgtgatccaagcctgtgtgttcaaaagcatccaccttgtagcactcaggtaccaccaagatgataagtggatactgatagatccttttccttttaatagtcatgcatttatttttatgtacattagaaaaaaaatatatccttagcttatccatccgatgggttcacggacattattgcttaggatgacactaaaatagatattaagttttaaaaaaagtcatctgtaacttgcctcagtgtctagaagggtacccagcacataggtgctcaacaaatattttgttgaagaaatgaatataatttaaaaatatgaaataagtaatagtatgggagatacatagatatttcataataacaactatcaaggttgtaggataatgataaatttgatgataagtttaacgctgataagtttgagaaatagcattcttaacacccttgtcttcagacaagaaaaccaagtctctcagaaaggaaaaacttgcctcagggctgggtgtgatgcctcatgcctgtaatccccagcactttgggaggccgaggcaggtggatcacttgagttcaggtgtttgagacaagcctggccagcatgatgaaaccccatctctactaaaaaaaaaaaaaaaaaaagtaaaccgggtgtggtggcacattcttgtaatcccagctactcaggaggctgaggcagaagaatcgcttgaacccgggaggcagaggttgcagtgagccgaggttgtgccactggactccagcctgggcgacagagtaagactctgtctcaaaacaaaaacaaaaacaaaaacaaaaaacccaaaacaaaaataccaaaattgccccaggtcacaagataagagccagaatctggtctagattccagtttttctgcctcagaggccagtgttctttcagccacaacaaaaggctgttttccgcaattttattacagagttttcttcctcacttttgtaactgtagggttgacatgtgtcactctgtcatttttgctttcggaaaatgacaagcggtgtcttgcatgtttcaaagggcatgcattacagggatggtaacatttactgaatgcataccatgtactaggccatgactgagcacttcacatgctttatctcttggattcttccccacagtgctatgaggtagatactagtattatcaccccattttataactgggaaaattgaggcataggaagattacgtcaaacttctagcgtaggattgtctgtgcaaaccatttggcacacactgctttgggacatactcttcatttccatcttggattttaaagacagttaattttttggtgtgtatttatacctccttctctaaaagagatgacaagtttcatggtagaggttgggtagagaggagaatgggtagcatcggcctgtccgtgaggctcccaggcacctaccctcatatataaaaggttcagatttgaaataagggtttgattttctccttatttttgaggctgggtttggttgtaaagaacagggccatgacaagttttgtttcagatcctgagaaattacctttgagtttcctctagagccagcaacataacacagtagttaattgcatggactctggaagtagatacaactggatttgtatctggtctatctggtctcggtttttcctagtggcgtgactttaggtgcatcattctacctttctgagcttcagtttccttcaatcaatacatctagagcaggcatgatgataaaataaaataacataaaaagcccctaggtgcccagtaaaagatagcttggcatttgttcaacaaccaattactgagcatctaccatgggcactgtgttcaatgctagtgacttggtggtgggcaaaatagattcagcccctgcctgcatggagtttaccctgtagcaggaggcacacatcaagctgatattgtaagtacccacttataatttcaatctgtagtaaacacaggttaagagactattatgaggagtccattgagaccagacaatcacaaaaggccattctgagcaagagaatgttaagttgagatctggaaggtgaataggaggaagcccaggtagcaaggagaatgggaagggggttccaggtggagggaatagcatccaggcagagggaatggctgggggacaggaaagagggaggagagttagggggacctgaaggcaggccagtgtggctgcagcaggagggagaggggaaaatggagaaaatgaagtcagagaccctatggaggtttatagacacctggctaaaaaccccagagctagagagataaggggaagcttgtgtaaggttttacagatcaggatatggaatttgggtctttcctgagtgaaataggaatcaactggaaacagaagttgtgaaaaggtcatgttggctgctgtgtagacgattggaagggctgagggagccagggatagtcgttggaaggctgttgtagacatccagttgagagatgatggtgtcttggaccagagtgtgagccacggaagcagagagaagtgaatggacctggaatatgttttggaggtcactgaggctgtcattgttcagtgacattgaacaatgtctcctctcctttgaaagacacttccttactccactgatgctgggcttagccccatgacgtgatttggtgattgtaatatgagcagaactgagcagaggctttcagaggccttgtatgtgtccactggcttcttgtgttcctgttacttgccatgagaatgacaagccccagatttatggtggtggtggtagtggtggtgggtggttcttcagcctgccttctggaaataggaaacaggtggcgaggacctgaatttgacctacattctgagaataagcccagcagaactatagttgactcactgtggtatccaaccactaagatttcagggttgtttgttactgcagcaaaaactgagcctaatgaaggtaggactggtgtaatccgttggtcatggtcaggtatatgatgtgatgggtgaggaaaatggaggtggcaaggatgtccgtatctttggcatagacagctgggtggatagaggtcccatttactatgattaagaagaccaagaattcagttttagtcttgtcaatctgagatacctgtgaggttcccaagtggagatatcaagtccacagatgaatatatgtgttttgggctcacaagagagttctgggctaaagatatgcttttttatcgcatgtaaacaatattcaaagccacaggagtggataagcttatttgggccagtatttttttttttaaaataaaaaaattaattaatttttttaaacttttactttttatgggtacatagtaggtgtctatatttatggggtacatgagatattttgaaacatgtgtgcaaggtgtaaaaatcacatcaaggtaaatggggaatccatccccgcaagcatttctcctttgcattacaaacaattcatttacactcttttaattagttttaaaagtacaattaagttattattgactacagtctccccactgagctgtcaaacagcaggtcttattcattctttttagctatttgggctggtacttcttgaactttaatgtgatttgatgcttgctgagaaagcaggtgccttggccacactcatggagaggctgactcaataggcatctggtagaactcaagaatttacattttaagattcttcttggtgattcaatggtggggttctatagaccacactttgagagacatgggcctaaggagggatgtcttaaacgcaaatgagggtgtcttttgaatgttcatctggcattcagcccagcagaaaggatgtgctcggattctgaatttccttccaccttcccactgttaaggtccctaagcctcagaggaattctcaaagtaatcctacaacagaaagattttaagacaattagatcaaaacatgtttgcattcatttctaggtatttatttataaagaaaattctgccttcagattttaattaggcagttttatctcatttatccatttaagtgctgcctatattgagaggcttgaggtcaagatgcgtgtacgaaagtcttgaaattcctgctttcataatagtggtcactccggcacatcattggccaaagcatggacatacccacggctctgatggtgcttcttgagttgtggtttgtgcccatgtccctggtaatgcttgttgcataattccctggaaattgaaggagggtgtaaatgaagtctctttgctctcagaaagcagacagctcagttttctggatccaggacacaaaggggtgatgtacacgtgcctctttttatctgttgccaaaagctcagatgctttttgatgacagtctacaaccaaaagttgcaaattggtggcctagaaggtggatctgtctggcagatatgtttgatttgagctacacaatgtgtttttttcaaattaaattaatttccagcattgaaaaaccgagaggctttatataagatccagatttttggcttctcttgaagaaaaaaaatgtgaagatctggcagtgccaagcccattttcccacgtagcaaccatcagctggaggtgagtagcagctgtcccctttaaacagggctctgttcctcagtttggcacaggcccccagaacaccctcctgagcctgatgctctggctgagtgcttgttaccacttaccatctttcccaggtcagcttgacttgctgacttgcccactttaccagcatggcccccagggtgactacattgcacatctccactcctacaattcatatcgtagtctggatttgtgcagtgttcaactgtgcaaccgaactcaggagtcttgctggctccgctggatcagtggtttttaacctgggatctatgggtcctcagggtctttggatgtgtctcaagggtcccatagagttgaaggggagatcttgagggtagagcctccaaggggcctttaatttcttatctgtagttcaaacagaacagcttcctctaggtctggtattttggaatggtgaataatattttaattttaaaaaaagtttcgtggctaagaaaattcgaaaaagatggatgccaaaattagctttatataagtcacccaagtcctttggggaataaaaccactcagcttgcatgaaattcacttctgcagcccccaactgccaaatccttaggctagactagtttttatcagtataatttacatacagtgagatgcacatatcttaagtatataaatcaataagttttgaaacatgcatatagccctgcaaccaactcctctatcaagaggaagagcattttcatcaccccccaaattccctcatgcttcttttcattcagccccacccatccctcagaggtaaccactgttttgatttctttcacagtagttttgcatggtcctgaacatcccatatctggagtcacaacatatatagccctttgtgcctggcttcttttgcttggcaggacatctttgaattcttccatgttgctgtttgtcttggtaattcattccttttattgctgagtagtattccatagtatactgcaattatctatatagtctcctgttgacgacatttgacatgtttccagtttaggcttaacctagtttttttttttttttttagacagtctcgctctgttggccaaggtggagtgcaatggtgcgatctcaggtcactgcaacctccatctcccgggttcaagcaattctcccaccttagcctcgccagtagctgagattacagggacccaccatcaaacctggctaatttttgtatttttgtagagatagggtttcaccatgttgaccaggctggtctcgatctcctgacctcaggtgatctgcccacctcagcctcccaaagtgctgggatttcaggtgtgagccatcatacccagccttaacctaaaatttaaggcccttcatcatctggactctgatttcccatctggcctcaccacatggtttttgccaaatatccttcatggtgctcactcactgaggcccttcacctctgtgtacacacatttgtacataacttgttctgcctctagatatatctctagataatcatccacctgagaagcttgcatatttcaagactcagcttaaacggtgccttctcgtccagacaccatgttatacacggcgtgtaataggatagaatgcattgtgtttgattatgtctcttcctttccaccagaagagaaaactatagactgggtccgtattttattcactgttgtatctgcggtacctgtacataagacaaagtaatgctcagtacatatttgttgggataatgtatcctgccacccaaatataatattttcttagagctgaacacgcctagtttctggactattcttcattttctctctgatagtaagaggaacatatagggaagcaggtttacttcatagagcctggaaggtccatgcattagttaaggtaggctgtaccactgtagaaaaataagcactaacatgtgtaatgtctcaaagacaattgacatttatttcttgctcatgtggcactttgaggcaggtgttcttggctggtaaacagcttttcccgatgtggtaattcatgacccagcctccttttggtatgtagctctaccatcccttggggtaaaggttcacagactttctttaagttcatggtactgctaatgtctttgtgatgtttttcatagcaccttctgctaaataaatcacttattcttatttatttatttttgagacaatgtctcgctctgttggctaggctggagtgcagtggtgcgatcgtggctcatggaaatctctactttcctggctcaagcgatcctcccacctcggtcttcctgagtagctaggattacaggcatgggcccccatgcttgactaattttaattttatttatttattttttatagagatgaggtttcactgtattgccaaggctgaaaataacttatttttaagtagttggattcaaagaacttaatgagtatttatgtctgtaacaactcagtgcttacgttgatcttcataaagtacagttgatcctcattattcatggtagatatattttctaaggtcaccacaaacactgaattagcaaatccctaaccattgctcttagaggaaatacagggttgggttcctgtgagcccttagtcactacatttttgtcatccaatcaatacatagcctgtattttgatgtatttgatgtgtgtttctgtttaaagacaccttatttggtatatattattggttcattaacactgaaatcacagccagtagcactataactcatgcctggagaaagcttacctaacctgtattttctttataaggcacatcacagccttctcatgcttaggaacactagactagacagctctgcagcactacacgtgggggctgctttaaacagtaaaatcaccaacagaaagaacaaaaatggaaaaaacctggcactaaatagaccatgaaaaggacacttgtttacagtttgagagctgatacaaggaggcagagggacaccttgttttaccttggctgacaatgggcgcgttgtgtggttcagacttttttcagactgctctgcacatgttcatagatgactctgaaaacacatgagtattgatttaggggttatgaatacattttagtgagtaggtgaattcacaaatacagactctagataatgagaatctactgtacttggtttttatcttaacaactgccaaatactcagctttgcaaagatatgacgtcattgaaaagaacatagtgattaatgtgaagccctgaattacctaccttgacctagcaggttgcatggggcctgatagatgttgctgtgtatccctcaaaagcctaaaatatcctatggcaccagggtgagtttatggtgatgccccaacagggtatgctgacatgtagtttgggaactgtggaattagtgcctgaaggttgacttcctacagccagcaggaagatgaacatggaggatatactcctgcttcccgcaatgccctttcccgcaagtgtccaacatcactttctctcacattccattggccagaactagtcacatggccacacagaatgcaatggaagctgggaaatacagttattcagctatgtgcatgggaaaaagagaaatgggttttggtaaacagcctaaacagtctgccattcgtcttgaatttctcatctattgggaataacaatttgactcccttatatttctctatcactataagtcttttttacgcataagtgtcatttaattctcatggctattctatgaattagggacacttagcattcaagtcaaaggtttggagtcagacgtccctgaaaccaaattcaggtcccttgagttctagcttggtgactctcggggggacaagctgcttcaattctctgggcctgatttccccatctctaaaatgggataacaaagcctgagttggagattcctatgcaagtgatttattaagggagctgcccttgggagaaactgtgaggaaataggaaagcaagagtagggaaggggagactaaacaacgacgtggttttaggtggagactagcctcagactgatcctgcgcacagctctggagtgtaaatggcatctcagagtttgttccaccttgaggaaacgaaccaaactcttctatcttcatgtcagttggtcactggctctgggctactgcagattgggaggagtaactccctggaatgtctggacaaggtggctccaatggccccaaggacgattgcaggtgtcagcctgtagcaggagcatccacatccgcaggcagaaggggtccccaggagcctgatggggcactgacagtgtctgctaggagggctacgggggatgacgcatggggatggcttcccagagtgcctggtgcatggtaagcattcaagaatgagcagctgccattatgattgttatgactgatttacccccttggcatttaaactcagacacttggaacaagctgtataagactgagaggctacaatttcagaaataaagctttttcctggacagctgggagatgaaaatagccagagaggggtcaggcaactgccctcatcttgggttgcttctttctttctttgtttttttgagatggagtctcactctgtcacccaggttggagggcagtgttgcaattggctcactgccaactccgcgtcccaggttcaagcgattctcctgcctcaccccgccgagtagctgggactacaggtacccaccatgatgcctgactaatttttgtatttttagtagagacggggtttcaccatgttggccaggctagtcttgaactcctgacatcaggtgatctgcccgccttggcctcccaaagtgctgggattacaggcgtgagccaccgtgcccagccaggtgacttctttttgagatgcaactttcttgttggcttgtggcacagactccagatcgccacaataattaggggcaggcagggtccggggacctgctcctccctctcctccctgggctggccaatcctgagattccactgactaaggatcggggggcctttctgttactcccggtgtttcttctcctctcctgagaccccctgggatagaaacatttacctagacctttggttctggatgttggcttcagaaagaatctcctctagagaatttaaaattgcaatgccccaaactaatctatggtagaaaaaaatcaaaacgttctggggaacggggatgcagattgactgaggaatggcaaaaaagccttctgggctgatgcaaatgttctatatcttgatatgcaatgttatactcatgtatatgcaatgtttaactcaaactcataaaatagtattcctaagatttgtgtcttacattctaaataaatttcatctcggaagaaaagaatgtaaacaggtattgaactctagttaatgaaatgataagcatgctgacatacttagggaaaaatatactggtgtctgcaatttactttgaaatgcataaaaaatcaatatgggttgatgagtgggtagaggggagggtagatgaataaataggtgataaaaaatgataaaatgttaaatgtggaagttaggtcatgtgtattgagtgttcactgtaaaaatctttccactgttatatatgcttaaaaatttcatagtaaaaatgttagaaaaaataaatacctatgcccagaaaaatggatttaattggcctggaatagggcctggcatcagtgtttcataaaactccctggtgattgaaaacactgacctgacttacagcaataacacttgtgccttataaaatgcctatgatatgccaggacctttacataaaatatcccatttagttctcacaaaagtctggatgatcagagaggtgtcacatgtttaatgtcatatggttactaactggcagagacaggcttgtaaacaccacactctaaatccctaaacagtgaccttttattgatcctttaatatgtgccaggcatggtaataaaagcctgcagaatttcactgcttgtccctgcaaccatcctaggagttagtcgtgattatcctcgttgtccacaagcgacggctccaggaagttaagtctcataaccagttatttatttaattaataaaacttgatatgccagacactgtgctaggatctggcattgcaatgtgagacagtcagttggttcctgtctttttttttttttttttttgagacagtctcactctgttgcccaggcttcagtgcagtggtgtgatctcggatcactgcaacctccaccccctgggctcaagcaattctcctgcctcaccctcctgagtagctgggattacagatgcgcaccaccgcactgggctaatttttgtatttttaatagagatgagatttcattacgttggccaggctggtctggaactcccgacctcaggtgatctgcctgcctcgccctcccaaagtgttaggattacaggcatgagccactgtgcccagccagttcctgtcttcatggcgcttgctggagtaggaatttaggctcaaagttgcattgtcaagcaagtatttaattacaataatgatttatgctgcagacatagaattaatgcatctaagagggacacgaggttgaacattagagatgggaaggccatcaaaaaaaagcttccttaagatgatatcctgagctgaaacctgaaggaatagttggtgttggccaggggagcacattccagttggagggaacaacatgtgcagaaacttcaaagtgggaaagatttcaggagaaagaaggccagtgtggctgacacagagcgagaggaggattggtgcaaaatgatctagagcagtaggcaagggtcaaaccctgcaggtcttgtacgccatgggaatgacttgggactttagccctaggtcactggggaaccatggacatgtttcaaggcagggggaaaacatgatctattttgctccaggttatataagttagaaaatggccaagtccagatttagacctggatctctctgccctcggagactttgttctactctcctacactgttttcctaagctcgctgggattccaaacttttcaaatgctgctgtatttccaagaattagttgttttggccatgtgcaaaaactcaacctgttcagcgggcatgaaaagtcccattatagggcagaggacataaaagcaacctgcaaccaccactaacgacagcaaataatgatgagttacaggctgggctggtggctcacgcctgtaatcccagcattttgggaggccagagtgggtggatcacctgaggtcaggagttcaagaccagcctgaccagtatggtgaaaccccatctctactaaaaatacaaagattagccgggcatggtggtgtgtgcctgtaatcccagctactcaggaggctgagccaggagaatcgcttgaagccaggaggcggaggttgcagtgagccgagatcgcgccactgcactccaacctggacgacagagcgagactccgtctcaaaataataataataataataataataataataagaagaagaagaagaagaagttacaacatccataatattctaggtgacaggactaattaatgtgcctaggctaagctatgtgttgggggtgctttctttacaacttctgttacagagatgtcctgggtgaaccaatgtgttgggttcatcaagaaataggcagggagaggatgtaagggtggaggcatttggcagattctttgcactctgctttccacctgttgaggaggtgtttgaggactgcagggggcaaaaggtgggtctcttctttaagcctccctcaaaggggatatagggaaaagtctgacttgtaacagatctggaaaatccttagtgaccaacttgtccattttattgggatccaaaaaaagggacatgatgtagtcaagcctcaatagtgagtctgtggcagtggaggaaatagaattcaggttgcctgagggccagatcagtgtgttaaatatctccaaagtcagaaccagaggcatagtcagtgatgaagccacagaagtggacagtatcggttcatgctctctttttgagcaagggtaaggagttttgattttattctaaaagtgctaggaagccattggaaggctttaagcagagggaatgatttgatctgatttatgttttacaaagagatctcttgatgcttggtgtagagtggactgatgaattcatctgggtgagacataatgatgattgagcccagggagggatagacaagatggtgaaaaagaaacagggtctgctaggcgtggtggctcatgcctgtaatcctagcactttgggaggccaaggtgggcagatcacctgaggtaaggagttcaagaccagcctggccaacatggtgaaaccccatctctactaaaaatacaaaaaaaaaaaattagctgaacgcggtggtgggcacctgtaatcccagctacttgggaggctgaggcaggagaatcgcttgaatgcgggaggcagaggttgcagtgagcctagatcatgccactacactccagcctgggtgacaagagtaagactccatctcttaagaaaaagaaaaaaaaaaaaaaagaaaaaaagaaagaaagaaacagaatcaggaaatgtatagctgcaatccatagaacctggctatggtttatttatgagggtgggagagaggggtcaagaatgtgtcctggatctctgggttaggcaattaagacccttggagaggaggtgccattcctgagatgaaggtgactggtgtgtggagttggtggagggaagagtgtatcactgagctcagtttgaggtactgtgaagtttgggatgcttgggagacatccaaacagagaagccaagtcagtgttggatatatgagtatggagttctgaagagagattactcctggagatttaaatttgagacttttggagggtgataagacagaggagatcagctgctaaggaaatatagaagatgctggggtatgggtgaagggcaaccaacatttatgaggcgcctactatgtgccaggtcatcttgcaaataccgtagggatgcatgctcattttaccagtgaggaaaatgaggttcagagaagttaagtaatttgctcaaggtcacacagtcagtaagttatggcagaggtgggatttacatccggagttttcttccttttgcttctagaaagcaagcttctcttgcttactggttcccatgagggttcttggattgacttttaccaggaaaatctgggtaccttctcatccctgcctctatcactcaggccagtaggaccttctgattggccaggtctgggacatgtgccaaccctccaatccctgaaaccgggcatcggtgttgaccttgcccaaccacatggctagagagtaggggaggagacatgggagtgaatattggtgagggtaaagagagatgttcacaacagacactttgctccttggacattgacatcctagggactgttgcctgtttagaaaggcgttgctgccacatggcggttcttgggtgacctcggcatatgagcaggggaaggtctgaaacagtgggaggctcttatttcggagagttgagcacagaatgttggagtcctttttgattgcaaagtcacccacaaaggcatgtgtgtccctgcagcttgggctacagatgggcagtgaagcatgcgcgcacgcacacacacacgcgcacactctgagagactgacttcagatgagcttttattagctaacatatcatctgtgcaaagaagagactcacatgtgagcgtttgcatgatttgaaggagagaaaaatatgcctgccagattctttacttccaccccaaaggaagggaccagagtgacctcagcaacctgggtggctgcattttctctaagcacctgttccttgtcttctaaatctgaaatgggagaggtcaaatcatgagccatgggcagcggggaaagagtctagagggaggagaagggtctccatccactgccacccgtcaacatatcagccaacctgtgacagtatttatcaagcacgttctctgtctctccaacttgtgactgaggacaaagaggatgccagtgaagcaagacacagagactctgtctccaaggacattgcaagtcacctggggacttcatttattcacttattcatcagatgttttctatcttgttcattattgtattgccagaatcttgcacaatgcctggctcacaataggtgcttaccaaatatttattggatggacaagttagcgaagaaatgagaaaatgaactgtattagacattgtgacaacaagactgtgaatctgccttgagaaattcacagctgattagggggaaatagacatccgtcactgattctgttgtaccctcctgcagcctgcctgactacaccttgtgtttgacacaattgtccactctctgatcactgaagctcatcccccgtcccccacccttggttttcatgctctactttctgtgctgtttctcttcaacctctctgaccattcagctcaggctacttctctccagcctgtttctaactgtgggtatcttcagctctctttctgtcaccctcgacaccttctgcatacctgctgcctcagggtcctatcaatgctgttgagcccccaaattattcacttgttaaatgaataattccatagatatctatggattctattcatgtgccagtgtattctagatactagagataatacaacgtacaacacagactaactcgttctctaggaacttcaacctcccactctaaactctctcgcttgacctctggacttgacattctattagatgtccaaagggacattcattgtctcccactctggaccatccctttctcctgtgttataaggctcaggagttggctcttcctaatatccagtttcccaaaccagagatggggaactcaccgtaggctgctccctcttttccaacctcccacccccaataggcctctagtcctgaagtttccatatatcacacatctcctacagcctccttttccccaccctctttgcacaagtgttctttatttcttgcctgtggccgccatattggtctcccttccaactaatctatccactgcaacttatctctcccctgcagccagaggaatctaagatcccaaccgtgtcatattttttcattactgaaaagcctgagggcctcccatgaccctagggtgagaacccaagcctttttatacaacctacaaggcccatcatgaaccatccctctctaactccccagcctcagctctcacatggcccatgcagatctgctcactgttccttcagcatgcctgcctatgtcagcctgaaaccctttgcttatgcatctttcttctacgcagctgtttcttatattctcctgtgtagaactggcctcttccttcctcacacccctcttgtgccctgtcatctttctctcctcttgcacttgtttacattccttcctttttttatcctacaatggaaggggcagggttttagtattcccagggtcttgcacttgtaggtgactgtagcagacactattggtgctctaccttatttcttctactctcctacaccagctgcaggctttgtaccgcaagcctctgtgactctcttcctgacggttttctccagccataagagcttgtttgggatatgaatggggaagaatggaagcgccagggagttaatgctctagggagcactggtgggtaaataacaggttaaaaaatatgtcaaataagaatagacattggtggattgatagcctggcatccttactccttgggtgggacaactctgagattttttttacaccctcttccaggggtccaaattgtgaatgtgtgcagttgtgacagtggtaacatgttcattaatacactcttccccgacatcacatccccactcctgaactggggcttcctgggatcatctccaaaataaaccattgcactcgaatctttgtctcaaagtctgcttctgtgggaacccaactaagatagtgccttgtatggtttggccctgtgtccccaggcagatctcattttgaattgtaatccccacgtgttgagggagggacctggtaggaggtgattggatcatggggacattttcccccatgctgtcctcatgatagtgagtgtgttctcacgagatctggttgtttgataagggtccggtgcttcccccttttttctctctctctctccttctctccctctctcctccctccctccctccctccctccctcccttcctccctccctccctctctctctctctctttcctggcaccttgtaagatatgccttgcttcccctttaccttccaccatgattgtaagtttcctgaggcctgcccagccatacagaactgtgagtcaattaaaccttttttcttcataaattacccagtcttaagtatgtctttagagcaatgtgagaacagactaatacagtgccttaagaaatgtttgatgactgactgagtgtaatataatgaatataaattatccataaaacagtaggtgggcaacataagatagcttacaaacaagaatccacagttccaaagtctttgtcaatcaggggagaaggactccataggggatggagagtgacaaaagttagcacttcatgaatgtccgttatgttctaggctctgttctaagagagagagtgtgtgtgtatttttttttttttgaatttaaacatctcagcaactcatggtgggcactgttttaaacctgatttacaaacaaggtagtcaagtgggtcacagaaagtttcagcacagatcttcttagctgtaagtggaggagctgggagtcgtcgactccaggcagtctggctttaagctgggttcagaaccactgtggcttgtagaggtggtgagacttgatccaggtcttgaatgactggaagggattgggaaggacattcaggaaggtgggtcagccggagcaaaggcacagagatgagaatgcacacaccttgctcaggatcataacctcggaggcttcttgattttcaggaaggtctccgttctggaactatatcatttcctcctccattttccctgcccttcctcatttattttcaacactctgggaatgtggggaaggtgaaagggccaatagccggaaccagaagcctccgaggaacctggctgcagctactacagcagcagattctcttctgtagctttactgatttgtaatcagagtttgcaagagtctcaaacacacactaaaacttaggttcaaaaatcacagaatcccagaagtctcatatccaaggctgcaaactcaaatgcctgcaagggccaagcagccaaggggaagagtgaaaggcccagatgcgggatgatcaatggctctgcagatgccctgcctggaggaggcaattcccagctacagcccgtcatggcctggtgggagtgggggcttggcatggcctgtttttcctttttatagaaacatagaaggccaggcatagtggctcacacttgtaatctcagcactttgggaggctgaggcaggaggatcatttgaggtcaggagtttgacaccagcctggataatatagagagatccagctctgcaatcaaataaaaaaaattagctggttgtggtggtacacacctgtggtcccagctactcgggaggctgaggcaggaaggtcgcttgagcccaggaggttgagactgcagtgacctatgattttgctactgcattcagcctgggtaacagcgaaatcttgtctcgaaaaaagaaaaaaagagaagccagaactccaatttcaaaaagatgaaacattccaaattttaaatactggaataaattaattaaaaaataaaacctctttgcaggttgacattaaggacatcaaacaaaatgcattaatgtttcaaattggttactgagtccctgtgttaagacccccaccagacaataggatattgtacttaaaccaacagtatcttagacttagagaatcgtagcttcaggatcattactgtcatagattcttagacttaacactgtctctgaggatacttgacatgttgaatcattaaaataatagacatagaattttagctgagatctcaggtacatagaatcataaaagcagacaatcagaatcagcagcattataggtctttttctcattaacctttaaaatcttatcatcaagtactactgggatcagaattcctctacactgagtatctggcttttgaaaaatgctagttgaataatggttgggtgtggtggttcttgcctgtaatccagcactttgggaggccaaggcgggcggatcacctgaagtcaggagttcgagaccggtctggccaacatggtgaaaccccgtctctactaaaaatacaaaaatcagccgggcatggtggtgcatgcctgtaatcgcagctacttgggaggctgaggcacaagaatcgcttgaacccaggaagcagaggttgtagtaagccgagatagagccacagcattgcagcctggacaacaaagtgagactctgtctcaaatttttaaaaaagctagttaaataaatattcttatcaagtttctgaatgggatccttcctctccgatattcttgctaatatcttccacaaatatttttattgagcacctaatacgggcagcagtgaaccagagagactaagagcctgttgtaatggagtttacgttcttgctcaggtgggcaggcggtgaacacacacaaatgatgattttagacagtgaacctttcttttattttatttcttaaaaataaattttattgtgtatatttaaggtatacaacatgatgttatgagatgcgtgtagatagtaaaatagttactatagtgaagcaaattcacataaccatcatctcatattagcactcatttttttttttttttttggcaagagcagctacaatctactcatttagcacaaatccccaatacactacactattagtaaccacagttctcatgtttagatctctagacttgctcatcctacatatctgctattttgtgtcctttacccacatctcctcatttcctcgtcccaccccatccctggtaacctctatctctgtatatttgactttcttttttggagttggagtcttgctctttcgcccaggctggagtgcagtggtgccatctcggctcactgcaagctctgcctcccgggttcattccattctcctgcctcagcctcctcagtagctgggagtacaggcacccgccaccatgcctggctaattttttgtatttttagtggagacagggtttcaccgtattaaccaggatggtgtcgatcccttgacctcgtgatccgcctgcctcggcctcccaaagtgctgggattacaggcgtgagccaccgtgcctggcctttgactttttttttttgtttttgagacagagtcttgctctgttgcccaagctggagtacagtggcatgatctcaactgactataacctccacttcccaggttcaagcgattctcatgcctcagcctcccgagtagctggaactacaggcatgagccgccacacccagctaatttttgtatttttcgtagaggcagggttttgccatgttggccaggcttgtctcgaactcctgacctcatgtgatccacccacctcggcctcctaaagagctgggattacaggcatgaaccactgtgcccagcccttttttttttcttattttttaaggttccacatataagtgagatcacacaatatttgtctttctgtgtctggcttatttcccttacagagtgaacatttttaaggagaaatgacacagaataatattatagagagtgaccctggggtgagaagatggggctaccttaggtgttcaagtggccctctctgcagaagtgacctgggagaggagaatggaataatgaggaggaatcagccagggaatatttgggggaagagagttccagacagagggaacgtgagtgcaagggccctgaggtcaggctgagcttgtatgatggaggtgtaggaagacacccaatgtggccatagcacagggactggggagggagagtgcgggggatgagaccaaacaactggacaaggatgcacacgcttttcatttcaaataaataatgagaaacttctggtaccctggtactaaacaagctaccttctacacattgcagggaaatgcttgctaagtgttttagatgaaacaatcaggtcacagagaaggaggtggggcttagttagggctgcctttagccacagcatcataaagggcctgcaggggaatttcctcaatgcttttgtaagcattctgcttgatacttacaccacttgcccattactgctgccttgccacagcccctcctccctggtcttgtagtgctgggtcctgtgtctccaacagtcagccacggccagacagggaggagagacaactttcaaaagggtgtgtgagtgctgtgacagcctctgtgcttgccatctccatggtacccaggcagggggacaatctaattaggctattttcggcatcccggagggaggggcgtggagggagacagggagaaggggacctgcctctcctgctgcctgtctctctctctcttcctttctgaagctattattgattaagcagttaaaggccgaggaagcaggacctttccatgatctgtgctaggatcagaggagtctttctggcaacttggtgggccttgtgaacagcatcaggaaccctggggctggaaggcttcccagtgctcggtgctaatgagctctggagcctacagctttgaccggaatcacgtcctctgcaggctgtttgtcctctgctggggctagctgccaccagcttcctctgaaatgatgggcccagagtcaaggacgcctatagccctttgtttcttagcctggggcctgtcctggctttagaggtgtttgtctgtgatattcagagcctggccgggggaaactgaactttcatctgcctggaacatgtggctggtggctcctggaagggattcatgggttgtcaatggaaccacacttgactctaagttccgcgtggctagggatcacggtcagtttgctcagcccatgccccagagtctagacttcctacatgctaaacagttattcatcaaatatcctgttataagcctgtaggaagggtgtctcctaaagggtcttctcttttcacccatgaggcatcactgtcacatcccttcactggccactgctttgcccaggtgtgctagatctagaggttaatgtggtcaaacaaggctggaaaataataccttttttttttttgagacggagtctcgctctgtcgcccaggctggagtgcagtggcgagatctcagctcactgcaagctccgcgtcccgggttcacgccattctcctgcctcagcctcctgagtagctgggactacaggtgcccgccaccaggcctggctaattttttttgtatttttagtagagacggggtttcaccatgttagccaggatggtctcgatctcctgacctcgtgatctgcccatctctgcctcccaaagtgctgggattacaggcgtgaaccaccgggcctggcctgaaaataatacctttaaagcccttgccatatttaggaactgtgtcaggaggtgcacctgcctcataagaactcagtgagacaggcaaatcctacaaggctattatccccattttacagatgaggaaactgaggcagagagcagttagagcaatgtgcccaagacaatacagttggtgtcagagttgagattaaaacccagatgtgcctgaatccagagccatcctcccaggtaaagcatttacgtgggattctcagcttcaggactcactggagtgtttaacaggttaacgtgagttataaatctcaaagaaagggcatttcctaaaatcatttgacccttccctttttgttttttctgagcccacttgttaacgtcctctgatggcagtttgggaagggctgctaggaggtaattaagcagagcaagtgataatgtccttaattaatccaatccactgtctttcaattgtgcttatttccttatcttggagattgcttcaacaggaggcctttaaacattaaaccactggttattccttctgactccagaatgagcatgaacacccaaagcagctatttcaaagagcatctcatctcgggttactgctttgcaccaacctgagatgtggtgctgtctgttacagcagagagctgggaggaattctgagccgggggtggaattcaggatgttaacctgcagctgaaggctgctaacccctcctcttcccccatacaaatgccttgatgaatcaggcctcacagtgggactttgttcttttgtttgaaatattatgaactcacaagacttcaaagacactcctgtgatgttttccattgccatattccttttcacccattatttagttatttggcatgttcggatactgccttgaaggcagggatctcacctatatgcctcttccccactcaatgtccagcagagggttggacatgaagatatcctaataaatggctggttagtggattctctcctttcatcagcattgctctccacatcatcaaagctaccatttattgattgtctcgtatgtgtaggtattgggctgtacgctctgtagttaggagtcagccacactgcagcctatgggccaaatctggcctgccgcctgttttatttttactggaatgcagccatgcttattcatttatgtattgtctgtggcaccttttgtgctgcaatgacatggttgagtagttgggatggagattatatggccccacaaagcctagaatattaactatctgcccctttcagaaaaagtttactgacctctgctttagctataatgaatacataatcttttaatagtcttgtgacaatcttgaaaggcaatgctgccatttcacagatgagaaggtcaaagctcaaagatgttaaacaatttgcccaactgatgagtgggagatccgatgtttggactccagtcggcatctccaaagccagtattctttactccactctatgctccccaacaaactgaaaacaaactaaatatatttttacccctcatttttgaaccaatgcttttgagcatctggggttgattctactgggactgcaaagtcaatgctagcgtaaaattgcccctaaaggcatgcaggcttcctgggtagttggtagctgaaggggactgttaccctatgcgtagatacaccggttccctactggagatcaaaggtttccggagtagctgattcatcaacacccttgaaatctggcgtcaatttcacaaagagaaatttctttctttctttaagtttgtttgtttgtttctctctctctcttttctttctttctttccctttctttctttctttctttctttctttctttctttctttctttctttctttcttttctttctttctccttccttccttctttccttccttctctcttttcccttcccttcccttcccttcccttcccttcccttcttttcttttcttccttgagacagaatctcactcttttgcccaggctggagtacagtggcatgatcttggctcactgcaacctccgcctccttggctcaagcagttctcctgccttagtttcccaagtagctggaattacaggcctgtgtctgctaattttttgtatttttagtagagacagagtttcaccatgttggccaggctggtcttgaactcctaaagtgatctgcctatcttggcctcccaaagtgttgggattacaggtgtgagccactgcacctggctaaattaatttctttagcttctcagcctctgacggcttcaacatccctgatgctttaacctggaaagtagtcctcattcctagtctttttgcacactgtggattttagagccatctaaatatttgctgacttctttgaacaggggaatagagaatgagtaagaaagatcagttcacaaacatacgtccaagtggttggttgtgtaatgggcagtggtgagggcagagaatattaatgcctctgggaagaagactcaggtgagctagtcttcaagtttttggtagtggttttttgttgttgttgttgttgttgttttttgctgttttttgccgtttttgtttatattaggcaaatcctacaaggcaaattaaccaaactgaaactcagagcacattttgtttcatttattgatttatttttctggcctatgactatatttacatgtaaaattttacaaaagcattcattcatatgtttacggagagaactgtaggaaaaagaatgagatcaagaccatcttggaaaatcagggacatgttgttgtggtactttttagtcacactttggggacattaaaaaatatagtccccaaggagggcaattttgtccttgtgagcattccacgatattaggaatttcaaaatacatttttagggaaagagtaggggcctgtgaatgtgtacatgtatgctggggtctctgatctcgggtacctttcttcttcttcttcttttttgtttcttttttctttcttttttttttttgagacggagtcttgctctgtcacccaggctggagtgcagtggcctgatcttggctcactgcaacctccgtctcctaggtttaagtgattctcctgcttcagccttccaagtagctgggattacaggcccccgccaccatgcctggctaatttttgtattttcagtagagatggggtttcaccatgttggccaggctggtctcaaactcctgacctcaggtgatccgcccgccttggcctcccaaagggctgggattacaggtgtgagccacagtgcccggcctgttcttctgaaagtatgaaatttgggattctgtgcaatgcattttccccaatttatctcattatcacattgtcagccttccatgttggaatcattacctcattttgcaaacaagggaattgaaactcaaaattgttaagcaatttgctgaaagtctcatagctactggctaaactgggattcccatttagatctgtcttattgaaagtctgtattctttgacaatgatgatatcatcattatcaacaacaataattcgttgactggtattgagtgtcaatcatatgcaggcactgtgctgaatgctttccatggattatctcattgaatctttattcagtgtaggttatacattatccccattttataggtaagaaaaactgaggtttagaatagttaagtagtagactcaaggcccctcagcttcaaagcactggggacagagctcatatacttcattgtgtgataccagtgctgcaaggacatgaacactgctaactggtgatctactcaagtcttactagttcatgcattcaatccagaatgtctttgccttgagggctatcacattcaatccccttgttcaatgaaaaaattagctgagttttaaggaaatcccctcccacctgtattcccttctcaaaggaaatttttggctacttaaaagagaacgttctggacttggctttcttccttataacaaccaagaccattcactcttacctaaatcctgtgttgtcctctgctgaggagctagctcagagtgctgacccttggcccgacagggatggtgacttctggagccttgaccaggtcagctgttcttctccctcctaagttccttgctctgttttggatacattctccatcagcacagcttcacagtgggtagggtttattcggctactgctggcgtggcttccctttgtcattcattctttgcctccaaaggcctgatcccaaatctagcaagagggatctggcctccaatttgaatctagtctcacgcaggttggccctgcttcctgaagaagctgtcgcaatggccagtgaagaccagctttttggtattgcctgtttcctttctgttcttctctcctactctcagtctgtctaccccacctgctagcatttgcccagcacccaaatcctccacctcatggcttaccttttacaagctgtaactttgagcaagatgtgggaagaggcgaaggttccatcgggatgaaggcgatttgcagtggggtggagggaagagtcccaggcagggggtgtggagacttctcagtgccttgtttccatctcagtcatttccagtccaggagaggcactgcagctggtgatatttccaaagcgtacatctgctcaaaatcctttattgattcctagtcgcctgtcaactttggcgacacaaatttgaatgtgcataaataccagctggtgagtgtgtgaaaatgctgattcctaggtgagcactctcagagatcctgattcagttcagggggtaatctgtgtgtgccagagcctatgtgtgattatgatgcagatggtcccagaaccgaagaacgctggaaagccttgacctacaaagtgcaaactcctcagcccatgcattactttgctcaagctaccatagcaaagtatcatagactgagtgccttaagtaacagaaatgtattttcttttttttctttttttgagacagagtcttgctctgttgctcaggctgtagtgccgtggcacgatcttggatgattgcaacctccacctccccagttcaatagattctcctgccttaccctcccgagtagctggaattatgggcactcaccaccatgcccagctaatatttatatttttagtagagatggggtttcaccatgttggccaggctggtcttgaactcctggcctcaagtgatctacctgcctcggcctcccaaagtgctgagattacagacgtgagccaccacgcttggccagacatttattttcttacagttctggaggctagaagtccaagatcaaggttccggcagatccattttctggtgggggaagccttcccggcttgctgaaggtggcttcttactatgtcctcatgtggcctttcctcagtgggagagctctctggcgtctcttttttttttcagatttttaaaaaaattattattgtggttaactatacataatcacaaagtctctgattttagctatttttaggtgtacatttaatggcgttaggtacatttgcagtgttgtgcaactgtcaccactcttcatttcccggtcttttttttaaacttttaagttcaggggtacaagtgcaggtttggtacataggtaaacttgtgtcactggggtttgtcgtatagattacttcatcacccaggtattaagcctagtacccattagttgtttttcttccttcttttcttttctttcttttctttctttctttctttctttctttctttctttctttctttctttctttctttctttctttctttctttttccttccttccctccctccctccctccctccctccctccctccctcccttctttctttctttctttctttctttctttctttctttctttctttctttctttctttctttctttctttctttccctccttctttccttccttccttccttccttccttccttccttccttccttccctccttccttccttctctttctttctttttttttgacagagtcttgctgtgtcacccaggctggagtgcggtgccttgatcttggctcactgcaacttctgccatccaggctgaagcaattctcctgcctcagcctcatgtgtagttgggattagaggcaagtgccaccatgcctggctaattttgtatttttagtggagacaggatttcaccatgttggccaggcttgtcttgaactcctgacctcaggtgatctgcccacctcagcctcccacagtgctgggattacagatgtgagccaccatgcccagcccattagttgtttttcttgattctcttgcatcctctgaccctcaccctccaaaaggctccagtgtgtgttgctcccccgtatgtatccatgtgttctcgtcatttagctcccatttgtaagtgagaacatgcggtatttggttttctgttcctgtgttagtttgctaaagataatggcctccagctccatccatggtgtctcttcttattggattcgtacctcatttaaccttaatgacttccttaaaggtcccaactccaaatacagacacatatttgtggagtcaaggcttcagcatatgaatttacaggggacccaatgtttccatccataataatatggcactcaagatgtattgagaaggacctcgtctctgcgtatcctttgtatctccaccatcccttctcttttgcatattaggatccaaacatactaaatgataccagacctctggtattttggaaggataggttcctagctgtttgtagttctaattgtcatgtattcagggtgtaaattggataaccagatttctgtcacttacccttctttgagagcattatacgcaagggcaaaaggccctgctggattcttagctgtgaccacataatatctccccagtcccgggattctctggtgattggtgctggggcaagatgcttgggtgtagaaactgaaatagtgacttctactcttggctctctcgaatctagaagggctgggtgaattaaggagatgttgaacttggctattcaactttatggacggcaatagctatatggtcctgctgtctccttgagtgctagacctctctcgaagcgatggctctcaaccagggacaattttgcctccctcctacctccttcagggtgtttggtggcatttggagacattttttattgttaccactgggaaaggttgatggctcctggcatctagtgagtaaaggccagggacgctgctcaaatatcttacaatacacaggaccctaccctaaccccaatactcatgaacagtgagaaactatccaaacggtagtgctgaggttgagaagtcctgctctagaagttctcctgagagtgcatttaccacatagagatggaagccgaagagtctcccatgcatggggacaggaagtgagttagggagaggggcttggcttctgatacttcaggcttagttatcacacccactagtaaaacgtggctcaacccatgtacctgactcagaacaatcagatgaacaacatctctttcataaaaggcaggaaggccgggagcaggatgaagaagaaacggtacctgagctctgataccaatattttaagaggattcttataaaactcagcataactttatttcctcttggaatttcctctgaatctctaggtatattggatgtccccttttctgagtttctagaataccccctgtgtcatttattataacacttatgacactattataatagtctatttattagacaggaataactgaccattcttttctccatgggctgagggggcagcctgggaagagaaagcatagtagtgtcctagggctgccgtaacaaatgaccacacactgcatggttttgaaacaatagaaatttattttcttaccaatttggaggcagtaagtctgaaatcaaggctttggtggggctgcgctccctctgaggtctcgagagagaattcttcctagcctcttccagcttctggtggctccaggctttcctgggcttgtgggtgcataattccatttcctgcctctgtctccacatggccttgttccttctgtatctgcgtgtctcaaatctccccctgccttactttttattttttcaagtcagagtgttgctctgttgcccaggctggagtgcagtgactcaatcacagctcactgcagctttgaattcctggactgaagccatcctctcacctcagcctctcgagtaactgggacgacaggcatgcaccacaaggtctggctaatttttacattaaaaaaattttttttttttcgagacagagtttcgctcttgttgcccaggctggagtgcagtggcacggtcttggctcactgcaacctctgcctcccgggttcacgcgattctcctgcctcagcctcccaagtagctggggttacaggcatgtgccaccacacccggctaattttttattgttaatagagacggggtttcaccatgttggccaggcttgtcttgaactcctgacctcaggtgatccacctgtctcgggcctcccagagtgctgggattacagttgtaagccaccgcgcccagccttaattttatttttacaagatatgggggtctcactctgttgcccaggttggtcttgaactcctgggctcaagtgatcatcctgcctaggtgtcccgagtagcagggcctacaggtgcacaccaccacacccagctaattatttcatttttcaaagagacagggtatcactatgctgcccaggctagtatcaaactcctgggctcaagcagtcctcctgcctctgcctcccaaagtgctgggagccagcatacccagcactctgccttacttgtataaggacatctgtcactggatttaggggccaccccataatccaggatgatgtcatcttgagattaacttgatcacatctgcaaagacccgtttttctttctttctgtcttttatttatttattttttattatactttaagttctagggtacatgtgcacaatgtgcaggttcgatacataggtatacatgtgccatgttggtttgctgcacccatcaactcatcatttacattaggtatttctcctaatgctatccctccccaagtccctgaccctgcaacaggccctggtgtgtgatgttccccaccctgtgtccaagtgatctcattgttcaattcccacctatgagtgagaacatgcggtgtttggttttctgtccttatgataatttgctgagaatcatggtttccagcttcatccatgtccctgcaaaggacatgaactcatccttttttatggctgcacagtattccatggtgtatatgtgccacattttcttaatgcagtctatcattgatggacatttgggttggttccaagtctttgctattgtgaatagtgccgcaataaacatacatgtgcatgtgtctttatagtagcatgatttataatccttcgggtatatacccagtaatgggattgctgggtcaaatggtatttctagttctagatccctgaggaatcgccacactgtcttccacaatggttgaactaatttacactcccatcaacagtgtaaaagtattcctatttctccatatcctctccagcatccgttgtttcctgactttttaatgattgccattctaactggcgtgagatggtatctcattgcggttttgatttgcatttctctgatgaccagtgatgatgtgcattttttcgtgtgtctgttggctccatagatgaaagacctctttttctaaatgaggtcacattcataggttctggaggttaggacatggtcatatctttcagagggacattattcagcccactccagatgggggtaaaacacaaagatgggaagggatgataacaacacattgtaggatatgatttaccacctacaactctgggaacagagaggctgaggaacagaagaaagtaagagtaattagatgccttttatgtgcgaggaactgggttaaagctcttcatttctcatctccattaatcctcactaacacttagtggattggttatctccattttaaaggtggagagagaagttcagagaaggtatacaggtagctcaagcacctacagaacaaattgagcccaggtctgctgtttccagagcccatactctttctaggataaaggaagcatttgcatggcctcttactggcagctgtagggagggaccaagcccagaacatctcatttgcaacagagaaggtgtcattgctcttcctgggcttccaacagcctggtgctcacctgcctgcctttggcagctggagcccaggtgctggacagcccagttggcccagagcctcttgaggtggggatgtggtgacagattttggctggttcagatgcaacaccctttttggcacctgtggccatttggcactgtgggggagccagtcccatacatatgtattaaaggatttggattccttactcccaccagtgctgggattcatgcaagctgagcaggattttctgagaggcagtgtactgtgatagaaagagaaagttgaaatgcgagagatctgggttcaaatcttatttttgccacttatgggctgtatgacaagtgagctatttcacttctctgagcctcagcttcttctactgtaaagtagggggtgacaatacccatttccacagagcttccacatacggcactttgaacaatgcctgctacacagtagaccctcaaagttcctgtgttggctgaatctgcaggtccctgtgatacttcctgacgcctggttagcatctatctctgcttgcatgaaagtagcctctgtgcagccaggatctcaattgccaataacatctgtcaaatgcaagtgtgaaccttgctgctagtgcaaggggcagatattggggaaggatgtcttatctcatgcatgctcataattacctggacattgataccaacatgttaagagggttcttatagaacagcataacatcatttcctcttggatttttttctgaatctctaggtatattagatttccccttttctgagtttctagaataccctgtgtttcatttattataacacttatgacattattataattgtctatttattatacagggatacatttgtaggcaagggctaattattactttcctctatctttctagaccagtaattttcaacatttgtttcttagaccagcaacgacattacctggaaacttgttagacctacaaattctcaggacacactgcagacctgctgaattagagactctgggtgtgaggcctggcaatctgtattcacaaagctttcatgtgattccgatgatgcttaggttgaaacaccacttccctagatgactggtccttaactttggaggaactcctggatcctggaacccctgaggagctttagaaaatagcgatgcctctgtcccacctctagaggtgctgacctaattgttgaggggtgtgaactgggttgaaattctttaaaatctccagaggatcctaatattgagccaggggtgggaatcaccaacacacagccccattcctaatagtcacttaatagtagaacataatagttgagtgcctccttggcaatctcatagacgtaggtcacatgctgacctccttcttcctaactgcgggtcagttcttttttttattttttactttttatttttacttttttattgtaagaacacttaacatgagatcaaccctcttaacaacattttttttgggggggatggagttttcctcttgttgcccatgctggagtacaatggtgtgatcctggctcactgcaacctccacctcccaggttcaagcgattctcctgcctcagcctcctgagtagctgggattacaggcatgcaccaccatgcccagctaattttgtaattttagtagaaacagggtttctccatgttggtcaggctggtctcgaactcccgacctcagatgatccaccagcctcagcctcccaaagtgttgggattacaggcgtgagccaccgcgcccaccttaacaacattttaagtgtataatacagtattgttaactatagggacaatgctgtgtggcagatttctagaatgtatccatcttgtacaattgagacatttttgcccattgattagcaactcccaattttcccctccctatcccccggcaactacccttctactttctgtttctttgagtttgatgacgttagagtccttattgaagtggaatcatgcagcatttgtccctttgtgactgatttatgcatttagcataatgtcctcaagtcttatctatgtgtcttacgtaacaggattcccctctttttcaaggctgaatactattccattgtatgactacatctactacagtttctttctgcattcatctgttgatggatgtctgtgtcgtttctgtatcttagcttttgtgaataatgctgcaatggacatgggagtgcagatatctctttgagttccagatttcaactttttatatatccagaaatgggattgctgcatcgtatggtagttctatgtttaatcttttgagaaacctctatattgtgtttcacagcagctgcacccttttatattcactgtgggtcagttctgacctcctcaagccctacttttcctacctgtaaatgtgagtagtgatgggaatcttctcatagcatcattttgaagactacctatgtaatgcagataaagcacttgacatgatggaagactaacaagtagccatgatgcttagtattatttccattttataggagaaggatgtgaagctcagagactttggctgcgggaagggaaaaccagtgcccctcccctccttgatcagagtcaacatttaggttttaaggttgaaagtcattgtctgtgtcttcaaggtaccataactacctagagtttcatggcctgaaagagacctggagcttgtttatacctccctcccccactgctgtatctgggtcttttggggtatagcccatttactgaacaacgaaaactttggggatccccaagatttctgttctcaacattgaattgtactgttggttgacaaatgttgggtgaagagtcctcagctttctttggaaattctgtccaacatttttggatgttcttatctggaggatggactccatcaatattctttcagttataggcagcagtaaaaaccatctcaaacttccttaagcaactaataatatttattgggtcatgtagcaaaatttccaggaatctagctagttagaggtgccccaaagaggctgctttttgtttcttataaactgaagcataaaatccaatatacacttagcatgcaacccagcaattttactcctctgtatctatccaagagaattgaaaattatgtccacacaaagaatctgcactaatattcatagaagctctattcataatagctaaaagctggaaacaacccaatgtctatcaatgggagaatgaataaacaaactgtggtacatccacacaatggaataattctcggcaataaaaaataatgaatattgattcacacaaaacatggctgaatctcaaaagcaggcactgaagagtgtatagtgttgggaggctgaggcaggcggatcacctcaggtcaggagtttgagaccagcctggccgacatggtgaaaccctgtctctactaaaagtacaaaaattagctgggtatggtggtgcactcctgtaatcccagctgcttgggaggcttagacagtagaatcacttgaacccaggaggcggaggttgtagtgagccgagaccacgccactgcactctggcctgggtgactagagtgaagctctgtctcaaaaacaaaaaaaaaaaaaaaaaaaaagaatgtatactgaaagaagccaagcactaaaaagtgtatattgtatgattctatttatatgagattctgaaaaggtagacggtggctgcttggggctggggtgggggtaattgactgcaaacaggtatgtgaaacaaccttctcaggtaatgaaaaccttctatctcttgattgtcatggtggtcttgactgtatgtatgtgtcaaaattgatcaaactgtgtacttaacatgggtacattttagtgaatataagttacacttcaataaacgttatttaagaagaaatctgcctctatcattgggttctatttatctctacgtggcttcattcttaggcaggttctccccaggaagtgataaagggagctgcattagtctgttttcatgctgctgataaagacataccgagactgggcaatttataaagagaaagaggttgaatggactcacagttccacatggctggggaggcctcacaatcatggtggaaggtgaaagacacgtcttacatggtggcaggcaagagagaaggagagccaagtgaaaggggagaccccttataaaaccatcagatctcgtgagacttatttcttaccatgagaacagtatgggggaaactgcctccatgattcaattatctcctaccgggtccctcccacaacatttgggaattatgggagttgcaattcaagatgagatttgggtggggacacagccaaaccatatcaaaagccttcagcagttttgcccctcagctcagcaatccccatggagaagagcttcttcctatagataaattatggcatagagggtcgttggaacagctggggtcatatgaccatccttgaatcaatcactgtgtctgcagatggtggtgaaattctctgatcggtcaggattagatcatgttctggagccagctgggggtgtcaacacttcaaaactacatggagtgtgagtgggggacgagtccttccctgaaggaaagtaaaggtgctattactagaagactgaggaatggatgcaaatgcaattgaggtcttctacatagaccttccctagatataaccttccaagctaggtcccatttctctccttttaaaattttttttatttttagtttttgtgggcacctagtagatatatagagctaccacatgcttcaacaatcccattactgggtatataccccaaagaaaggaaatcagtatatcaaagagagatctgtactcctgtttgttgcagcactgttcacaatagccagatttggaagcaacctaagtgtccatcagttgatgaatggataaagaaaatgtggtacacatacacaatggagtactattcagccataaaaagaatgagatcttggctgaacacggtggcttacgcctgtaatcccagcattttgggaggccaaggcagatggatcacttgaactcaggagtttgagactggcctgggcaacacagcaaaacctcgtctctacaaaaaaatacaaaaaattaactggacgtggtggcacacgcttgtggtccgagcctactcgggaggctaaggagggaggatcacttgggccaggaggtcaaagctgcagtgagccgagattgtgccactgcactccagcctgggcgacagaatgagaccctgtctaaacaaacaaacaaaatgaatgagattctgttatttgcaacaacatggatggaactagagatcattacattaagtgaaataaaccaggcacagaaaggcagacataatgtgttctcacttaattgtgggatctgaaaataaaaacaattgaacccatctctcttgtcgacctctcaccctccagaattagatagatccacatccatctcgtcacttttgtgatttatgacaacataatgtagtagaaagacaaaggctgggagccagaggcctagagggtcaaatctcagctctgcttcttccttacctcctgaccctaggcaatttattcaagctctctaaggatcagtttccgcatctgtgaacggaggataattataggacctacttcatgatgctgctgtgaggactgaatgagatcattcatatccagtgtttagcatagtgcctggtacacagtaagcacttgatcaatgtcgtttataattactgtttttagaattttgaatgacttttaaaaatggagtatttatctatagccaggtgtagcaggtgtattggcgccatgtccacatctccttggtacctccattcttataggcactgatggaatcctattgcaagaaccccccactcagactgtctgggggctttctctgacatgctgctctcctgtaggtgaggtgaagtgcttctagaagtgctggagagtcgatgctcctgggagcagcccccagccaatggtagccacccagctttctcattccttgggtgagtccactctaaggtacattcaacagcattcccaggggtttctcataggattgagcccagttgcccactgcagtaacatgcccattaatgctagattggcttgcttcccttccctgtctaacttccccgttcccctttttgagatcaccttccaagaacctgtctgtactcaaaaatgatttcagagcctgcttcttagggaactcaacctgagatccggaccacatcagtgagttgaaacatcatgtttttctgctcttgactagaattacagcaacattgtatagtgtcacagtgtagtacagttacctcttgtagaccacaggcactaacgggcagctctttaaggctttgatgaataaaatatggtaggaaaaaattaactattctttaataaatgcagctttctgggcagtcaaattctacaaaagcatttataggagaggaacgcaatggggaaaatgaatcccaaggaccccttcatggccaaaacgtgtgcgtcactgacaggggagttctaagtattggttgagtgattgattatcctggcttctagcacagggctgttactcagtgtcagattaatgagctgtggatttgtgtgtatccaagtgactgcagaactgcaaggcttagaagcctgagcccatatcttccagccgtttatatgtctctgttgtgttgatggtgagggggctgctgtaagtaaacaatggccaaaccaggtcccgcggggcactgtgattaccatgggtcttactctaggtatattgggaaattactggggatccacagtcccagattttaacccctcttctgcctctgccttcctgtgtgaccttgatgaatcccttgttttctctggcccttggtttcctcctctgtccactggaataggttggatgaagaaaccccagttattcatgctttgggaactgaacgagctctgttgccttgacaatagtgtattcagccattgcaccctctccatggggtgggtaagtagcaaatggataatgtttcattttacagatgggatgcctgaggtagagtggccagtatgatacaggcaccaaccagtaactgtgcaaaggcttatatttcagtgcaagatcttatgtaattcctgagacttaacaagtaggcagccaagggtaaggcaatttatacacatatcacaggaaacactggagttcagatggagcatgccagtatgaaaagcatgtgagcactagagtctgacagatgtgggtttgaattttaggtctgcctctctgagcctcaatgtcttctttttacggcctaaaaaataatatctatatcacgaggttaaggctaggctcatatgagacagttctgttacagtacttgttctgaaaacatgaatttgcacaagtgagattgatatatcaggaaacaatttgagcataatgtgaatttcacatttgttcatgtgaaatttcctcagtgagaaacaataggcaaatgcagaaaactgcactcaaataaactgagccacataggaatacataaaatacacacacctcaaacatctgccagctacctgagttgtgagccatgcccacccacatctggtgttgcaactgtctatccaactttcaacttttttttttttcaaattttactttaagttctgggatacatgtgcagaacatgcaggtttgttacataggtatacgtgtgccatggttgtttgctgtacctatcaacctgtcatttaggttttaagccccgcgtgcattaggtacttgtcctaatgctttccctcctcttgcccccacccccaagagaggctctggtatgtgatgtttccctcactgtgtcagtgcattctcatggttcaattcccacttatgagtgagaacatgaggtgtttggttttctgttcctgtgtcagtttgctgagaatgatggtttccagcatcatccatgtccctgaaaaggacacgaactcttctttcttagggctgcatagtattccatggtgtatatgtgccacattttctttatccaggaaccaacccaaatgcccaactttcaacatttttatgtgaggttcctgtctttaaaaaaatgtgtcactgatgaagtttttgaatggtgtgcccctaacctcatttccccataaactctgtagtttttattgcatgattttgtataatgcagtaatttttagaaatgtgtatgttgtactatagcagcagaactgactgtgtaatgaagtaaagtgccttgtacagtgcctagtacagagtaaatattagactgttctcatctacttctttctattacactttctattatatcttatggaatagaaagcagaaaggtcctgaattatgactcttgattgttgcaagagaaggtactcaagcttcatagctggaagtcgatagagatctctcacagacaggagtgcaactgaattcagggaagtcatagttttgacctttgtgagaaacagaaaacccaattcataatagctaagacaaaaagcttgtaattgcaaagttccctagagtcagagcgagatcaaggaactcaaaccatgagatgttaccaggacttagtttccatttgtcagacctgccttctgctgtgttggcctcattttcaggcaggctttcttcgcatggtgaccagatggtggccagaatttcctggttcgcaaccatacagcttcaagtctagtagaaaagatagggtgcttttttcttctagtcacatctgcctaaatcctgggattagccggctctaactgcattatgttcttatttctgaaatcatcatgcagtgcccatatttggttaggcttgggtgacataccctcccctacaattagggtgaaaatggactgatgacctggactgaagggaggcgggaaggtggttctccaaaggaagttcaaagtattgataactgaacaaggaagaatgaatactggacaggcaaaaccaacacacttccactataagaaccaaaaccagggatttggaagccatttagattctatttcctactctgtgcttcatttctttctttttcagaagcctttctttttctgcttctctaatccacatgatcttcataatcatagtagtagctgccaagtccaaacttcccagaaaggattgaatattacaactttaaattcaaaagaaagggttctgacccagcttggattaggggtccacttgcattcaaatcaagagactcaggcatgggggatggtggtgtactattgtatcaataaactgccaggagctcactgttatgtccttgggttgggagaccaataggaatggttgttgtgagttggccacactacccagtagatgtccatgataaggaagttcttcccaacttgctccaataggcctccattattttcaggatccaagtccaagatggttcagcccatgattggaaaaatgaaagaagcttattaagatacctccatgtggctgggcgctgtggctcacgcctgtaattctagcactttgggaggccaaggtgggtggatcacctgaggccaggagtttgcgaccagcctaactaacatggcaaaaccccatctctactaaaaatatgaagattagccaggtgtggtggcgcatgcctgtaatgcagctactcgggaggctgaggcaggagagtcgcttgaacctgggaggcagaggttgcagagagctgagattgtgtcattgcactccagcctgggtgacaagaatggaaactccatctcaaaaaaaaaaaaaaaatacctccatctgagacgagcatctttacctatcccaagtagagaagtagtctgcttgactccttggactccagctcatttagtaggatagagggaaagattcaggaatggcattggtgggggtaggggtgatgagcaccattagcatctccttgggaatgacccaatttctcagcttctgtttcacctcctggcccagctagacttgctaatgagcagtgatgccaactcacaccttatgaaagtcaggtcattgggatgttctttcttctgagatcagggagaattggaacatagatatttggccttagtccagaagaagcaacatcttattgagggcaggaagaaagttaagtttatttttggggggccacttggagattgctttgtatagcacactgtaatgatagacccaattcttcagacctccctccatgcatactcttttccatgtgactttgcagtttccatcacaagagacatggagtctctttccctacctcttgaatttggtctagccttgtgatttgttttggccaatagaatatggtaggagtgactatgtgccaattctgagcctatagctgaagaacgcttgtgtgtttcttcttgctgttttgtacctctgccattgccaagactactctgatgaaggaggagagacatgtgaaacagacccaggtcattcccttctcccatccaagatcgtcctacattagtcaacagccagccagtactagacatgtgaatgagctaagctgagactgaaagatctgcccagctgatcctagactaaataaccaattacagatttgggagctaataaaatgctttttttaaaagaaaaaaaagctattgtgttttggagggtggttttaacatcaacattatttggtggattgtctgttaaaatctttgcccacttaaatctgatattgatactatcaacaaatccaacatatttgttattatggtaacagaaaactgatatgtttggaatataatagaattaatagctctatattttgagtattcactatgcagcatacaactatgtacattgctgtggtcttcctgatgacacatttaggtaggttgcactagctctattttttgtaggtaactgtgagaatgatggagattaaatgactcacaaggggtcaaccagctaggaaagagttggtttgagaaaacatggcaggtctttttcactctatcaatcttcctacatccctacagtgtatctgcacccagaatcccatgttggtgatagaggtttgtccacagagctcaataattcagagtaaaggggactttcttgtgaattgcattattctgaggttgattatgattatgtgttcctgtaattttcagcttttttttttttgagatggagtcttgctctgtcaccccggctggagtgcactggagtgatgtcggctcactgcaacttccacctcccaggttcaagtgattctcctgtctcagcctctcaagtagctgggactatgggtacgcaccaccatgcctggctaattttcatatttttagtagagatagggttttgccatgttggccaggctggcctcaaactcctgacctcaggtgatctgcctgccaataacttccatcataaagatctgggatttgttgatagcattaatatcagatttaaatgggcaaagattttaacagacaatccaccaaagaagatatatatacggtcaataagtacatgaaaagatgccggtgtcattagtcatcagggaaatgcaaattaaaaccacaataagataccacccattagaatggctaaaatgaaaaagattgatgatatcaagtgatggtgaaaatatggagtgactggaattgtcacacactgaaggtgtaaaatagtacaacagagaagagtttggttgtttttaaataaagtttaacctgcccttaccatatgacacatcaattccactcctagatatctgctcaaggtaaataaacacaaatgtccgcacaaagtcttgtatactaatgttcagagtagctttatttgtaatagctccaagctaaaagtaacccccaaatctattcataggtgagtggataaactacttgtgtgatatattttaacaacaatagtaaataagttattgatacatgtagcagtataaatcaattttaaaaattatgcagagaggaagaaggcagatataaaatagttcatactacataatttcatttatttgaaatctagaaatgacaaatgaaatctagtgtccgaaggctaaatagtgtttgtctgaggccagaggttggggggttattaaggtgggtgagatctaatgagactttctggggtgatggaaatattctgtatcttgatggtggggctagttacattggtgtataaatctgtaaaaagtcatcaaaatgtacaattaaaatgcatgcacttgcatataagccataactccataaagttgattttcaaagagacctaaaattatgttttctgaaaattacatggttatgaatttctggagaatgatatatgggttgacagaatcagcttcttgaagttcagaggaggaaaaaaaaaaagctcccacagcaaaaggcaattcaggaccacggacagcacccccagtactaaatgaggtaaagtagttagcacaaatctggcaacagtaagcgctcactcaaatgcagctcaaaaaaccctttaataaatgcctactacgtgccaaatatcacgtaaagccctatttatatgaattatttcattttagtctcaccaaccacttgtaaattaaagactattattatccttactttgcagttgagaaatcaggcattgttctcaatgtaattttgtaagtaaaaggaaagcagggaatgatcacacacacacacacacacacacaccacaccacacacacacacacacacagacacacacacacacacacacacacacacacacacacacacacacacactgttggtcccagattctgaaagcggaaaggacattcttgcctttcttgtgtaatggtgttttgctcccagggcgtttgaaggcagaattggtcggcaggcaagcgggtgtaagtgccaatgtgtggaagaattacaggtacattttcccaagcctctggcagattattttttacgtacaaaattacttgtcaggaagcttttttttttctctctctcggttctcatactatagaaacaagtgttacataacatgcatatcagcagcgatggttttgcacagcatctaaccaaggttgggggaggggagcagcagtgagggagagtgcaagttatagccaaagaccctcaatgtctgagggtatggacaggatggtggatgagagaatgggggcagagatgaactcttctttgcaagattgggcaaaatcctagcctgggaatcaaacctggggcccttgcctgcgagtacctccttccactcacactgttatcaccatggtttaaactctcctttctttcctggaataagcagccccctaactggtcctcccacttccagccttttgtttttcagtattttgaccttagaacgttatagacatgtatatctgattcattcactaccttctctcaaatgggctaaacattcccccaaactgaacttcctaatgtaaagttctttataagcatcaagggtcacttaaaaatcagagccctgactactccaccagtttctttccttgcttttgtccaaccttgatcctaaccctaatgcattacttggggatccctgaaagcatcgtgctatgctgaactttgcctatgttctgtttaattgtttctttgtttggagacagggccttgctctgtcacccaggctggcgtacagtggcaagatctcggctcactgcacctccgcctcccgagttcaagcgattcttgtgcctcagccacccgagtagctgggattacaggtgtgcaccatcatgcctggctaatttttgtatttttagtagagacagggtttcaccatgttgcccaggctggtctcgaactcctggcctcatgtaatccaactgccttggcctcccaaagtgctgggattacaggcgtgggccaccatgcccaacatctgcttaattattctgcagtttaccttcttttctccatctctctccctttcctccttttccttcagagcagctaggataaccttactgtggcccacaaggtcctgcacaatctagcctcttctctggctccagcctcaccttgtgctagtccctgcaccccactctcctttgctctattccaacctcttgcttctttgaggtcctccaatgtgagccttactcctttctgcctcctcaggacttttgcacgtactgctcctactgactagaacgcttgcatccttctctgtagttgatcatctcgcagttcattcttatataacctccagatttcagctcaatcatttcccagggaagccttctccgacccttaacatcaccctgtatgtttctttaaacacacataccaaccatacaaagttatgtatttaccagtgtgatcgtttgttaattctcttcctcactagaccttaagctccacagaggcaaagactacatatcatgtcaattttgcccactactgaattactagtgtctgacacatagtagagcctctataaatatttgttgaatgactcagtacctgtctctgtttctttatttaatactaaagaattcccaatattattattttttgagacagagtctcactctgttttcagactggagtgcagtggtgaaatctctgctcactgcagcctccacctcctggattcaagtgattctcctgcctcagcctcccgagtagctagaactacaggtgtgcaccaccatccctggctgatttttgtatttgtaatagagacggggtttcaccatgttggccaggctggtctcgaactcctgacctcaggtgatccacctgcctcggcctcccaaactgctgggattacaggcataagccaccgcgcctggccaagaatttctaatgttaatcataatgttaaatatttcacttcacaaatgactttcacatgcaatgtcttatatgattcgacttgaactctcaaaattctcaggatagggatattacaccagctttcacatgaggaatttgaggctgagagaggctaagtgacttgtacaaggtaatacagattaaagaacctccacttccaggtctttccatggtctcatccccagcttcattatttgcaaaaagacatgcctgcccaatgtgtcaatgtcatggggttttttttttttttttttttgaaacttatagaggaggctgtgagattaaggaggatgacatattgagagcccagagaaacacagagtataatataagcccttattacattaccctctggaagatgaattggagctgccaaacatttgcctaaatcaataaacagtgtggcattaactagtatgaggtttatttttcctctccaaatgaggagtagttggtgtacagggaatgcacaaaccccacacacctgttctttgtcaaagactgccaagagcaaaagttccatctaaagaaaacagaaaggaaggaacacgagggttctgaagtcactcagacccggcttcagacccaggccctgacagtttacagctgtgtgacctggacttcagtttcctaatctgaaaaatggggatgataagccattcttcatcaccacagtggtggctggcatgcttgattcctctctcccctgagtcctgccaactccacccacttaatatatccacatttcttacactttctggcaccatcttggtccaagtcaaggtcatttcctcttggtccaagtcaaggcctcctcccagatttccctgatttctctcttgctcctttctccagtccattctctacacgagagccagaattgtcatttaaaaccaaatcacatcatgttaccactccactcaaaccatccacctgcaaactcctctctgtgccctgagaagtgtgcttgatctgatctctgcttcttgctcctgctcttctatccctccttttgccttgactacccagttccagtcacattggttggctttctattccttaaacacatggtgcttctctctaccccagggcctttgcactggctgttaccactgctgggtgtgttatgccctctgatgtttgcatgaccctcttcttgtaattcagatttcagctcaaatgccacttctacaaatggcctccttttctaaaaagctttctgccctgccagtctctttcttttgcatttctctgtttaatttattctcatagcattgattacattccaaatgatctcactcatttgcatgttttcatgtttatggcctgacttgcttattagaatgtaaacttcaagagagcagggatctcatctacttttcccccttgctctatcaccagtgtttagtgcagtgcttaatgcatacaatgccccagtagaattttgaaattgaaaaatattgaagagtcatttggtaaagaaaagcttcttttctttcttcctatcctgctaaggtctgagggcccttaggtgtagatttttggtgcaagtgaataatacacctggtttgtagagagttctaagaaaacattgtttgttttaagttgccctgttgagctttgcaagcctttttctaggaccagcctgactttggtggctctcagaatggagagcaagtgtggggtcctgagtctcacccaagtgacccccaacctggaaacgtgtgcttctgcttcagagggttcctgcagtagacacaaagcccttcatccattcattcatttaacaagtactgtgtcgttgggggctgagcctttgcagatcctgggctaagtaccaggggtgcagcactgaacaaaatgcatgaaccttcgcctcccaacatctcagagctggatgtgttgtgttcaaaatggtattttatcagagcagcttaatggtccacagaaggagtgcaggcccccacaaataaattttgtttcctcaatgttttctctctgggaaaatggagactgcttacttgaacaacctgatctctctttgtgccttgggctctagttttcataatggctgacccaggcttaggactcctgctgttgtctctaccctgggcttggcctatccctgactgtctgctctgccattcatcagggctttgtaacagcctgcttcttcctccagtgcaaacctttgtcctctctttggctgttctattccctgttggagccacgtatcccctgatatggcttctgtagactgctttctattcctaccagccactcaagttggacttgcaaacaaggggctatatgtagctaccctctgatttattttgtgttttgaaatcctgaggaagagttgattttaagaaagcattctgatcaagtttcaaaaccactaatctgatgagctgcatgcacaaatgagctcaccctccatttagcaaaatgccagagccgtgcctgggccagcagttctcaaactgtagggtacatgaggctcactggggaaggctgataaaataccaattccaggacctcactgccatggattccaatttagtaggtctctggtgggactcaggaatctgcaattctaataaactccctggggattctgatgtagctccaggggtaataagaagaatatttagcacatatgagtaccatcgaatcatcaaagtcttggggctccccctctccctcttgcctaatacccggctttgactttttggtttctggattgtgagaggcaaaggggattttgaggagggattgtagcagctggctaatcagggggatatttagtgttctcagggcagtggcaattaccaacaactatggaggcagttctgtattgtaataactgggattattgccaagctgttccctgatctgttgggtagacagtctgcaaaacacagtggccacaaggacactgggaatcttgcactggtcgctacctttacctcagccaggaactgtgtgttcatgttgattagcttccagaaggcactcgttacctgcccctcagtaaaagactgaaaccatgcttgtggcttctttctgctcattgacagaatttgtaccttcaggagctagtgtgtaggattattggccaatttgcttggctgcaatgaatggaaaatgcagtagcattggatgggacaaaatatagctgacccaggcttcccaaacagagacactctttgtaagtattttaccaggctctcaacaaatgaatgcctcagttgttctcatcaaagtcttcccaagccaagaacagttggtttcctctgaattgagtgtctaattttttaatagaagtgatctcaagagtgccccctttgtgatgattttctggtcctttggtgtctagaatgtttgtgggtactaaaatgaagttttgtatttcagataagagtctgagggaaatgattgccctaattaagatatgtgcccttccccctattctctagtcacaccatctttttaagtttcctttttagctctatcactggcaaaaactatcttatttgtttacttgtttattgtcggtctcctcccactaaagttacataagagcagaaaccttttccttggctgccactgtatcactaatgcctagaagcatccctggcacacggtagaggctcaaagaatatttatagaataaactaattcaaggggcatattagttaaggtaatgctggcttctagaacagataaaccctggagtttcaggggcttaatactaaagaaatgaattttgcattcacataaagttcaattcggggtgcctggacagcagttggagggtagaggtagacatgggatgctctgctccatgcagtcactcaaggacccaggatgatggaggaacttccaactttatcatgtggctttcaacattgacctgagtgtcaacatctaaccagtaagtggtggggggaatggtgaggtcagaggagtggcatatcccgtgggaggtctcaacaggcctgtcccggaagtggatatatcagttccatccatattctgctgggcagaactcagtcatatggccacacctaactgcaagggagtctgggaaatattgtctagctgaacacccaggaggaaagagaaacgggcttagtaaacagctagctacttcccaccacgggagggtatttgtggtttctctatgattcctgaattggatttttaaattctcctgtttctatcaggttggtgcaaaagtaattgcagtttttgccatgacatttaatgcaaaacacgttatattaattgcaaaaaccacaattacttttgcactaacctaatatgaagacccaaagttgtcatctctactcctgcggtgggaactccttaacctcccacagcttgaactcactgtcctgatatcctcagagctgcatccctccttgatctgatgctcagtagtccagagccatgcactttacacttcaggtcttctgctgttctctttgcctagaatgccttaatagcttagatttattgacattttactgactgatccttcagagctcagcctgaaattcctctctcctggatatcccctgccatctctcccagtggatctattcgttgtccttctggggtcctgtaaccatggctcacttctctgcttcactttattatgcttctccttgtccttacttgattatctatattgcttcatcctaggctggaataatattttatttctctttgtatcactttccagaacttagcctggccaaagaaacttagcctgtttgtggtcccccagttagaaaagaagcctctggctagagtttgaaactggcttatgggattttgaagactcaacctgtggtctgtttcatgaggtcaaatctgaaaatcctctagggaaggggtcctaaaggaggtctaattgggttcccccatttcagacacgcaaatgtagaatccacgtggcacttacagatatcaggttggtgcaaaaataattttcccaatacatgaatggcaaaaactgtgattacttttgcaccaaattcctctgtggtaggaaggacttggatttagaaagacatcagtttgggttccagccccgccacttacttgttctctgaccttgggcaagttattgaacctttctgaacctcggtttctcatccataaaatgattgtttttacaagacaaatgttttattgagtgcctaataagtgttggccataggggagtgaatgaaatggacatagatcttacagattagtgggcacagatccaatggctttataaattaggtctgtggttaccatgcaaaaagaatcttcaacagaaggtttgtttgaggaagcaccgtggggctcagacctgatggttagtaaggacagatgaggaggttgcagaaggatccaggcagaggctatagaatgtatgaaggctccgaggtgagagggcatctggctgcgttgctcaggggattaaacggacggctgcagtttttcattgtgtgacgaatgccacactggtagttctgaagatgaatcttggatggtagctaagtgatcacttaaagcccttttatatagtcttctctctactctttgcatgtttaaaatctcccatcataaaaagtcaaataaaaactataatttatgtggatgcttatatttgctatttgaaaagtgatgtgcacattccagggcgcagcttggtgcagatgttaaccacatggattctggagcctgctgctctaccacttctcagctctgtggcttcatgcccgtgatgtgtgcctcagtttcctgatctgtaagatggggacgataacagcatttacctcatagtgtagttatagagattcaacatgcttgttattatggatgggaataatttaaagtttaagaaatgtatttaggcttaaagtatgagtcaatatagaaatgttaagctaataatggccaaacttcatctggatacttactaagtgctgttctaagtagctcacacatattatttcattgaatgcctactatgaggtagatggtattaacccattttgcaggtacagacagatgactagtttgatcagggtcagtttatggcagagcaaggattcgagtgcaggaattctgtctccagagctcacacccctctgataaatcttccacaagatagatatcttaccatactgtcttggctaagtagtacagataggttcatgagtaatgcaagattattcactcaagaaatatttattgagcatctactacatgcttggctctgttgaaaactctggagttacaatggtacacggtaaatctcccacagagctttggcttacagatgatgagggagagggagagggagagggagagggagagggagagggagaaatcagtaacaaagatataaaccagataatttcagacccagataagtcctgcaaagaaaataaagctggatcatggaaaagaaagtgactggggagcttttgtgctgtcccctgcccccactgtgtcccccagggggagtctgcactgtgcctaggaatgaaggcttttgtccttctccaagctgcagcttggctctcctgataagccaggccacgttactgctatgaattcaatccaaatttcaagacggtcaggcctattaagtcagaccttttgacgagtctgcagagcatggatttattatatgtcaatgtttgtttaaatttgtaactctctcacagtggaattgaggaggcaggctccaaataaccatcaaagcccattaattttctccaaatgcaatagcatattaatcaggcatcactgagggtctgtggtttggaggtgatgctgatgcaggatagatatctaccccactccctgcctctccttgggaaaagcaggttttcctctgtgactgactgtgtatttattacacagccttgtggccaagatgaataatgaatgtagaatcatagttgtatttgagccagaagggaccttattgagggaggctgtattttctgaacctaaatttaggtcctatatgagctgacaagggatatttaagctgcttctaagtatgagaggcagtctggatatgggtttcaggcactcggaaagctgaatttttagatggcttggggagtgtgaaacacaaaggccttcttgggcctgccctggggaaagccagggaggattcttattatggctttgtagcattagtcctcttttctcatcttccagaaaatggggctttgagaaggtgtgaattgcctatagccacacagtaacttattgagagaatcaatattctgtgcaaagcaggcagggcaagtttcataaaaaagaatttgattgctttgctcctccctctgcctaaagccatccatggctccctattgctttaacaaagaaagttaaattcctaaccatagtcccctgtatgattgggctctggtctgctttgacttctcgcttctctcctctccaatccagccattatgaacgtctttcagttccctagacactttcatctcattcacctccaagtctttgataacattattccctctgcctaaaccactcttcctctgcatggcctggctggtttctgctcagccttatgcttcagtagcagcaccattcccccggttatgtcctcctggaacctgcagattatttacccctcatgatctctgtggctcttaccccctgtgtgccttgcatgctgttccactcagtgctggacacagagaagaagcctgataaatcgtattcattttggagatgatggttagtatgtggttctctctccagtggccctggttagcaattttctagaatgataaaccgaaaaaggctagaagtttattccttaagggtctccccagttctcaactctttttacttgccttgatttaatacctccaggatcagtgttttgaaaattcccactctggcagttttcttagaggtttaataaattcttctctgccccttctgcccatcatgggaagaagggagccagctcactccctgccactggccagcaggctgtccattcctccatcaatcagaccattaaaaaaaaaaaagatcaggaaaattcctgggagcctttaggggcaggggcagggccttcagctgggcttctgctagaacatatccagccccagattgtggcagatttgcagtttttactttgaacaaattttcttaggcaatggaaagaagtttgcaatctgtctgcttgcctggttttgagccaaagagctctgggaaggtttgatccaggacctggggattgtctttttgatggttgctttcgggagggtgcctggatgcttactgcataatggctttgccctgcagaagagcaataaatacagaaaattcccaataagaccatctggaaaaagtgagaagaaataaacatctatcaagtacctcccgtgtgccaggatctgtgcaagattctttgcatcttttatctcactcgaggctcacacaaccctatgggcttattgctatgaatactatttaatagtaaaattgctaaagtttactgagcacttgccatgtctcagaccttacgttgagtgcttacaatgcattatctcatgggatcattaccactgcccactaaggtacaggttacaaatgtcccttcatgtagagggacattgaaacaagcacagttttataccatgtggaagtatgattcaggccctgtccagaagactccaagactcattgttaatttcagcatccaggattcctgcttagtgcccaccattgagacttctgaggccttctgaaggatattattctgggagaccacgctccaaaccaggattttctttgaaggatttagaggactcagctttcaggtagcatgacttcaacatttgcacagcgtataactcatctcttatttgttttcccatatactcctgttttgataaatggcatatctcaaagtatgatgatgaagtaacaaataatttgtctgatttttccatggtagatgcataactcaaaatcagatgggatcatcagaacttctgatcagcatgatatggagccaggcatctgtgaaacctaaagcaaatccaggcatctcttgactgtgcaatttctagtaagccttttgagccaccaaaaatagtttatggacttataacattttttttttgagacggagtctagctttgtcacccaggctggggtgcaatggcatgatctctgttcactgcaacctccacctcccaggttcaagtgattctcctgcctcaggctcctgagtagctgggattataggtgtgtaccaccacacctggctaatttttgtatttttaatagaaatagggttttaccatgttggccaggctggtctcaaactcctgacctcaagtgatccacctgccttggcctcccaaagtgctgggattacaggcatgagccaccgcacctggctgacttacagcattttttaaaaaggactttatgggtccaggaatctagaaaagaagttctgttctaagacaagctttggacttcaagataactccataataggtagaggttatgagatataactgcttgaatatgtgagggatttattgagtcgatcattcagatatgaattattcaattaaatgcattcacataccacacattcatttactattttaattctcctattacttattgactgagtctgccattcaactcattaaatcctttagtcattcaagaaacatttctggtccagtgtgtgagcttctggactctgcagagaaaagtaacttaaaaaaatttgctttgtgttccaggttcagcaggcactagccaggaaattactgacagatccaaaggcttgagctgccattctaagctttggttaggagtatgtgtgtgtgtgtgtgtgtgtgtgtgtgtgtgtgtgtgtgtgtgtgtgtatgtgtatgtgtctgtgtgtgttggatttgcaggcttactcctggtattttgcctcatagatatctaggattcatttctggcaagttgaagatcatctccaagtctccctttccccatctgtaaaataatcaggttgaccagatgacgtaggattcattgtaagattgtctatcaggtgcctagccctatgcttttagtaggcaattgctcccttgcaactttcactgtaggtttgaaatggggattcatcaggaaatgacctagcttggctttgctctttacacccaagggaggaaaatgtgtccctgtggttatttcccccactgaattgctgatagtggtgatggagtaggggatactgggcctggctgcatgtgttgtaacaaaaacaagaacagctcttgacagcatgattttttttctctatccataacttaaatcttctctgtcaaaaggggaaaattagacaaaggaaaaattccaaaaggataatgagtcctcatttcctcctgctgcttctcctccttgggcagtgctgtcaaaatgccctgacatcaccctcctgcctccacctccacttatgcttccagatgattctcacctcctgaaatgctcaaacttgggagggtctgaatgggggttctgatcctgcctctcggtgcattggtacagcatccggaaccccactcctggtacttttccgtttgttttgtcatttgccccatatttgtccttgtaagtcttcaaggatagaggatatatgtattctcaagaagagaaacaacttctagcaattttctaaagaaatcatcttggaggtgtcaaactaaatgcccccataaggggatgctacatagaggaggtactatgatgatatagaataactattgacatggagcgatgtctaggatatattggtaagtttttaaaatgcatggttacaaaatcatatcaataatatggtcttatttgtgatattgattgagatatggatgtagatatacatctgttgatgtagaacagaatattattaataactaatataaattaatctctggatgaagatattatggataaattaattttttcctttttttacttgttcacagttttatatatatacattttaaatttgagatgaaattaaatgggtctggctccgtcacccaggctggagtgctgtggtgtgatcttggctcactgcaacctctacctcccaggctcaagccatccccctacctcagcccgtcaagtggctgggactacaggtggacaccaccacacctggctaatttttgtatttttagtagagacagggtttcatcatgttgcccaggccaatcttgaactcctgagctcaagcggtccgctctcttcagcctcccaaagtgctgggattacaggcatgagccaccacgcccagccattttataattgtttatagtacacatatattacaactgtaataaaaaaatgcagtaaccattatcttagaatctaactggggaagccaggccatggaagagttacctgtctctcctcatcccctcaataagctagtaacagattggaactcagtcattctgcttctgtgctcaagctgtttttatgggacatcctaatctcctaaagattcatcaagaagggtccaccaggaaaatctcaattttaaatattctgccatgttgctgtcctgggtaaacccctatgcatagaagcagtataacagtgtgttctggagttctgtttttaccagttcttagctgtgtgacattgggcctccattttgtcatctgaacagtgaggttaatagtaatccttatctcagagggcagaggtgaatattccttgaggtgacgcttttgcataatgcatcctactgagtacgtacttgtattagtctgttctcacactgctaataaagacatacccaagtctaggtaatttgtaaaagaaagaggttgaatggactcacagttccacatggctggggagacctcacaatcatggcagaaggcaaaagaggagtaaaggcacatctaacatggcagcagccaagagagagcatgtgcaggggaactcccatttataaaagcatcagatcttgtgagacttattcactaccacaagaacagtatgggggaaaccaccccgatgatgcaattgtctccacctggccctgcccttgactcgggtttattaaaattcaaggagagatttggatggggacacagcaaaaccatttcagtactgaatgaatatcgactacttctgggtggcctgcgtgcttcaatttggggttcagaaaatatcttcactttacacaccttctcatccacttgccttcattttttatttcattttttacttcatggaaatttagtggcattgaacaaccattgtgctaggtagggcaagatagtttaaacaaacaaatgaccaaaacaaaagtgaatgttgaaagccagcccatatttccagagtttcaagactaccttgaatcagagcccaatttgctttcaattactcccctgtacagttcttgagtttttataaaatttacatttttttttttttgagattgagtcttgctctatcaccaggctggagtgcagaggcacgatctcagctcactgcaacctctgcctccccggttcaaacaattctcctgcctcagtctcctgagtagctgggactacaggtgcccgccaccacactcttctaatttttgtatttttagtagagatggggtttcaccatgttggccaggctggtctcgaactcctgacctcgtgatccgcctgcctcggcctcccaaagtactgggattataggcgtcaaccactgcgcccggcctagcatttaaaaattttaataatttcttattgcaagtcttaaatccccaaaggagaaatgagtaaatctagtttacggtagaaacccccagtcattaaaaagtaataataatccaagaaaagaaaaaaaagaagcaagcaatgtggtgtcagacaagttagaatccagtctctgaagggctttctgcttttgttagtgatttagagacattttcccccctcctttctgaatatgcttctagcagtggaaatagtttttctgtaataactcttggtgaacatgtcacctgaaatatttggctctaaagatgattaaagattatgtatgagggagcaaagcaatgaggccaagaagcccactgtcttgtgagagctctaccaacagtcattattaggagagattcctcccttgtcccactctgattgatgagtcatgaatcaaccatgaatctcaaaaactaaaggctgccaattacactgaaataattgagtcttgaacccaatctatggcagaaatacaactgacggacagacactttgcaaaaccctatttagatgagttcacccaaccaagaaatccatatggctccaagttgctggggagttgtttctattttcctggattaacttaaatgtctttaaccatctgttgttctttttcagtggtagccaaacctcaaacatactaagggaaaaacagatttaaaaaaaatgccacctgttctgagccctgtgctggataggtatttggttcactacccagaagctttcactatgggtgtggttattcccatctttggttggggaaactgaggcttggagaatttaagttaattactcaagttggcacagctattaccaacaaagaaatcctttaggatcccctttccttcctttcttttttttttttttttttttttgaggcagagtcttgctctgttgctcaggctggagtgcagtggcatgcttttggctcattgcaacctccgcctgccaggttcaagcaattctcatgtcccattctcccgagaacctgggattacaggtgtctgctaccacactggctaatttttgtatttttagtagagatggggtttcgccatgttggccaggctggtctcgaacttctgacctccggtgatccgcccacctcggcctcccaaagtgctgggattacaggtgtgaaccatcgcacgcagccccctttcctttctactgtctgcattcaatccttcatcaagtgttggcatctcacctctgcaatgtagttgacgatctgattacttcctttcatttccattacctccagcatggtccaagtctccatcatcattcacctaagctatagccaaagcctccaacaggtctccctgcaaccatgttaaccccttacagtctattctttctgcagcagtccaactgttctcttaaataatgcaaatcagattatatcattcaattatggtgcccttccagagttttcccatccacatggattaaaatctggactctaccccatcacctaccacctctctctgacttcaccttgcctgattccctgttgctttcttcagttttcagacctccctgatctttcttcgtgtatcttaagcccactgaactcattcctgcctcagtgactgtgtattttcacttactcttcattctgcctggaatgctccacctctcatatgggacgtggcttcctggtccaggtctcaggtccagtgaattcttctagcagtgaaaataaaatagtttttctgtaataactcttggtgaacatgtcacctgaactatttggctctaaagatggttaaagattatgtatgagggagcaaagcaatgaggccaagaagcccactgataccctccccagagtcggtatccttgacgattccagctggaggagtctcgcctcttctcttccagctggaagcttcatctcttctctctctttcatataacctgctttattttctttaaagcccacatcaatcctgaaattattttgttcacatatgaatttgcttttttggtatgtcttccctattagaatgtaacttccatgaggacagaaaccacagctgtgtgtttcctgcacctagaaccatgcctggcatttgattcaaacactggccttaagcaaacctccacctaacgagcctcagttttgtcatctataaaaatggggataacgatgatcttcaccttacagggtggatgcaaaggtgaaataagaaaaacctgtggctcccacggtctgcttggcgtctggtgcactgttgggcctcagtgactgttaccctccttctttcccatccatcctttggtatagcattgaaatttcctaagcagcaaatgatgactgttctattttgaactccccgatatttctaggaaccaagaagtcttgaaatcatttgactacatacatgtccatggaaattcttattggtgaatcaaagagaatgtctttaactttctattataatctccttttaaacatagggacaaatttgacttattttcagggcaacaatgggattttgctaaggaagtttgttaaactcctcttgagatggttgataaaaaggcaaataatgaatacctcgtatgcagagggtttagacttgcctagaggcagatgcttagaatagagagaaatctttaacacgggctgcttctggcctctctctgcacctccagcccctctcatgagtgatgttcaacttgctctctgccttccagccacactgacttcatttcagtgcatggaaatttccacgctgtctcctgccacggggcctttgcacatgctatccccactggttcactcttctttctagtctaaccctagtttgcttttacttgtccttcaaatttctacttatatggctctttcttagggagaccttcagtgacgtttccaaagcaaacccctttgtcctacaatcacaagctgccccaagtttatatgtatgcatatcattattaaattaataggccttctcctaatttggccatcatcatataataatagctcacactcttagaatttgttctgttctaagcccttcagttgtattattttatataatccacagaaacctcataagatagggaactgtgattatgcccattttacaggtggggaaactgagtcacagagaaagtaagtgattttcccaagaccatgcttcaggtaaatagaacgagaattagaactcagacatctttgcttcagagtctgtgcccataaccacagtgctgttttgtgtctcttttaggctctttgggagtaatgactatgttaatttttgcttctcactgtctctctggttctagtgcaggaactcatgcatagtaaactccacctaagtatttggggttgaatgaatggctccttctctctatttctgtaccccaaagactctgtttccttacagtcttcttggtgatcatgagaaagtgtcttggctctcacagtttgaattccaattccaggagcactgtaatgtaactttgtcagacccattgaagtacgagccagcatcccactctgaattacaagagctgagcagaattctaaattctccctccatgcccactcaccctcttccctcatagcactctggaggctgtgtgccacccagggaaacactaaaatgcattctagggcaacagagaagtcatcagaattactgaggatgcagcaaagctgatattcccttaactcattactcaaccgagatgtattgttttttaagaaatctcgtgcttaggtgagagtgatggaacaaattaccaacttgccttgctaacagccagtaagtccaacaagcctttgctgagtgatgcccacagggaagttgccagctagatgcacagactgttgctgatgtcacacatgtggttttcatgaagcttgggacgcaagtatgcacagtgggtggcagatccgcctctgtcatgtggactgtgaactgtaggagggcagagacccagcatggacctctgagggcacagttcagggcctgacacatagcaggtgcttgggaaatattggctgaattaatatataggatataggggccatgcgcttaaatgggctcaactctgaacactttatcccagggcagcaggagaacagaggaagcatgcatgcatgacacagcactaaatgacagaagtgtgctgggggtgtatacttgaatcaaagaggcattggtagaagaagagctacattttacagggtggaggcaaactatggtttgtctagggaaaagtcaaattatgcaatagaggcctgaaggcaaggagataaagtcctgctcctcaaatccacttccctgggtcaatgagatctgtgttgatccatctctttatgttggaatcacctacagacatcaggtcagacatgtagaccagtgttaggtatggggagggacacatacactgaagggaagactagaataatatcagttatgggttggaaggatttattgggtaataaatagcatgactctgggccagattgtctgagttcagactcagggcctgctccttaggagctgtgtggtcttagctaagtcacctcacctgtctgtacctcagtttcctttcccataaaacttgccttccgcttcacagtgttgtggtcagggttcagtgagtcaatgtatgcagagtgcttaaaaggactgccaaacacagcagtcagtgagtgctacataggcattagcttattagggtgggaaaagggtacttgaattcatgccacgaagcgttcattctcaggattggttaacacctcgctgttagcaggaggaagtgagagaaagtagacacagcggggcttagggagatagtgaatctggcaggtgtgtaggtttggattgaacacaggctctgtggtatgttagctgtgaggctagcaaaggggagtatggggcgcccccgatccagaaagcatattgcaaaaggaaaatacaaactggaagctaaaggaatgggcctcggtgctataggcccgctagcagagggggctgctgagcatgtaatgcccttcctgcctggggctggagggttgtacccaggtgaggctcagagggccagtcctccagctgtggcagcctccagggagccgaacaatagaacgttcatggatttgagctaggcttgcctttcacaagacagccctggatggatgggatgggactctcatttatggaaggcaggtgctctgttcctccttaggatccaacaagcttagaagggaatgttttcaaagtagggagtgtcggattcaccgtatcctaattgcctggggggtttatttatttatttattgacagagttttgctcttatagtccaggctggagtgcaatggggcgatcttggctcactgcaatctccagggaggtttattaaaatgtagattcttgggcttcaccatagatccatcaaatcagattttggggagtaagagcccaggactcagcattttaaatacactcccgaagggatctgatgcataccatagtttgagaactgcttgctctaaataagtgatacttttttatttttaatttaattttatttaagttctgcgatacatgtgcagaatgtgcaggtttgttacataggtaaacgtgtgccatggtggtttgctgcacctatcaacccattacctaggtatgaagccctgcatgccttaactttttatcctgatgctctctcctccctaccaccacaggccccattgtgtgatattcccctccctgtgtccatgtgttctcattgttcagctcccacttatgaatgagaacatccagtgtttagttgtctgttcctgtgttagtttgctgaggataatggcttcaagctccatccatgctcctgcaaaggacatgatctcgttcctttttatggctgtataatattccatggtgaatatgttaaataagtgattcttaatcaacagtgcacctcagaaatggatggagagcagtttccacatacaagcatgccaatcttgctccctagagattctgatgcaatagggctggggtgggacaaagcccaggcatatgaacttttttttaaaaagatgcttttccagtgattgagtgaataacaatttggcttgcttattgcctggtcatacaatacctgagagcttgttaaaaatgcaggttcccaggactagttctagagttacagaatgtgcctctatggggaaggggtgattcttagcattggctgaaattgggacccagggtacctactgctctgtgccctcttattactcagggcctccctggtgattataacaagggggactcatgttgacaagtaactgctacggccatccctgagccatgaggctctttacactacttccttcatttactcccacaactaccatgacttaccattattcctattttccagatgagcaaagtgaggcctagggaggaaaggaagacagcagtgatgctgagaaggggtggagctcagaataaaatcctagagccacaaaagttctcttctagtcttccactccaagcccaatgtaagggaaaagtgtcatctttcgaggagaggtagttgaaagcttttgtacaggttcagggctgccatcccccatgatggctacatgtcattgaccagtggtgtggtgtatttgtgtgtgtgtgtgtgtgtgtgtgtgtgtgtgaatgtgtatgtgtggtgggagatgtctcccatagctagggatccaggcaggaccagcacacataataccgttgctcactaactaaccaatagctcagcaaggggaagtacataattctagaccatttggccaagacacgtgatgagtgtgggtttggggggtggacatttgggaaggtgtttccatatgcattttctgtattaaccagtaagacattcttagaataattaggaattgaatggtgtgttcccccaactcctatgttaaagccttggcccccagtacctctgaatgtgatattatttgatattattctttgcctctgtaaaaactctatcttttttttttttttttttttttttgagacagagtctcactctgtcgcccaggctggagtgcagtggcgtgatctcggctcattgcaagctccccctcccgggttcatgccattctcttgcctcagcctcccgagtagctgggagtacaggtggccgccaccatgcctggctaattttttgtatttttagtagagacggagtttcactgtgttagccaggatggtctcaatctcctgacctcgtgatctgcccacctcggcctcccaaagtgctgggattacaggcgtgagccaccgcacctggcctatcagatagactatttacagaggtacagagtctatctgtaaacatgtggacatgtgggtgggggacatcacatactggggcctgtcagaaggttcaggtggggagggagagcatcaggataaacagcaaatacatgcggggggtcttcatacctaggtgatgggttgataggtacagcaaaccaccatggcacacgtttacctatgtaacaaacctgcacatcctgcacatgtaaacttgaacttaaaataaaaagaagagtctatctgcaaataatatcacattccgatattattatataaccacattctgacctcaagttagaatgaggtcgttagggtaagccccaatccagtatgactgatgttcttacaaaaggggaggtttggacaaaggaaaggtgatgtgaagagacacagggagaaggcagccattgacaagcccaggagagaggcctccaaagggacccaccctgcccacaccttgatcttagactttccgactccagaaccgtgagacaatagatttctgtcatttaagccatcctgtctgtggttctttatcttaacagccctagcaaacaaatacaggcagtaattctgattattacccccatttgacaggcgaggtaaccagtattcagagagatcatgaccttcacccagagtcacatgacagttaagtgcaggtggctccactaaatcccagacgggcctggctccaaggtgccggtttcctctgttctctcaatgcgccccgatgtgccacattattgaagctggagggacagcgttcctgggaaaaccatttagatttcattctccttcctttctctgacagaagctgctggtgaggaaggtaatgatcttgatcaaaccatccccagaatgcatgcctgcctttggaaggagcagactgggatgaaattctctactctgcgtcttatcaaccagaggacatgaggcaggtttcttaacctctctctaggattccgttttcttctctgagaaatgggcagattggaacggatcacagagggtgatggtgaagactgaaaacagcctagcacggtgcttgggtacagcaagccttgggcgatggtaggtgctactttttatttcttgaaatacactctggaggctgaggcaagaggatcacttgagcccaggagtttgagtccagtctgggcaacacagtgagaccccatctcaaaaaaaaaaaaaaaaaaaaaaaacactcaaaatacaggaaattaaaggtggaagcaatgatgtgggttcaaacacagagagacaacagaagagccacgagcctctggtgccaacacaaagcccgcctaggccaggaagctttaaaattatctcctgggtagggcagagccaagggctggcgtgggagttggaagtcagagacaagagcccagcctggctgttagaatgggttagggctatgcaaagagtaggctctggacaaacccttgcttcttcctagtccaaaaagactgagggccgcatggggtcatactctccatatcgtctcctggttgacacatttccatgtcccctccaaggcatggtgcatggtatggggatcggggaccttgtggtcccaatgctcctgtctccactgggactgaaggaactggtataccggaaaagcagggcttgcttatcgccctgcctcttggaagccaatcctcgttaaacatagtaaacacaggaatgctttttcaggccctccacacggggcctgatacggctacaggcaagacctactagaatagttatctgaagcctttgcatatgctctgtgctacagccagcgatataaatacgcctcacacacggcgttaaaagaatcattccgcagcctacacagatgtcaaaataataacaggatgatgttaggcaaggaaatagttttgatgcctattctcccatttagagttatataatcctttttttggttgttattgttgttcaggaaagcagtctgcaagtcgcttcgtccgacaatctaagattgttacatatcagcaaaacatttgaacttggcaggtttatgcactgtccggattaaagggaacttgggtataaggccactttggagaatgcattagctagactgggagtgcccaatacttacattaactcaacatatgtattgaggacctagtatatgcagggtactgtgctgggtgctggagatacagatggaccaaacaggtatagctcctgccctctggagctttgcaattcattacaggaagcaaccccaacccattaaccagctacataataacgtcattgcaaattgtgatttctgctgtagaagaaacaaacaaaaggccaacagaatgaaagaaacgggatacgaagtgatgggttgggcctctctgaggaggcagcatgtaagccaagactcaaaggctaaaaaagatatagagccattgaatggtggggggaggagcattctaagcagacggaagagcctgcacaagttccttaagttggacggagctcaatgcgccagaggaaaggagagcaggccggtggggctggacttgagtgaggcaggcagcaagtagggaaggcgaagtgcccagtcaagttccagctccgattatttttattaatccaagtctgttgcagcttgggctgccaaataaaatacaggacccccagataaatttgaatctcagacaaacaacgggtggcattttagtggaagtatacctcaagtatggcaggggacttacgctaaaaaaaaaaaaatccattgtttatctgaaatgcacatttaagtgggagtcctgtgtctctagttgccaaatctggtaaccctggctgtagtgatcacctgactccgtgcacactgggaagacagcagaggtgttcagataaatcctatggacaaagatgatggtttgttttgtacctgcagttttcgcagagtagatcaaggactgcatctaggtacagtggacattgctgtgtgacctagagcagattgcttaacctctctgtgtcttacctgccacaactgagcaacaggggtccttttgggtcttgagtagctcagtagattttactgaggcttccattgcagaatgtttcctaaagtgctgcagagagtagtggggttttgattagttgagggtgtgagttatcatggtgcttttgagcccctgagactagattactcagaggagtttcctggagtagggggaggggagtattacttattttttccttttgcccctgactaatttggcttggcagagtagagttactgattttgcatttatttaaaattttgataccttgttcaacatggatttttagaattacttttgatttttaaaactgttgcatttgaatactgtttattccgatgatggagtttcttggtgcccctgtaagttgtgcacccaaggaaagtggctcaccagcctcaccctggtaccctgatcctggctcccgagggagagaccacagtggcgaggctagatgcacttgcctgggcgtgctttcggacgcatccctcactagctgagtgaccctatctcagtttcttttctttttttttcttttttttgagacggagtcttgctctgtcacccaggctggagtgcagtgatgcgatctcagctcactgcaacctcagcctcccgggatcaagtgattctcctgcctcagcctcccgagtagctgggactacaggagtgtgccaccacacccggctacatttttgtatttttagttgagacgggatttcactgtgttagccaggatggtcttgatctcctgacctcgtgatctgcccacctcagtctccccaaatgctaggattacaggtgtgagccactgcacctggccctcagtttctttatctgtaaaacgggtttaatgaaagcacaatcttaaagttggtcgggaccttaaatggaaaaaaaaaacaaaatccatgtcctatagttaggctagtgcctggcattcacaaagtacacaaagcatgttcaccatcaccattattatctttgaatctcagttttctcatctcgtaaagtggaaatgacactaacttctgcctccgtgtgttcttgtggggcgtcaatgaaataatggcgcagaatgttcatctaagtactgggtccttcagcatcctcttctttctttacatcaggaaagcgagatatttctattgattgcgcaatggcattgacagctcaccactttccagcgagagtcagtgatggtatccaaggaagggtgcgtatactgcaaagactataacagagacacacacattggtaccatgaagcagaaccaggtggaaatgtgtcagccaggagacgatatggggagtatgaccctatgcggccctcagcctttttggaccaggaaaaagcaagggtttgtccagagcccactctttgcgtagccctaacccattctgacagccaggctgggctcttgtctctgacttccgactcccacaccagcccttggctctgccctaccaaggagataattttaaggcttccaggcctaagcaggctttgtgttggcaccagaggcccgtggctcttctgttgtcactcagtgtttggacccacattattgcgtccacgtttaatttcctgtgttttgagggtttttgagatggagtctcactgtgttgcccaggctggacttgaactcctgggctcaagtgatcgtcttgtctcagcctccagagtgtattttgactcaacttttgcactgagagccaagatttgaatagttttaatgccaggccacagtcattcatttattcagtcaacaaatacttattgagcacctactatgtgctaggtacttttatagatcctggagataccagcagcaaattcagagacaggtgaccttgcttagggagcttatcttcctattgtagaggtagacaagaaagaatagaacacatgagatcaggcgcgttcagggtggtatgccactgacaaacctgcacatgttccccttgagcctaaaataaaagatgaaaagaaaaataataataatacaagaattttaaacacaccattccttcagcatatcaaagtcaagcaaaatgtacataagaattttgaatgatataaggatcattatatgtgtatgcacaaatgtgcacactttccagttcaataccactagtagccaataacggaagtttgcattacaaatctacccagaaaacaaaagagactctcctaaaaatattaaaagaaaacttcaaatttttctgttttcagatttttttctacaatgaacatgtattacctttatcatttttaaacaacgaaataaaagttgtaaggcaaaaaaaaaaaaaaaaagaaaaaaagagaacaaatggatgagaaagattaccctcaccagagtgggatataaaccaaacagccaagggagagggtgagacactggaagagggtgctttggggaggggcagcctcactgaggtgtgacatttgagctgagacctgatggatcacaaactgcattcctcctttaagctttgtgtctttgtctgtgacatgggatcagagaccccacctcttgggaggatggtgggaagtaaccatttgacaatgtggtcagtctggccttagcttaagatatcttgcctttatctcccctagatctcccagaccatggtcctcacctaacaagggtatcagttgtctgcctggtatgtcactcctccacgttcatcttcttctccccttgttttgcatccttggcaatgatctcactttattgccactgaccttcttcttccttatcactgatttttctctctccctcccactccctcatccctgtccctttctctttttctttcaaacccatctccttacccctatgtgaggtgcatcccagcctggataccagctcaatgttggggttgggactaggtgtatttataaactatgaaccagtgaaagttttagagagaagaaaacagaattcaaggccaaagccacgtttagggcatgacaaactgaaactacctctgttcacatgaaaagaacacagttatttagcacttgatataaaaaatgataactttaggcaccatcaggtgggcttttgcccatgtttctagctcttgggtgagatttcttttctgcttttaatgttcttttactaattaaaagtttctgttgctaaggaagggttcgaaggcttgccacgtttcccacgtggtggctcttctgtaggaaagaacagagaaaggaaaataaaagtttccgaaccaaggtgtaagtcctttgaattttccaagaaaggcagaagcaaagactgttgtctggtgctcctagaatctccgcttgtcaggatgactctgcaggtctttcatcactctgagctagaccttgacaaaggactgacttccacagctcaatttgcaagtcttagtcttgtatacgcatggtgtatgaactgtcttttatgccagggtcattaataatttatcctagtcacctggcccagtggaaagtgcaagcttgtgaaaggctagggttcaaacccaagaccttcaatttaccatccaaagggtctttccagacctctctactcaaagaagcccccacattttttctccatccctcactgagggagatacgaactttcagagccagtgtctgattctccacatccttttcctcttgctatggtgataacactgagatggaagatgcatggagatggcacttttctcggcctgggtccctgcgtgactacagtggaaatatctctttccttatctgcacttgacatgtagtgtgaatcagaaatggaccagctctagggacttaggggctatttgttactgcagcataacctaatgaattctgactgatacaatagcatcttttattttttctttttcctctatggcacttaccaccattaccatgtttatttatatttgatatgtttattcattttctgtctcttctctatagaatataaatttcataaaaaccatctttttgttgttgttgctgatgttcaaatgagtaattccagtatctggagtgcccagtacgtgctaggcactcaatgaatatatgtattgaatgaactgattgataatggggttaatgcgggaaggtcacctaacttctataagcctcacattctttatctgtaaaatgggaatattaaccatgcctgcctcataagggtgttttgagaattaaacgtgtaatgaatgtaaagtacctggcatcatgcctggcacaaagtaggcatgtagtaaatatgtgctataacaattgtcagtcctgtgaaccaagatcagggcctctatatgtaatgtcagttacattttacagatatattttatgttccccagtcttgtcaaaggtcccttagcaaataagtggcatggttgcactggattccaggatcctcctgcattgagactctagaagttttgttctaaatgtctgcttttaggtcacagtctgaacactggttttggggaaagtatttctactgtattgggctggagtatcatcaagatcccctagagctttaaatgctttgggtattagggtggatgttcaaataggaaggaactgtgggagctagtgcctggggaagctttgagggacacaggtagaaacactatatggagaattaaactttgaagtggataacaccttgaagagacagagtgcatgcttgacttagcttacacttattttctttgcccagtactgggtgtgggatctggtcctgatgcaggagaaatggacacagtggaatctcttacagatccttgttggccaagagattgatgaacctagaaggaacctagatgggaagtggcttgcataggtgcccagaagctgggctctggcatttgatgaactcaagttcacatgtgattccttcactttctagatgagtgatgttgggcaaacaagctctcctctctgtgccttggtttcctcatctgccattttggttagaatcaggtaggattctgtgtctcccctgctggacttgcttccttctatctgttctcttggccaaggccaatgtgttctatgtggcatgtaatttctctcctagaaattccacccgagcccaggaggtcaaggctgcagtgagctgtgattgcaccactgcaaaccagcctgggtgacagaatgagaccctgtttcaaaaaaggaaaatttcaatgccttggcattgtcttcaggggagagtgtaactcagtgttccagctcaggccctgtcttagctggcctttgctcacgtccccagtccgcctgcacctgctgtgcctgctgcagcctcactccaacccagctttgcagtaggcctttgcgccatttagattctgcttggcagcccccacgctgctgccttcaccactctcctgtcctcccactgattcctcctcaaccttcagatctcacttgagatgtcacttcctcaaacccccggacaccggcattaatgctcaccatgctacactgatgtcacctttttaattgtctgccttctccaacacacagtcagtttccggctggctgggatggggccataattgtgggagggccaaagagctgagtggttgaccacatatgctctgagatcaggctccttgggctggaactgtgggttcataaatgagagttctgggtcctaggacaaccttcctgtgccttgctttccccatccatggtgtgggtgttcttaaacaacactcttaccttcctttgcctcagtttctccattgtgatgtgggccattgaacaggactctttacctgcccaggcctccgtttctcgacccataaaatgagccaacagtagtcattcttgtgtggctgcaatcaggcaatgcaaatagttgtttttactatttttctatgggtttgtggacctgaaaataaaaaggttcataaaagggtgtgtgaacacccacacagacacctgttgtacacttattctcactctcccttcactaggggacattgggaatactcctcttacagcactgaactctgcacagcagttagtctagtttaggagtggcctggagtttagatggagagaggatgggttgtcagtctagacttttcttgtattccatcctagcagctccgtaaacaaacgtgattctgagccatggctttcacaggttttctgaatcccaacaagtactgtggctgggccattaagaagcctagcatcccctgcaacctgtgatggtaaaagggtctgagatgtgtgtgtgtataaatgtgtgagtgcaggtgtgtgcattcatgtgtgtatgtgtgcacacctgcaatatgtgtatgcatatatgtgtgtacatgcaatgtgtgtatgtgtacttatgcatgtatgtgtatatatatgcatacatgcaatgtgtgtatgtgtattcatgtgtgtacatggaatgtgtatgtgtgtatgtgtatacgtgtgtacatgcaatgtgtatatgcgcatatgtgtacatatgcatgtatgtatatatgtgtgtacatgcaatgtgtgtatgtgcgtatgcatacatataaatgtatgcatattcttgtgtgtacatgcaatgtgtatatgtatgtgtgtacatgtgtacatgcaatgtgtatgtgtgtgtatacatgtgtacatgcaatgtgtatatgcacatatgtgtacatatgcatgtatgtgtatatatgtgtgtacatgcaatgtgtatatgtgtatacatgtgtacatgcatgcaatgtgtgtatgtatgcatgtatatatgtgtatgtgtatatgtgtgtacatgcaatgtgtgcgtgtgtgtacctgcaatgtatgcgtgtgtatatgtgtatacatgtacacacaatgtacgcatgcatatgtgtgtatgtatatatgtgcatgtgtacgtgtgtgtacatgcaatgtgtatgtgtgtacatacaatgtgtgcatgtgtgtgtatgtgtatgtgtatatgtgtgtgtacacacaaagtatgcatgtgtatgtgtatatgtgtacacacaatgcatgcatgtgtatatgtgtatacatgtgtgtacacacaatgtgtgcatgtgtagggtgtatgtatataagcgtgcatgtgtatgtgtgtgtacatgtgatgtatgtgtgcatgtgtgtacatgcaatgtgtgtgtctgtgtacataaatgtaaatgtgtgtggtgtatgtatgtgtgtgtgtgtacccataccagtgagggtgctatggtctctcacatttatgtcttgaaacttaatctcagtgtgtgcagatgaggatgtggggcctttgggaagtgattaggttatgagggctttgctctcatgaatgggatctgtacccttatgaaagatgtcccagagagatcccttggcccttctgccctgtgaggacacagtgagaagagaggtgtctatgaggaatgagtcctcatcagacacctaatctgccagcactttaatcttggtcttcccggcctgcagaacggtgggaaatcaatttctgttataagccacccaggctctggtgttttgtcgtagcagctcacgtggactaagagaaagggtgtcacttggaaatttgggggcttccattttatgtattgtggttttagctgtttttcctttaaaaacatcaaccctttaaagtacgtgtgtgtgtgtgtgtgtgtgtgtgtgtgtgcacgcatgtgtctgtggaaactgccaaagaagacatggaattcctcctcttctccctcctcccatccttttccattttttctccccgtgcccctcatgttgctctgtcccccggactctgcctccatctctgtgtctccctccctctctctttctctcctccttccgtatgcccagcacccagtctctgtgttggcacaggagtactggttgcctaggaaaccaccgcagggcgagcacatgcgattggccaggctgggacctgactctgggttggcgggcagattttttgggtgattcttgtcctcattcccctttgggggagggacattctccgggatacaaagaaacctggctgtgccgtggctgctagggcttctcagcctgggaaggaattcctgtcctaatgaggattcagagttgcagaactaggccacccaggaacaaatttccaaaaaggcaggaggccgggaagtgggggcggggcaccaggacaatcatagctaacacctatatgtcagtcactgtttgctaagctctttataggcattcgctcattagcaaacctatgcagttggtgttatctttctccaggttttacagattgggagagggagactgagagataataaataacatggctgaggtcatacagtggctaagtgcagagccgggattcgaacccaggagtgttgtatcattaagaagtcctcacagccgccttccctgaggagccccgaggaaagagggaagatgtgggaccatgaggatagattagatagctccttaatgttctcttgctttcctccactcttatccttgacctgcctggttcttctctctcttgagtaacctttcagtttgaggagctctgaagtcctcaggaactaacatgttccacctgcttgcttatcattcaagaatgacaagacattctagaaatggatggtgtgatgtttgcacaacaatgtgaatgtatttaatgacagagaaccgtgcccttaaaaatcgtcaagatggcaaattttatgttatgtttattttacaatttaaaaaaaaggagtgacagggtcatacgtacagccagcctggtcttacgaacctgtgattttatccctctggttttcccatactagggataagaatcaactagcagggtggttttgagcactttctgtatggttggcaggctctctgatgagggcttaaacatggattatttgatggaatccttccaacaattcctcctactatttccattttacagataaagtagctgaggctcagaacattgagaaatttctagaggttatacatgggttagtgatgcagcctcgattttaaccctggcctttccattccattcctttcctttcctttctttcccctccctccattccctttttccttccttcctcccttcctcccttccttccttccttccttccctttcttcccttccttccctccctccctccttccttccctccttcctgtctttcctttttgacagagtctctgtcactcaggctggagtgaagtggcacgatctcaggttactgcaacctccacctcccagacttaagccatcctcccatttcagcctccctagtagctgggactacaggcatgcaccaccatgcccggcttttatttttttttttaatttttatggagagaaagggtttcactatgttgcccaggcctgtctccaactcctgagctcaagtaacctgcctgctttaggctcccaaagtgctggaattataggtgtgacccaccgtggctggccaaaccccaggctttctgacacccgctcttcccaaatcgcctagggcctgcccactgttgctcactgttgacattgcagggatgtgaatgagagaactccgcttctctgcagtgcccggggactaaatgattccctgcccctggttccagctcagtcgctttggaaggcttcagtgcccatcagtctcctagtggaccgttggctggcccaggccatctcaccagtgtcctcaaagtgtcaaagccacttgagtgaggttgagaagcggtggctggaaataaagccagtacccaatgcaggtaagcctgccggatcaaagttaatgaagcctgtcctcaggaaccacagtggagtttggcaacatctggtgtgattactaccatcatgggttctggagacatggccggtggggcagtagcttggtggtggggagtggagaggaattcagggctttgcagggccaggggaggaagtgatggggcaggacctgctaccttttagttatctcttggcgaaattccagccggaggccttcctgctgtcttgtgcccatcacacatcccatctgggtcactgagcagaatcgctgagttgctgtgatttttagttctagcagctcctacgcttgcatgtatcatctcattcaatcctttcaagacctatgatcaagtcagtcaaaagtcttatttccattttattttattttaaaaaagtaaaatctttttttttttttgagacggagtcttgctctgtcacccaggctggagtgcagtggcacgatctcagctcgctgcaacctccacctcctgggttcaagggattctcctgcctcagcctcctgaatagctgagattacaggcgcctgccaccacacccagctaatttttgtatttttagtagagatggggttttaccatgttggccaggctgatctcaaactcctggtctcaagtgatccacccacctcggcctcccaaattgctgggattacaggtgtgagccgccatccctggccttattttatgttttgagacaaggtcttgctactttgcccaggctggtcttgaactcctgagcttgagtgatcctcctgtcttggcctttcagagtgctgggattacagacgtgagctacaatgctcgtcccttattcccattttatagagaaggaaactgaggctctgagggatgaaattgttcatccaagctcacacaggtagcaaaatgcacagccaggtctggctaagcccaactctctcctatctctctctctctctctttttttttttttttttgtacaacaggacttatcatttcttgaggattaattgaggtccctggggactcagggtaggaaacttatcaggtggtcgaggatgaaaagtgggagcaaagagtctttgccatctttcacagttctgttcaatgtagacatctggcacttgctaactaccagaacacaaagtcacttggatgtggagtatttgccaagggcattgatctcccacgtggggtccctggactagcatcatcagcagcagcatcacctgggaatttgttagaaatgcaaattctcagaccccagctcagacctagtgagtcagaaatgctggatgtggggcccggcaatctgcagtgcaaagtcaaatggtggcaaaaagacatgtccatctagaacctgtggccatgaccttatttggacaaagagatctttgaagatgttattaaggtaaagattatgagatgaggttatcctggataagggtgagtcctcaaaccaatgacaagtgtccttagaagaaaaggggagaggattcacagagaaggccatgtgaatgggaacgaggcggatacaagccaaggaacgccaaagatagctggtaacatttagaaagcaggaacgaggcatgggacaggttctcctgcagcgcgtccagaagaaaccaagtctgtggactccttggtttcagacttctggcctctagaaccgtgagaataaatttctgctggtcgtttttttttttgttttttttttttgtggggggtgcagagtcttgttctgttgcccaggctggaatgcagtggcgtgatcttggctcactgcaacctctacctcccaggttcaagtgattctcctgcctcagcctcccgagtagctggaattacaggcgcccgccatcacgcctggctaatttttgtatttttggtagagatggagttttgccatgttggccaggatggtctcgaactcctgacctcaggtgatccacccccctcggcctcccaaagtgctgagattacgggcatgagccaccatgcctggccatttctgctgttttaaagcacacagtttgtagaaatttgttatggttgccacagaaaaccaatacaaagccctccaggtggttctgattcacaataaagtttgagaaccaatggctcagagctgtgcctctccatttcttacccacccaaggatcagcccaaggatgaacatttttttaataggcttttaatggtggtttctatgcacactaaaaattgagagcatttagccttgaggatacggtgagtaaataccttttgtctctctgcagtctggccatacccagccaaatgagatatattcttcagccagcttcctacacttgtgggagtactgctatttttattgttatcatcattactattatttttttcttttcttttctctttttctttttctttttttttttttgaggtggagttttgctgttgtcacccaggctggagtgcaatggtgggatctcagctcactgcaacctctgcctcccaggttcgatagattctcctgcctcagcctcccgagcagctgggattacaggcacatgccaccatgcctggctaatttttgtgatttaatagagatggggtttcaccaagttggccaggctggtctcaaactcctgacctcaggtgatccacctgtctcggcctcccaaagtgctgggattaccggtgtgagccaccgtgcctggccattactattatttttattgctagttttctctgcttctttgcagttggcaggagaacaaagtgaaccagtttatggtagagatgattgtacccagttaggaccctatatctgccccctaccataagtgctcccagcacactgtataaagtattggggcctggctgtgagattagcagagtccacaggcatgaggctcagctacccaactcccatctgggaggtaggaccactgtggaagcagagcagggacatgggaatttcctaatcatctgcttggatagcataatgaagtcaacatgctgcataattacatacttgggaagtttccattattcaccatgttgtgatctctagcacctggtgtcagcccctccagagacagagaggctggctggcaggaggagcttgcatggctccctgagccccgaagccaagggatcctgagtacgtcatcatgccttgaacccgtgggagggtcttttgaatccaagttgtcctggtgcacctcctgcctgcaagagacaggaagacgggaagacgcagcaggctgggaggaatggtcagctagggtcgtgggctccccaggggatccttctcgttctgaaaactcaacctaaggctttctggatttgctgagcaggagcggcccattccattcataatatctattggtggcattgttcatctcctctatgcaaggcgcttcacatattatcatagctaagcttcgtaaaatgtctattctgaaggtactattgattcacattttagagaagatgaagtaggccagcagaaaaagtagcctgataaagatcacacagctggtaagacagaagcaggatgtgtctaactcagtgtttcttatctagatactgttggcattcggggccagatgattctttgttgcggaggatggccctgtgcattctagggtgtttagcaacatccttggcttctacccatcagatgccggtagcacaccccagctcggttgtgacaaccaaaagtgtctccagacattgctgatgtcccctaaggagaaaatcaacccccattgagaaatagatttttttttttttttttttgagatgcagtctcgctctgtcacctaggctggagtgcagtggcgcgatcttggcttgctgcaacctccacctcccatgttcaagcgattctcctgcctcaacctcccaagtagctgggattacatgcatgcgccatcacacctggctaagttttgtatttttagtagagacgggatttcatcatgttggccaggctggtctcaaactcctgacctcaggcgatctgcccaactcagcctcccaaaatgctgggattacaggcgtgagccactgcacccagctgagaaacagattttgttttttctaagatgctactctgcctctgcaaatattctaaatctgagcagctttgaggcaccagggtataaggttatagatgacattacttctttacctatgcactttttagttagcccacttccccctgctccctcctttcccccaccctctgtcttgcacacacccaaccttctgccattttagaggtatagaacaagatagaatttggttgacttgttggaagttcatatagctaggaagttgaaatcaaagtaaagctaagttttgcagaccctcttctagcccttttcctatttccccattttctctcctccagtacctccaaggcatgctggaagctgggtgagcttcctgaagcttcattatgtgacatcggcaatagcctcttgcagtgattggtttccttactttctctccatttctttccaggaatctacttggttgtcacctccacagatgaatagctgtttatagtgtgtctgagaccgtatccctacttgtcatggtccctgtacatagtaggccctcagtaaatatttgttgaattaatgactaaatcactctgagtgtcatttccacgaattaaaataacatgaccttagctcgtagtgtcaatgacactttgcctgggttacaaccgggtttgaggcaagaagcaaaatcccacggaggctggagagagcaaaagggcttactcactggaaagagccagggatacctcacagatgccaagggcaaaagtacagtccagctaatgcagcaccaggaccaggactaagatcattattccgcctttcaccctggactgaacagcgtctgatctcagatttgcacagcagttggctttatctctgtctcctctgtttctatttttcacttcttcttcttcttcttcttttttttttttaaccttctgaattcctctctatgtccagaccagtgttctctactttatccatatggtaaaagatgactccctcagcatggcaagctcaacacccccacattgacttgtcctcatattgaagcacaaacccagaccaaggaagattttgcacactcaatttcaaatttccaggagaaagaatctgattggtgctccttgtaccaggtgatgctctctggcccaatcaggaatggccatgaagtggggctttttagtataaaaatgacccctgaggtccatttccatgtttgaggagcagttcttagaaaactgggggatggggaaacacccaaaagcctctagtacattttctctgcccaggtgagaagtagtagcctgctccaccttgcctgcatcaaagtcaagtgttggagaaacatcaggagttggcatgtgactctcaggtgggcataactggctcagaccctcattcagttcctttccttttccaacaaaaatgctcagaaggaagccctgaaaggaagttggagtgcaacagctgccacttctaattacagccagccttagtcaatttggattaattgggggcagaaagtccaatttacacaaaagaacaaccatatacacatttctttgttttgattgcctatgaggacatacagcaagttatactataatgatgaaaaaaatatggcaaacaagtaaaaagaaggcaaggaggacaaacagaagctcaagcaatagaaatcccaggggactggctttattgactaaaaccacagtgataataataaacacacatgcagttggaattaaaacaggtgcttataagatgtttggaaacaggtttgattctcttgagtagtaataatgataagaaagaaaaatagcaaatgtgtacacagttgcctcttagtatccgcaggggattggttccaggaccccccaaggataccaaaatctctagatgctcaagtccctcatacaaaatggcatactatttgcatatagcctacggctttctcctgaatactttagatcgtctctaggttacttataatgactaatacaatgtaaatgctatgtaaatagttgttgcactgtattgtttatttgtattattttttattgttgtatttttatttatttttctcaactatttttttttaagacagggtctcattctgtcacccagactggagtgcagtggggtgatcttggctcactgcaacctctgcccctggggtttaagagattctcctgcctcagccactggagtagctgggattacaggcatgcaccaccatgcctggataatttttgtatttttagtagagatggagttttgccatgttgaccaagctggtctccaactcctggcctcatgtgacccgcccaccttggtctcccaaggtactgggattacaggcgtgagctaccacgcctggccccttctcaactatttttgattccaagttggttgaacccttggataaggagggctgatacacatttactgtgtgccaggctctattctaagtgtttgatggagtccatgtctcctcatttaattctgcagcaacctgatggtggagatgctgcagggcagtgggggtgctcacagtcttcaaaagtactttaaaaattaaccgggagcgtaaaaggggagggcatgtctgatgttctctagaagaagcataacagaatagataagagctgggactatgcagcagccagacagcctgggtttgaatcttgctaagtgaccctgtgtgagttatttaatccctctgagctttgattccctcctctttaaaacgtggctaatagaactttcctcagataattgtggtgagggtgaaacatggcatggaacctatgtgaaatgccgagcacagcccttggcacgtagaagacacaatcaatgccatgatatgtagttagggttacaggatctagagtccacctgtgtatcttacaagctttgcccacttggaattacttctcaccaagcttccattttcttatctgggaaaacatggatgatgacagaatctacttcctgtgttcttatgaggaaggattcagataatgcaggtaaagttcttagtacagtgtcttacctatcataagcttttactatatatgattgtttttgttgttagcattctagaatgatgaaagaagcacagagaaaaaggtaggccattaaaaatgacaacatgaaacccattatactgttaagtgatttgcgctgtgcaattagcaaattacactcatttttcccaccccaaaaaagtgctttaacaagaggaggctgcttgtgccaatcataaacaccctataaacaacgcatttctcctggaagatccattttctcctgacaatgctctctgtttgatggcatttgcattccccttgatttgcctaattttaatgagacattagatcaacatcacaaaagcaatttcagattactcgggttccttgacaaaaattctattgtcatgacattgttcagtttatacatggagaatttttgccattgatttctgggacaaaactcttatgtaatgccagcaaaagtgtgaaatgattgtttttttaacatataattatggtttaaaaaacccaggaaacaccttcttgtggtgttaacactacacattagtgttcgttgatgcaagcagcagaaaccaacctttcctagcatgaaggaaatcaaaatatattgaatgcctttgagaagggaaggccgggggatccagaaaccagggaaattttaggcgtctagaaagcaggattattggaccatcttgtaaacacaccaccactcagccgggcgaagtggctcacgcctgtaatcccagcactttgggaggccgaggcaggaggatcacgaggtcaggagattgagaccatcctggctaacatggtgaaaccccatctctactaaaaatacaaaaaattagctgggcgtggtggtgggcgcctgtaatcccagctacttgggaggctgacgcaggagaatggcatgaacccgggaggtggagcttgcagtgagcctagattgcgccactgcacttcagcctgggcgatagagtgagactccgtctcaaaaaaataaataaataagtaaaaaacaccaccacttggtcagctccaatttttatcttagcctagtttcatttaagatgtaaagtcccaagaagtgtcccattggtctagtgtggatcctgtgtctgccccttcatgggtaagggagaatgagacttgataatttctagcttcaccaagaccacagacattggaggagagcaaatttcctaaaagaagagcaggattgagaggactgaggagatggtgtgtttgtaggtgtgggaactccttttctttagttatcatttaccagaattcctagtgaataatgctttgcagtgattaatgcccaacttttgctggctattgactgtcactggagacataaaatagccatgctgtggaagaaggttgttactatgtgtgttagtcaccacagaccatagacggagtggcttaaacaacaaatatttatttctcacagctctggagactgggaagtcgaaggacgaagtgcctgcagatatggtatctggtggggactggcttcctggtttgcagatggtggctttgtcactgtatcctcacatggccaagagagaggtaatctctctcatgtctcttcttataatctcactcatgagggctccaccctcattacctaattacctccccaaagcaccacctccaaataccatcacattgggaattagcttcaacatatgaattcggagagatacaaaaacattcaaatcatagccctaaatgatggagaattggggttttcaaaaccattcttagtctcattttatttaatttagaagtttttgctgtacctagggatggatagaaaatgtgttttccaaaacgcaggcattctttgtgatctggacttttcagtcattttgtatggagagggagtgcctggtctagattgagacccaaagctgtgggaagggatcatttagcacgggaagatgatgagatggcaaagacaactttatagcactctttatcatggatgtaaaagggtcaggcgaggctgacaagccagtcctcacggctactgtgaataggccaagggaaactgggctgaaattgcattataaattatttaggtagaacatgaggaaagacttgctggctgcaagggaagttagacattgtggcaagccttcaaggtatttttttttttttgatccgaggtagccaatgtgtgcattccctcctcctccacccgtgattccacatctatggtgtatatcaccagataatcagagcgcttgtctcctcctaggcaggaatggatctcaggatatttctcaacacagcactttagagggtttttattagctgggcatggtggtgggcacctgtaatcccagctactcaggaggctgaggcagagaactgcttgaacccgggaggcagaggttgcagtgaggcaagattgcgccactgcactccaacctgggtgatagagcgagactccatctcaaaaaaaaaaaaaaaaggtttctactgatcaactagatttagcgtgtgtgtgtgtgtttgtgtggtagtgatggtggtggtgtggcacaatttactgcccctcatctagattcagaattgggaatgtaagtggagacatgagctgcactaattatcttttcaatatttcaccttacttgggagttaccgccaactcattaagtaactgctaaggcaacaacgactacaacaacaacagaaccccccaaaggggaaataaaaggacagtgaagcttacagggtgtgaattatttgaagcagtgtgaggtattaaccagaagtgtttaactcccttgagaacgcagaatagagacatatcatgcaaggctttttgcattgtatacaataagaaaatgcaaaacattctggcttaaataatttatgcaacttattgactaaagcaacaggaaaatcaagttatgatgcccagttcatgtggggcttaatctagtagtttaaagacctgagttcctctctctttgccttttcattccatcctcgggcacctcttggtgggtcatcgtagctctatgctcttttcttctggtctgaaaacagctgcagcagctgcacaatttccaccttcagcacatcccgttcacagaagagagagtgtctctgcaggtacctccttctcatgtcccggcattctctctctttctctttctctctcattggcttgaatgggatcagtgtctgggagatgccaggaaggtcaatccttagaaccaaggggaagatcagtcccgtctaaaccatatggctaagattggtgtacaggtaagttccccaaatgagaagcagattatgattgaaaggaatggggagaatggatactggaaaggcaatgaaagtactctttgcaatggtagtttgtacatgtgtgggtggggggctgaagtctcttgcccaagagccactccttaaataaaataggaataaggaaaagatggaaagttcatcccatccagaggtgaccaaggtgcaaattgtagagaaaaccctttccttcttaagagagtccatcacctccttcattgccttttgatgtagaaattggggtttgggccaacttttccactggctgtcttctccaggtttgcctggagttttgccccattagcagccactgccatgtgtgtttgtgcacccagcttagctgggaactgatgtgccaagtaagcctgtgctcccctagtgctggtggatagaggggaggggcagccaacagtggggtcaccagaggactagcaaaggaggaacttgaggagaagcagacactatttctccttctctgtttctcctggcagttcgtggctactccatggggctggatggctactccaacaggatggagacatttttaagattcaggcttgaacaagttgctcaacttctcatggtctcatgcgtcatctctatacaatgatcatagaagtgcatcattgtgcgaatagttgtaggcgttccatgagatgatgtatgcaaaacaagagggcttcactttgcatcttaggttggattccctagaagcagagtttgagatggggattcttgtgcaagtgatttatagagggacactttccagagaagggtagtgaggaaagcaagattgtgcagggcaaggaactcagcaaggatgtggcagggaaaggagaccagctaggtcagctattcttcagcctgattccatgcgaagccctaagcatcaattgcatctcagagctggttccactttgaggcgagggtctggccttccatattctcatgttagtcattgactatgggctgcttgtgtttgtcattgactatgggctgccttgtctatgggctgcttcagggggtggggaaagaaaccttattggcaaggtagctcccattcagctagagccaattttccatagacgaaggtggctgtgagccattagcaatcatcattcacagcctctgggggatggggacacctgctgtgaaaagaatctgggcagggcaccaacggtatccaccacaccatgatggatacaatctggtttcaaagcgggagggaggcaggatttgggattaactctagtttatagaccggagaactgaagtcgagagatcaggcaacttgcccaaggtcaaactgctagcaggcattagagaagaaatgaggaggcaaatttcttgcctcttgcagtgaggttattcatatgatcatagttttctaaaaaaaaagaaaaaaggctagtttcttataaattatctgcccagccctttattttaaaaacaaggaacctgagggccagaaaagaccaagcaatccaagttcacagagagagtcaggcagacccaagaccaaacctgcataatcatatccacctttgaaccccacaaatctcattctgctgcttctttttgaaaacaggcaatgaagggagctgctgttgctttgtggaaatatgttcccatgaactcaatgacctccctgctgcttagaacaaatcttgatcaggcagtgaataaaccttccagacaacagtattcttgcttcaggagaggcttgtgggaaaatgcagtgagctcaggtgccttagagtgagaatgacagacagggctggaaagagaaatcttgcatttacttgacaaatatttattgtactaggtggtgggggtgtagcactgcacactccagacaggttcctctttctggagttacagtccagtgggaaaggcaataattaactaaactacccttcatgggatttaaatgacaatgatggtacgtgctatgaagaggttcgggatgttgtgtgaacatatgactgagggacctgacctcatttggggccagaaagcttttctcttaagcttagaccatagaccatagaccatagacagactggcttaaacaacaaatggagatataaagaatgaagagaacttaatgagaaaaaggggttgagggaggggctggaagaacattccaggcagacggaacagcttatgaatgatttccaaggggggaaggttttgtttgaggccaatttatttgagaaagaccagggtggctggagatcatggtgagaatgggtttgattggagatgaggatggagattcagttctttaataaaagggaagacataaagtgaaggtaagcaggaaggtgtcccaaatgtgtgtgtttgtggggcaggtaataggacaagacttgtgttgtagaagtatcattctgattgtggtggattgagaaggatatccttaccaatatggtggactcaactggcagcattgcagactcaactggcatggccctctttttcttcaaaacacttagacctagttgagactatttctctatatctatgtctatatatctatatatctatgtctatgtcgatacctatactccaaaagaaagaaagataaataattattaaggaagagctaatagtattttgtctaaaggattagacaaaaaaaaaaggaagagctccaacatagatataggttctaaaacataaaggcttgtgttgataaaagccgatgtctcatcaagagacaggtaacatggcctagagccagtgtgaaatgtacagctgcaactgacattcctaaaataaggctaggacttcgcctgttttatgaagggctagaaaaactctgttgacatatccaaagaagctataaggaaggttgtcgcctgcccagggttcaaggctgataaaagaaaatctctggtgagaaagtaaaaggtcaagtctacgttatgtgtaggtgcaccgcctgggtgtaggaattctaatgtgagaaattcaggtgtgatctaatctagggctaaaaaaacacctggtgaacaagctaccttcgcagtcttatttctatatcccttgactcaggggacttttacagaataaaggaacctctgttgaaggttctaataaaaaattataatccaggtaattaggcatctcacatgaaggaaagttagcacacacaataagtagtaatgtctcaagaacttgaaacaaaggaaccaaatgaaagaaacaataaaataagtttgtttaaaatgatcaaagagaatttttttaaaaaagaatgagaggccataatgaaaacacaagagtattgtttaaagaaaaaaacaggaagattgtttttaaagctaactaaaatttatagaaatcaattatattgtcattggcctgtcacagtggctcacgcctgtaatcccagcactttgggaggccgaggcgggcagatcatgaggtcaagagattgagaccatcctggccaacatgatgaaaccctgtctctactaaaatacaaaaattagctgggcatggtggcatgtgcctgtagtctccgtggcttgggaggctgaggcaggagaattgcttgaacccgggaggcagaggttgcagtgagccgagatcatgccactgcactccagcctgatgacaaagcaagattccatctcaaaaaaaaaaaaaaaaaaaaaagaagaagaatattgtcattgaaattaaatagtcaatttcagagttaaacaacaaatcagatatagcttcagaaagaggtagtaaattgaaagacagatgtgaggaaattaggaaagatagaccaggatgcaaaaaaaggagacttgagaatggattggaagaagtccagagtagataagaaacatgcttcagttgtataggtgagagatgattgtggtgtcttgggccaaaatggtactagtgaaaatggagacagggaaatggattagaagaaaatttaggatatttgtatttcaaaattgagaaaaagaacatgtcaaggcaaagagatgtatgcttgccttctgaggaaaacaaccaccaatggatggaagcaggagagagaaagattctaatacattataaggaagattttgtttttctaagaaccagacttttattttttatttttttaaaatttatttcatctgttttcttttttattattattatactttaagttctagggcacatgtgccatgttggtttgccgcacccatcaacttatcatttacattaggtatttctcctaatgctatccctccccaagccccccaccccccaacaggccccggtgtgtgatgttccccgccctgtgtccaagtgatctcattgttcaattcccacctatgagtgagaacatgcggtgtttggttttctgtccttgtgatagtttgctgagaatcatggtttccagcttcatccatgtccccgcaaaggacatgaactcgtctttttttttttttttttttttttggctgcatggtattccatggtgtatacgtgccacattttcttaatgcagtctatcattgatggacatttgggttggttccaagtctttgctattgtgaatagtgccgcaataaacatacgtgtgcgtgtgtctatagtagcatgatttataatcctttgggtatatacccagtaatgggattgctaggtcaaatggtaattctagttctagatccttgaggaatcgccacactgtcttccacaatggttgaaccaatttacactcccaccagcagtgtaaaagcattcctgtttctccacatcctctccagcatctgttgtttcctgactttttaatgatcgccattctaaatggtgtgagatggtatctcattgtggttttgatttgcatttctctgatgatcagtgatgatgagcattttttcatgtgtctgttggctgcatagacgtcttcttttgggaagtgtctgttcatatcctttgcccactttttgatggggttgtttgtttatttcttgtaaatttgtttgagttctttgtagattctggatattagccctttgtcagatgggtagattgcaaaaattttctcccattctgtaggttgcctgttcactctgatggtagtttcttttgctgtgcagaagctctttaattagatcccatttgtctattttggcttttgttgccattgcttttggtgttttagttatgaagcccttgcccatgcctatgtcctgaatggtattgcctaggttttcttctaggatttttatggttttaggtctaacatttaagtctttaatccatcttgaattaatttttgtataaggtgtaaggaagggatccagtttcagctttctacatatggctagccagttttcgcagtatcatttattaaataggaaatcctttccccatttcttgtttttgtcaggttcatcaaagatcagatggttgtagatgtgtggcattatttctgaggcctctgttctgttccattggtctatatatctgttttgttaccagtaccatgctgttttggttactgtggccttgtagtatagtttgaagtcaggtagcatgatgcctccagctttgttctttttgcttaggattgtcttgggaatgcaggctcttttgtggttccatatgtgtagttttttccaattctgtgaagaaagtcattggtagcttgatggggacggcatttaatctataaattaccttgggcaatatggccattttcacgatattgattcttcctatccatgagcttggaatattcttccatttgtttgtgtcctcctttatttcgctgagcagtggtttgtagttctccttgaagaggtccttcacatcccttgtaagttggattcctaggtattttattctctttgtagcagttgtgaatgggagttcactcatgatttggttgtctgtctgttaatggtgtataggaatgcttgtgatttttgcacattgattttgtatcctgagactttgctaaagttgcctatcagcttaaggagattttgggctgagatgatggggttttctaaatatacaatcatgtcatctgcaaacagggacaatttgacttcttcatttcctaattgaatatcctttatttctttctcttgcctgattgccctggccagaacttccaacactatgttgaatagcagtggtgagagagggcattcttgccttgtgccagttttcaaagggaatgcttccactttttgcccattcagtatgatattggctgtgggtttgtcttaaatagctcttattattttgagatacgttccatcagtacctagtttattgagagattttagcatgaaggacttgaattttgttgaaggccttttctgcatttgttaagataatcatgtggtttttgtctttggttctgttgatatgatggattacgtttattgatttgcgtgtgttgaaccagccttgtatcccagggatgaagatcatggtggataagctttttgatgtgctgctgaatttggtttgccagtattttattgaggatttacgcattgatgttcatcagggatattggtctaaaattctctttttttgttgtgtctctgccaggctttggtatcaggatgatggtggcctcataaaatgagttagggaggattccctctttttctattgactggagtactttccgaaggaatggtaccagctcctctttgtacctctggtagaattcggctgtgaatccatctggtcctggactttttttggttggtaggctattaattattgcctcaattacagagcctgttattggtctattcagaaattcaacttcttcctagtttagtcttgggagagtgtatgtgtcaaggaatttatccatttcttctagattttctagtttatttgcatagagatgtttatagtattctctgatggtagtttgtatttctgtgggatcagtggtgatatcccctttatcattttttattgcatctattttatttttctctcttttcttctttattagtcttgctagtggtctatcaattttgttgatctttccaaaaaaccagctcctggattcattgattttttgaagtgttttttgtgtgtctatctctttcagttctgctctgatcttaattatttcttgccttctgctagcttttaaatttgtttgctcttgcttctctagttcttttcattgtgatgttatggtgtcaattttaggtctttcctgctttctcttgtgggcatttagtgcaataaatttccctctacacactgcttcaaatgtgtcccagagattctggtgcattgtgtctttgttctcattggtttcaaagaacatctttatttctgccttcatttcattatttacccagtagtcattcaggagcaagttgttcagtttccatgtagttgtgcagttttgagtgagtttctttattctgagttctaatttgattgcactgtggtctgagagacagttttttgtgatttctgttcttttacagttgctaaggagtgctttacttccaattatgtggtcaattttagaataagtgcaatgtgatgctgagaagaaggtatattctgttgatttggtgtggagagttctgtagatatctgttaggtctcctttttgcagagctgagttcaggtcctggatatcctcgttaaccttctgtctcactgatctgtctaatattgacagtggggtgttaaagtctcccattattattatgtgggagtcgacatctctttgtaggtctctaaggacttgctttatgaatctgggtgctcctgtattgggtgcatatatatttaggatagttagctcttcttgtttaattgatccctttaccattatgtaatggtctttttgtctcttttgatctttgttggtttaaagtctgttttatgagaggctaggattgcaactcctgctgtttttttgctttccatttgcttgatagatcttcttccacccctctattttgagcctatgtgcatcgttgcacgtgaaatgggtctcttgaatacagcacacagatgggtcttgattctttgtccaagtctgtgtcttttaattggggcatttagcccatttacgtttaaggttaatattgttatgtgtgaatttgatcctgtcattatgatgttcgctggttgttttgcctgttaattgatgcagtttcttcatagcattgatggtctttacaacttggcatgtttttgcagtggctggtaccagttgtttctttccatgtttatttagtgcttccttcaaaacccttgtaaggcaggcctggtggtgacaaaatctctgagcattggcttgtctgtaaaggattttatttctccttcatttatgaagcttagtttggctggatataaaattctgggttgaaaattcttttctttaagaatgttgaatattggcccccactctcttctggcttgcacggtttctgctgagagatccactgttagtctgatgggcttccctttgtgggtaactcgacctttctctctggctgcccttaacactttttccttcatttcaaccttggtgaatctgacaattatgtgtcttggggttgctcttctcgacgagtatctttgtggtgttctttgtatttcctgaatttgaatgttggcctgccttgctaggttgggggagttctcctggataatatcctgaagagtgttttccaacttggttgcattctccccatcactttcaggtatgccaatcaaatgtagatttgatcttttcatgtagtcccatattccttggaggctttgttcatttctttttacaattttttctctaaacttctcttctcactttatttcattaatttgatcttcaatcactgataccctttcttccacttgatcgaatcagctactgaagcttgtgcatgtgtcacgaagttctcatgccatggttttcagctccatcaggttatttaaagtcttctctacactgtttattctagttagccattcgtctaatcttttttcaaggtttttagcttccttgcaatgggttcacacatcctcctttagctcggagaagtttgttactaccgaccttctgaagcctacttctgtcaacttgtcaaagtcattctccatccagctttgttccgttgctcgctaggaactgcgatcctttggaggagaagaggcgctctggtttttagaattttcagcttttctgctctggtttctccccatctatgtggttttacctacctttggtctttgatgttggtgacctacagatggggttctggtgtagatgacctttttgttgatgttgatgctattcctttcagtttgttagtttccttctaacagtcaggtccctcagctgcaggtctgttggagtttgctggaattccactccagaccctgtttgcctgggtatcaccaccagaggctgaagaacagcaaatattgcagaacagcaaatattgctgcctgatccttactctggaagcttcgtccgagaggggcagccacctatatgaggtgtctgttggcccctgctgggaggtgtctcccagttaggctacatgggagtcggggacccacttgaggatgcagtctgtctgttctcagagctcaaactccatgctggagaaccactgctctcttcagagctgtcagacagggatgtttaagtctgcagaagttgtctgctgccttttgttcagctatgccctgcccacagaggtggaatctagaggcagtaggccttgttgagctgtggtgggctccgtccagttcgagcttcctggccactttgtttacctactcaagcctcagcaattgtggacgcctctctcccagccaggctgccacctcacatttcgatctcagacggctgcgctagcattgagcaaggctccatgggcatgggacctgccaagccaggcacaggagagaatcaccttgtctgccagttgctaagaccttgggaaaagcacagtatttgggcagggagtgtcccgtttttccaggtagtctgttgtggcttcccttggctaggagagggaaatcccccaaccccttgtgcttcttgggtgaggtgacgctccgccctgcttcagcttgccctccttggtctccacccactgtctgaccagtcccagtgagacgaaccaggtacctcagttggaaatgcagaaatcacccatcttctgcgtctgtcatgctgggagctgcagaccagagctgttcctattcggccatcttggaaagccgtaattgagaatcagacttttaaacattatatgaccattagagatgtgatatgaacctaacactttttgacaccaaaacccatttgtggaaatactgatctggtatggaaaggaatatagctttgaagtttcccgggggcatagagtcctgggttctgttggcagcagaggagttggaaagggtgaggaacatggggcagccagttcaagtggctgcacccctcttgttctgagtcttggcccagggctttacttcaacctagggtgacaagatgacttagatgagagaaacttctatcgtagatcctgcctgtcactataactgttgggttaagaaaagcccatctctgccacttactagttggtgatcttggtccagttgctgtccatctttgagcctcagtttgttcatctataaagtgggattgatgataagacttatcttgcagggatttagatgggattaactgcataatgcacaaagggtccatacaagaggagttttcatgaacactggctgtcatggatttccagataaggacctgcaagaagtgacttaactattgaaattcaaggtatcatgtgcatatgagaggtggggggagtggggctgattataaatcagcaaaatcccagagaaagccaggtctctgggaaaagtctcgtttccctttagtaactggtgctgcagttcggccctggatttttgtccaggcgcccacatgtgctttgaggatttcctcaggagtctggtatttcgcttcgttgacctccccaatctctgcctttgcatccgtttgtgtctttactgagaagggcctctctaagtacaccacacagcactgcggggcctataaatagtgacagggcaaactagttcagatgcaattgttgctgactcagacattcgctcctctggcagaagggaggcaccataggatttaaataggtgtggctcatccctccccttctgtgggctccttactccttgtctgcctttcccaccattctgcctgcgtcccagccacccccactgaaggtaggtcccaacagaagctggccctttcacaggtctcctataccaaggaggctgctggggtcccggtgtcttggtacttttccattctctctttgtcctttgccactgtgctagcagaaaagacgttgggaaagaaaagattgtcattgtcacaagaaaggagataaggtaaagtatgacaaatttcccaaccgtgctcctctgatacgagttgtgggtagaggaggcagtttttctccccacctcgaaactgcataaaacagttgacaaaacaggcaacttcccatccttggaagatgactttgaaataggccattagacaaaagtaagctaagagccaatgtattgctaaatatactcattcttataaaatctgctatttttgagttaaatgttgcggaaattaccgaatttgcatttaattattttaatacatcttgtttacagatgactaggcaaaaataaaaaaaaaatcccccaaactaattcactttgactgctccggttgtaactgtgcctaaaatagaaaaacttactctgaatattttctcaaagtcggagggaaagccaactttaattccattttgtctcagtgtcaataccacacatactgtttcttctattaaatgagatttatactttcgaagtcagggataaaatatattttccccattgaaggactcttctagacctgtctcctgattggcctgtagactttgttttgggtaaaatgaggaagaaagtgttatatagtccacaagggcatggcctttatggttaagcagacctggggttgaattcaagttttgcttcttactagctgtgtatccttgggcaattcacttaacctctctgagtcctggtttactgttttcaaatagagacagtaatttagctgtgtaagtgttataaaaattaacaataacatatgtaaagcagctactatagtgcctagcaaacagtaggtcctcagtaaatacatatttcttccgtttcctcctctccttccctctttagatgtgatcaggcattttcttcctccttgatagagaaaacttgataggttaaatggtctgtcaaatggtttacaggtcccagggataactgtgagagagaagaagagaattttctgagcaatcgttgttcctggccatacttgtgggcaacgtgtatttggagcttgtttctcagaaggagattggcaggtgtctagtctacttgaaatgcttttcattcctgtctctgctttagggacacccagggccatcagtctagcaatctgcttttgtgctttgaagctcagctgaggatgctggggagtggtcagctttgctgttttgtttctgtgttggcagatcccctgcattctgcagaggttgcacatcttaacaaaatggggaagaagcaatgagtgaaaaaaggcagattagaggggccatacccatgtgtggccacctcactgggctagggaagggaaaacgaaaagggaaatggtggtggttaggggtggcttccagtatcctcctcagaactgttctagctcccatgactcttagaataatatttgccacatatgaaggaaaaggactacagtccagaccatcttcatttaactgaattctagctgtgggtttccaagtatgggaggatagcacattcattcaacaaacactgcacaacgagttccataaaggcaggggctgttgacaatcttttctcaccagtgtactctcagcatttcacatactatcaggcaccttgtgaatactcgataaatagtgaatgggtttatacagcaaggcaatcaactctagcgcaatggctctcaaacttgagcgagcatgcatcaggatcacttggagagctttttaaagcacagattgttggccagtttgcctagaatttccaagtccttatgtctggggcagggcccgagaatttccagttgtagtaagttcccaggtgatgctgttgctgctggtccaagggccatattttgagaaccactactttggtggtcaagagtgaaagccctggagtcaagaatacttgagtttgaatccctgcttcactgggtattagctggttaacgatgaacaagtcacttaactcctttaagcctctatttctatgtctatgaagcgcagataatcatatgtatgtcataggatgattaagaggattaaatgagattgacttaaaattttcagtgtaggccttgtttatagtagacactcaatacacagaaggtagctggattatgtactgagcatgtactttggcaaggccctcatctacccttaggtagctcatttacccaagccttgcgacacagaatgcagagacaaacgccatatcatctctgccctcaagaagcttatagattagtggggaagccaagtggttaaagcaataatcatttaccatgtgttaaatgtaggctcttgtggggcacagagggaggcattcaacctagctggggctgggggctcagggaaggatcctgatgcaagactcatgctgaagctgaatcttaagtgtagagaagatggggaaggttgatataggcagagaaaatgtttgagtagaattggaagggcccatttggtggccttgtagttatccaaaagcctttcacggtgcccaaatcttactatgagtaacttcttggagtcaaggcagagtctatcttggaagtttaattcattgaacctttattagatgtagactttcttactcgctcagttccaccttcttggacttttgatgtttcgtgaacatctaaagcttgttctcaccccagccttttggatgtgctattttttcaactgggagctctctcttccctgagacttactcatggatggctcctcttcttgtcacctgctcagacaggccattctctgacgcctattttagagtgacccctctgttccctacactatattcctactgggctccatttctcttcagggcacatctcactctctcaagtcacatatttatttactcatttattttctctctccccaactagaagtgcagctccatgaagacagggactgtgtctggcttaagggcttaggtatataatcaacacttgataagtgtttgttgaatgactgttgagtaatactaaatgggtgaatgagtgaatccctatacagaaccccacaatggtccttggagactacctagtttctctccttcatgttacattgggaggaattgaggcccagggaagggaagggaatttcccaaagccacacagggagttgatgttagatctggccttaaacccaggacccttgacccttggaatagtgctctcaggtcatctacccaagtggacagcaggcactttatgggatgagccatcacgcggtggaatgcccgacatcatagtggcattgtctgatcagtatttttttttttttgagtggggttttgctttgcccctcaggctggagtacaatgatgctatcactcaagtgatagctcaagtgatccccctgcctcagtctcccaagtagctaggactacaggtttgtgccatcatgcccagctatttcaaaataaattatttttagagatggggtcttactatgttatccaggctgggcttgaactcctggcttcaagtgattctcctgccttggcctcccaaagtgctggaatgacaggtgggagtcaccatgcctggcctgatcatgcagtctttagtagctttgactttggcggaagtgtcattcctatatagagtgcagcttaatagcactgggtgatggggagtggacaggaatgagttttagaagtaagtacagtaaaatgtcatgatagacagcatcctacttcaccaggttgtcctggccaatggtgaaaatcctgtgattctgagttagagcaaacaagctagtagtcatagtagtactaattctagccctagtactaatgagaatacagtcaacattaactgagcacttactatgtgtgaaccactgtgtcgggtgctttatgtatgcacaatctttcaacagcctgttaatttggcaccactgttaccaccccatttcgcagaagaaacggagggtcagagagatgaagtcacctgtcccaggttttggaccagggttagttgactccagagtacctgctcttaatgttgataaggcatgtaaatcctgggatcagatcctggctatgacacttagggcctcaggcaagcaacaacttctttgaactttggtttcctcatccatagaaatggagcaaaaatacactccctgctggattgccacgaatcccattcagggattcactgtggcctttattgcatccataaatgccagctcttacagttaatggctcctcttcttttctttaattctatttcagtattaggtgttctgtgttaccatatacccattaagatcccagcaacccagggagtcaccacttttctcagtcttgctggccctgtgttttccctcttgcctttggaatttctgaatcttgttctctgcaagtgagaaaggggggaggttctctttgtaaaacccatgagccactttcaggctacaataagacaggaaggaggcctggagaaagtgacttctggaatcaacccaaaggacttgagtggtttctggaggctgcaggaggcaggatgtccaaagattcctccttaaggagcaactgcaggctcccatccactctgtgcatgtggctgttgctgcctccaggaacggaactcagagttgagtcagatgaaattgcaaaaaggctgggtggttctggactcagagaggctcccagctctgttgaatctggctcaatctcttcctagatctgcggtcttgggcaaccccctttgtctctctgagatttggtttcttcatctgcaaaatgggctggttgtgaagagtaaataaagggatgagtcattagttaaaagaaaaggattgtatacaggtggggctgacattaaaagctgctgaatttattcaacaaatatttattgaatactaaatgcctgtggggcactgttctagatctggcattggcaagctatggccttcaggccaaatccagctgctgcctgtttttgcaaataacgttttgctgcaacacatccatgtcaattcactgaccgatcatctatggctgatgctgctacaacagaagtgagtagttgtgacaatgacaggctcacaagcttacaatatgtagtctctggcactttacagaaaaagttgctgatccctaattgaagtgatgggaaaaaatgaacaacacacacacacatctctgatgggactttcctggagcaggaagacagataataagcaaagtaaaatataactaaactagataatatataagaaggtagcaagcacaagggagaataataaaacaagggtgggggacaaagaatgctggggagagggtagaattgtagttctgagcaggctgagagtagaattgtggttctgggccaacatcactaagaagatgccatttcagccttgacttgatggggtggagggagtgggcagtgaggatatcgggaagtgttccaagcagagggaccagcaactgcaaaggccctgaggcaggagtgtgctctgtgcctcctaaaatcagtgaagagtgtagcatggctggaccccgatgggcagcggggacggggttggtgggggcagaagcaggagataagaatcttccttttaggctcagccagttgtctcagacctcatggcaattctgtacactgcctttttctctgagtgggttagaaaccacttccagtgttgacccaagaagtaatgtgatcagagttatactttacaaatcccaggggcctccaggggagctggagaaaaatccaggagattagagagcctaggaggctccctgttgacctctgagccttttgtccctgaatatttccttttacaccttaggcaggcatcaagaatccagacaccgacaggagccaggctggatgggactcagcaggaggtctggggactgtagcaaagtgagggacacacggccctttcaggagaccactctttacctccagccagtggctgttatgtaggaatgtcagctcagtgtcaccatagctgattcctcaagagaactcagagatgcagattttaacatataattgtgctgcattgatctatggattagtaattcaacttgtctttttaaacaccactcagaacaaaacatatttgcagtacctttttggcaagcatacacccagtttactgaatacaaggatttgggctttgttttattttattttatttatttttttgagtaggtcaattgggacctggcattagaaaattgttgtttgtaatcatgtgcccaggtgaatgagtgaatcccagatatgcaccagaacacacacaggaggactctgtggtgccctgcatagccctcgggctggtgtagcaggttgcacaggacttgggtctgaatgtccctttttgctcctattaccttgtgggtatagcttgtacaggaatgacagctcattcatattctggggctggcaatgtgctcaggactgtccaagagattgagaagttgactccttgttcggggcctccagaagtgtgcactccaggagaaaggatagcataagctgtccttaaaaacagagaaatactactctctgcttctacgagtttggctatttatttatttattgagatgaggtttcgctcttgttgcccaggctggagtgcagtgatgtgatcttggttcactgcaacctctgcctctccggttcaagggattctcctgcctcagcctcccaagtagctgggattacaggcatgagccaccacgcctggctaattttgtatttttagtagagacggggttttgccatgttggtcaaactcctgacctcaggtgatctgcccacctcggtctcccgaagtgctgggattacaggcttgagccactgtgctcaccccgagtttggctattttagattccatatctaggtggaattcatgcaacgtttgtctttccatgcctggcttatttctcttagtatcacgcctttcaggtgtgtctatgtttccggggctgtggggagagggaagtggggagatattgaccaggtttcacttgtgcaagatgaatgagctctggagatctaatgtacagccatgtgaccattgctaacaatactgtactgtatacttgagatttgtcaagatggtaggtgttaagtgttctcacacgaagaaacaaaaggaaatggtaactatgtaagatgacagatgtgttaattagctttattgtatcgattatgtcacaatgaatatatatatcaaaacatcaagtggtataccctaaatatatacaattttaatttttcaatcataactcattaagtctggaatacagaaatatatactggaaacaaacatacatatgaaaacccaacagagaaatactggttagtgccaggtaaccaaactgaaggcgtcaggccaatctggccaacaatcatgttgtgtttgggttgatggtcttatttaaaaaaatgttttaagctagttgctggcttttgaaaatcaaaatatttcacactgttcctttgcatatatacccagaagtgggattgctgtatcatatagtagttttatttctaattttttgagggacctccatactgttttccatagtagctgtactaatttctattcctaccaacagtggataagggttcccttttctccacatcctcgccaatacttgctatcgtttgtctttttgataatacccattccaacaggtgtgaagggataggcacaattattattcatcaattaaaactaaataaataaataaaatggaggaaaaaggacttcacactaaattccagatgtgagcttctcttgatgcaaagcatcaggagactctggccatgccaggcctgaattcctgcatggatgattgggtaatgctgagaatggctgcctcttgcaggtgcaggtgtgtgctccctactcacccagcagtttactttacttatttacattccccgactgtcccctccctccctgaggcttttgagtttgcatcccttgaagttggggctactaatctgaggaaggctcacctggggttgtgtcctgtctacgagaaccgacatgctcaaccctaggactagaatgccatgtgttctctctgatcaatgatcagttatgattgtgctacctgttgcatttctaaacacctagcactgtgcaccagctcaacatccaggtcacaggatagagcagccttcagatgaaattacaaacagatatagggctgctattctggtagaattctgaactgtcccatgggttccagaggttgactttcttctcttccaggtccttctgtcctcaccgcgtggcccaggaggtctctttctctaagggtgaactccgtggccactgatgctattctggaacactgagaggcaagggagagaacagactttccctttgtcccatctgatgtcctaatgtagccttcttgggcaactttatcacacagcaaagtcagggttgcagctgggactctgggaacatttcatccatgatgtcataattgattttcctccttttgtcctccctctagactcccctctccttccccacaccatccctgtttctctgccgctataatgcttcactgcttcccctagacggttggggagaattcactctccatgacttgttttgtccctgttaatccccaatcaatatgtggcacccaatgtagtcgctgttccgggaaaaataactattattctgcctaggccaagagtcatcttaatttaaaaggataaattgctcactcaacttccagacttttcattcagaagggagacaagttcatgggttggcagagggaggcggcacttcctcataggctatgcatatagaaatactcttcttatcctttcaaaaacttttgtttatattttttactgaaggttgtgccaatctctttgaacacattttctctagtcctctcaacagcctgagagtagttgattcatttataacttgaggaaactgaggcaaagagataacaagacttatccaaagtcatttaacttgtcagtagcagagctgggattgaatttagtgtgtcagactccaaagctcatgctgtatattgaagaaaacactcttccggaacttcacaccccagagtttcattcttgtctatctcctggggcgagctgaaagcccccttctcaaagatcttctcctggcatgagtttcatgatttatctttctccagcaagcctgatttatagagttttagttatacatagagggaaatgattatgtttctgagatgaattattgcacatttgaggtcacagagtgtccttaatgtcccatgagcaggtgagtggaaagaccaggggctaatgaatgggaagaaagccagggacacaggtgtttgcagagccacaagaatctcaggtgagactcagctcagctcttgaacacagtaacccaacctgcctaggcctctcagtctgtgagtaagatgaagtcacagtaacaggaattgtgcacattttctggctcttatcttcattcacatatacaggacttctgcccatgcaaagctttcctctcttctgtctgataattcttgtggtggggttatttcacccttgctttcagctgactgcattcatctcatagtgtccaccatgttttttcttccatgttggcctcattgtcaacgtttgtatcttgagatgctcttgagggtgccatgggccaccatgtcataggctttgtgtccagatgcttacgaaggtgctaactctaaagatttccagagcattggaaagaagtcatctctcccccattctgggatatacgccactctccaagctccaaagccatcctgcttgggctttgttctagagtcctacgaaaacacagccattagtttctccatctgttccatctccaaattgctccaggaggcatgcatgtgtctggttcttgatccaacctcatttctttcttttgtgacatcaaagcttcttgctttcttcttcatccccagctaatgccctcatacggttgtctaagggggccaggtttaccagctttccatattctcagtcatgtctgaattccagtttggcttcaaggtaggatatagtagtatttaatagtatgagcttgggtgggaatgtaaaatggtgcagcagctttggaaaacagtttggcagtttcttaaaatgttaaatataaacttactatacgacccagcgatttccctcctaggcatccacccaagagaagtgaaagcatatgttcacacaaagacatatccatgaatattcatacaaacattatttataatagtccaaagtggaaacactccaaatgtcaatcaattagtaaatggataaacaaaatgtggtatatccatataatggaatataattcagcaatagaaaaggaatgaaatactgatatctgctacaacatgggtgatcctcaataacagtatgctaaatgaaagaagccagatgtataggctcgtgttgcagaattccattatgaattgtccagaaatggcaaatctattgggaaagaaagtagattagtggttgcctgggctggggtggggatggaggtgaagattaacagcaaatgatcatggggacgttttgggggtgctgaaaatgttctaaaactggaggataatcgaaattctatacatttactaaaaatcacagaattgtatacttacaatgtgtgagttttatggtatgcaaattacatatcaataaaactttttattttttaaaaaagtatgattttagattctgacagaccttaattgcttaatagcttcctctattgcttactaactgtgccactgtcaattacttacgttggttgagcctcagtttccctgtccataaaatgggcgtaaatactacttcatagggttgttgtaaaaattgaaactggttaaagcttgagaagtgtttaacgtcaaggaaatataataataaacaataaaatatattaaaaacttaatattgatatactattatacgctcaataaaagttaatttctgttatggttgcctttccttgctgtgaagacattctttatattattaacattttgaaatgtaccataggagtatacggctagcaaaataattgggtttcttttattttggaaagtgtttctgaatatgtggtgcatctgtggatggaaggtgtctaagcttggaggagatgcggtaagcattgctattactgtctactgcatgctgtcccaagtgggtcctgtctggaccacatttcaggccatcaccctccctcccacttgcttaccacaacaggtcttctggtcttcccgggctcctgggcttctgcttcctatttttgcaatgcttctcatagagaggcttagaaggagagaggatgggtaggatgtccccatggggcttcccgcagcctcccaattagactggttgtggggagactccggaggagggaggtcttggcccgtgccagcaggatggctatgagtctgtggagaaagaaaatagagcacagaaagggagctgaactttctaagcagccagtttcattttgggcatggcagttgcttgtgctgtcagggagaatcaagctcatctgctgaggagagctgccaggggctgacagactccatccttataggttcctcagctcctcttgggcttattaaaaacttggctctgcctggccggggtacagagcttctaggttgaggaacattgagcatgttgaagttgagagcgccctttcagatgatttattggcacttgaagtcttcatcatttggcttctatcatagacacactttactcttggatctcaccaagggttgacttctccatgtgccctggtctctctattcccataggtagtgtgctaccttctgcctctttacctttgtccctgcagccctatgccattattatttttgcagatgaggaaactgagcctgagagagatcaaataacttgctcaaggtcacatagctagtaagtggcagagctggaattagaacccagcttttaatgattcaagagcctgagtgcttggctattgagctctgctaccttccaaattttggtgtgaattatagcatattttataattgtatgctggtacatctgcctcccttgtgcaaagattgtatacttttcatctgtgtatcttctgggcccagcatgaagcctgatgtacagtagcaaatttggtgcaagtttaagttcctgcatcagagtccacctccaccacttactagctctgtggctttgggtgactcagttaaagctttctgaacctcagtttccttgttataggataataatacctacccagggtgtgtgtgaagatttggtgacatgatgcatgtttggtgtttgatgcataccagatgtggtacacatttttgttttcttttgggacattcaatcctgtatattttcaaccgaggcagtttagatagggtttaccttaatctccagctccaaggagagaagaccttcagcagcctggccaatcagaaggctgaattaccctgatcacagggattggttcaaaggtggacatgtgacctggatgagccaatctgtgccttctctgggactttggctagaaaaaaaaaatcagtaagtggcaaattacatccttctgagatgataagtacaatgaaccatgtaaatagtgagctgtgtagccaccaggtgggaaaggatttttctgagaatgaagccgtcccagaggaaacagaaccaagaggacaaagaaagagagagttctgatcatattgttcatttcatgcctgtagttttctagtcacatcaataaacttgctctttctcacgttctctctctctctctctctctctctctctctctctctgctttgagctagctgaagttggtttttgctactaatgagttaaatttttattcgacaaagggggtgttttaaaatggtgagctttgcgtttattccccgagtgagggaatgaacaaaataatataagcttgttaaagatcagagttgggctggctgtggtggctcatgcctataatcccagcactttgggaggccgagtgggtagatcacctgaggtcagtagttcaagaccagcctggccaacatggtgaaatcccatctctactaaaaaaatacaaaaaatcagccaggtgtggtggtgggcacctgtaatcccagttacttgggaggctgaggcaggagaatcgcttgaacccaggaggcagagattgcagtgagccgagattgcactattgcactacagcttgggcgacagagagactcggtctgaaaacaaaaacaaacaaacaaacaaacaaaaaaacaacagacacacacacacacacacacacacacacacacacacacacacagagttaacttaactttagttctagcaaagatcaaataattaggtaggcagtcaaggtgaagataggtccagaatttacagggaagaaggctcttcagggggaagcaggacattgaggcttagtaatttcattactaagacagctgcagtaggggtggcaggtgagattgatcaggtaggttggggccaggtgatcaagagccttaactgtcatgagaatagattggaagatgaatagtggatggtgaaactgaaggccagtaggccatttggaaacaatggggatgaatgagggcagtggcagtgggtataaggcacagacttagtccttaattttgagtcagtataaatttgaatgggaaaggaggatatgaattggggtctagtctggtgtagcaaaagccttacacatagtaagtcctataatgctcagtcagtttgatttatttttaaagggagtgttatggacattgtagagggcacattctcataagacaatgagtatgtaatatgttaggtggtgatcagagctgagaaataagaaattttggtaggaggacagggagtggagggtaaggtgttgttaagtaggatatccaaagagagcccccctccggccccaccctgcttttttgagacagtcttgctttgtcacccaagctggagtgcagtgtcctgaccacgcctcactgaagtcttgacctccaggactcaagtgatcctcctacctcaccttttcgagtagctgagactgcaggtgtgtgccaccacacttggctaattgttttgtttttttgtagagataggatcttgttatgttactcagcctggtctcaaattcctaagctcaagcaatcctcctgccttggcttcctgagtcgctgggactgcaggcaggcaccatcatgcccggctaattttttgaagtttttggagtcttggggtcttgctaagtttctcaggctgatcttaaactcctgggtcaggtgatcctcccactttggactcccaaagcactgggattacaagcctaaaccactgtgcctggcccaaagagagcatctttgattagaaaaccaaccgttacctcaagacacatgagactgcatgcttactaatttctgggaaaatatttatcatgtaatactagagggaaaaaaatcagcgtatgaattagaagcagattaggatggagcaagattgctttttaccattgggggaaatattgaatttgatttgatctttttcatttatttatttaagaatttttaaaagcccacatcacaaccaatggtaacacaagagagtgttgtgagccccaagttgagtacagtatccctaggtatggtcaatttctcaatgtttctcctaaagtgtagtgtcctgagctaaaaccttccagagcgtgctgagcagcatcatgtgaaaagggacaaatggattgttttctccaggggtgtgacaggtatatgatgattcagggtggctgctttgacctggctctctctagactccagagcattttgggattctgaaaatcaaaattattatctttttgtgtgtgtgtgaattactgagtgttgcaggcatcagtcttgacctctggggctcaagtgatcctcctacctcatcctcctgagtagccgagactacagatatgtgccatcatgcttggctaattgttctatttttttgtagggatgggtttgctgtgttacccagggtgaccttgaactcctgggctcaagcaatcctcccaccttggcttcctaagtagctggaactgcgggcaggcatcaccatgcccagctaagatccacttgtggtcttcaagggtaggcccaacttggcttattactcattcactcatttctccttactcaccacctgcttgcatctctcctcatgctcagggatgggctggtgggtgaaaatcttgcaaggcacttaatacacacatcactcagttgttcataaaagctgaatgtttaatgacttaaaaacccccaactttatgatggtataattgacataacatcaaattcacccattttaagtatacaattcaatgatttttagaaaatttactgacttgtgcaactatcatgagcatccagtgtgaggacattttttgtcaccccaataagatccttgtgcctgttctcatccctaacctcaggtaaccactaattgattttctagctctagagatgtgtcttttctggacattacatgtgaatggaattatacagtatgtgatcttctatgtctggcttcctttacttagcatgtttttgaggttcatccctgtcttagcaggtataaattcttcattttttattgctgcataatattccatcatatggatagaccactccattcacacattggcgaacattggagctctttttaatgctgagatattatgagtaatgctgctatgaatactcacttgtgagccttttgtggacacatgttttcatttcttttgagtagatacctaggagtggaattgctgggtaatatatattaagattatattcaacttttcaagaaaggaatagcttggtttttaagctgtgtcaaagtgctctccccaccacatatagagggttgtgttgagcatctctcataacctggaatgccctccacacatggctgcaactgagatatttgcaatggaatgttcaggtccttccatgcccagccatttgctggagcatttccgcctactagtcattctgccaagcctcccattcctgccacagccaaccccaaggaagggggaacacaaagacgtctgtggctgtctgaacgtggctttttctccagatgggacagatgcagtggctgtaaaagcagctgcgatgtttccgtgctgaaaagggcttttcatgcaagagacgaaaagaggaatgtcatgctggaaaggtgaactttgggagctggtatgaaaagaatgtgatgtgtgctccctgtttctctgggacaaatgagtcatgtttgagaaatggtcccttttcagcctcaatgactgcttgcatctatttcaacatccaaaaaaagtacagggagaggagagctggaacttgagcaagactcaaaggttgctggagactcggaaacagtcatctgatggtgtgacaggtcagtgagccaatcagccagccaaagagctgtgatgaagggagagtctgtgattgtagagtgacacatggcctcatttatcctggagaaagctggggaatttggtctcagacagctggtactgaattgagtctttgtatgtccaagagacaagatattcatttaaattgaacagatgccaatgttacttgggctccttagtggtaactgatcctcccctcatgggcctgaaggtattaaaaaatatttagtacgtggcttctaagatttaactgtagcccttaagaagtaaactcagacatacaagagatgtgaaactggctagccatatgcagaaaactgaaactggaccccttccttacaccttatacaaaaattaactcaagatggattaaagacttaaatttaagaccgaaagccataaaaaccctaagagaaaacctaggcaataccattcaggacataggcatgggtaaagacttcatgactaaaacaccaaaagcaatggcaacaaaagccaaaattgacaaatgggatctaattaaattaaagagcttctgcacagcaaaagaaactatcatcagagtgaacaggcaacttacagaatgggagaaaatttttgcaatctatccatctgacaaagggctagtatccagaatctacaaagaacttaaacaaattacaaaaaaaaaaaaaaacccaaaaacaaaaaaacagcttcccttatttcttaaggtgatctcagatggcagactccctgagttcaaatcctgattgcagaagatcattgaataatttatttaagtcctctgtgccttggttttctcatctgtaaagtcagactgaaaacacctccctgttttgaggattaactgagattatctgtgtaagacacttagcatattggtgggcacatagaaaggccagagtaaacattaactatcattactattagtttgaaatttattttttattattaagataattttctttttggagcttctatttaaccaggtggatgaaattcaaatcttaccctattccaggtaacctcaagcaattcagtattgaatattaagtattcaatgcagtattgaattgcctctccccaaagatttggattctgtaaatgtgtggcagaattgtgtttaaaggagggtaggagactatgattgttcctggataggtgagaggccatctggtcttcagttatcatctgttgaggcagacattcgtggaaacccatttcatcttgtatttgcagatgagaaaactgaggctcagagaggttaggaaacttgcctaaagacacacagctaggtagtagactcaaaaccaggtctgtctgactttcgggcctttgctctttcccatttgtcttctaaaaatgactccaaaggcctttctatcttatgcccaggtggtcataccactcagcaaaagggtaaggatttttttttgtttgtttttaaaggagatggactaggttgtttcatgattcgtcagaaaaaggcctgaggacttgtgtcagatgccaaataaagctttagttcttgatatgtttagagagcaatttggtgttttagttaataagagaaattcaatgcatatttgttgaattgaagcagggaggagagaagggaaaaaataagagaaagagggaagaaagcaagaaaaaaggaagaaagatgggaagtgaagaagaagggaaagagggaggcagggaggaaggaaaaaaaaggttttgattttcatttgccagccacactgttggagtatattggttttatggagctttaccaaggttttatgccttggaatctctcaaggaacattttccaaatatgcattctgggaccccacgccacagctactgaatcaactggaatccctggggtcaattctgagcaaacaaactcaggcaattttatacaatacctctcattgagaagcatgagttcgtgatttttttttttaacaaaacaaattaaagaccagtcaaggggttcttctggtttgtgagtggcttcatctcttatttggatgcttctcagtgatgtttctgttgggaggaggtgcttggcattgcctttcagaggccattaaaaggcccctctggttcatggctcccactcgcctttgtgatggccaaagaatgtgtggggttgacattcttcctgaaactaaatccggtgtcacttagaattagggtctctttttaccctaattccatctcagcttgcaggcaatagagtaaaaaatttgaggccaggcgcagtgactcacgcctgtaatcccagcactttgggaggccaaggcaggcagatcacttgacgtcagaggtttgaaaccagcctgtccaacatggtaaaaccccatctctattaaaaatacaaaaattagccaggcgtggtggtacatgcctgtaatcccagctactcgcagggctgaggcacgagaatcgcttcaacccagaaggcagaggttgcagtgagccaagatcatcctgctgtactccagcctggacaacagaatgagactccatctcaaaaaaaaaaaaaaaaaaaaaaaattgagaacatcttcctggttttcaggcctagactgacctaaactaaagtgttttcatttgttgcagtgatgatggtggtaatggctccctcaaggggccagtcacagagtatctgctgtctctttggtaagagggctgtctcagccagtcagggttagtgttagagagatcacgtattccagggagtgtccatcctaccaagcctggagattgttgcttgatctgtatatcccgtgatcaagaataggagaggaccagctttggtatagcatctctgaattaattggcagccttcttcaggacttggcactaatcggacagaaatagacattgaagttctgggaaaattgtcttgcctgagaggctcattattgcgtccaatacaaaggaatttgggcagggaggtcagagttaatgtgcttaatattcagttgctgcagggacccagccaaggaattgagagtgtcctgaaaattactggcctcatttgtttgccttttctggctgtgttcttggcacccatggaggagaaagggatgaacacaatagaaactagaaaaaggtccaggcctgtatctcagggacaaaaagggtttttggtaatcgtcaagaggaattatcacctgattcccagtcaatggaggcttctgccctgagctggctggcaggggtcactgccttcttctgtcactccattattcatttgttcattcattcagcaaagcgcttaccatggacatgctgtaaacctggaattgtgcctggaaaaattccggagaattttgttacctgtgatggttaaaatattcctagaaataaatgactgttgatctaagagcacagaggcttaacaattagcaaactcacaatattgaaggctcccccactgccagttttctttttcttaaattataatttttattttgaggaaattaaaaataatacgaaaaaggctgggcgtggtggctcacacctgtaatcccagcactttgggaggctgaggcgggcagatcacaaggtcaggagatcgagaccatcctggctaacatggtgaaaccccatctccactaaaaatacaaaaaattagctgggtgtggtggcgggcgcctgtagtcccagctgctcgggaggctgaggcagcagaattgcttgaacccagtaggcggagcttgcagtgagacgagattgcaccactgcactccagcctgggtggcagagtgagattccatctcaaaaaaaaaaaaaaaaaaaaaaagacgaaaaatacgaagaactaggtaacaatcacccaggtccccactacctcaaatcaataattgttaacatttggttattgctaacaacatgtcttcaaatattattgctttaacataagaatgaatacattacagataatgtttaaatttcctcttctctattgccttcaacaccccaccctctcccgaccaggcaattatagtaatgaattttatgtgtttttttcttatgcttaattcctagtctcttaacttttacatatagatttatgtgtccataatctgtatgtgttttaatttttgtgaattttattatattttaaatttcattctgcatcttgcttgttttcacttaacattatgctttggggctttatatatgtttataactagctaagtattacatctaactccatccatccatccatccatccatccatccatccatccttctctctctccctgtatctttgtatctatatatgtatctatctatctatcgatcatctatctatcatgattatctatttatccatccatctatctatctcttcatcaccattatcatatttatgtatctacctgtttttcattttgctggctgcctattttatatatgtcctatttcatatacttagccactcagttttcttgcctgattccttagcagggatgatattcaaaatatttaacaacccatattgctgagaccagcttggtcagggagaccctaacctatcagcactagaggaattaaagacacacacacagaaatatagaggtgtgaagtgggaaatcaggggtctcacagccttcagagctgagagccccgaacagagatttacccactatttattaacagcaaaccagtcattatcattgtttctatagatgttaaattaactaaaagtatcccttaagggaaacgaagggatgggccgaattaattgcagcaggaacacacccttaagacagagatcactaatgcttttgtttgtggcttaagaatgcctttaagcggttttctgccctgggcgggccaggtgttccttgccctcattcccttaaacccacaaccttccagcttgggcgttagggcaattatggacatgttacagtgctgcagagattttatttatggccagttttggagccagtttatggccagattttgggaggcttgctcccaacaccgtatgccccaggcaccaaataataaaaacatatgatggcctagtcagactaaacctggccaagaataactggtaagcccattatactggttcataccagctgactagtagcttacctgcaggcatttcattttgcaaaccctgcactaacaattccttccaacactgactatcttatgaacaaaacccttggagtttcttcctcagaaataccttcccttctgatgacctataatcctccttcatctctgcttgtggaaatctaagcatccttttaggccaaattcaaataccatttcctgcatgaacgactctgggatctctaagacagattttaattcttcattctgccttatgattgcgattatatctgtagtgttatccatggattgaatccttcagtggactgtgagtttctcaaagcttggatagctccttacttactgatctctgtaactttgtttcatctccatctgtcactcaaatgtgcacataagctgatgcctgggatacatcatacctacccttgttaagttggcagagaattaacggtggattctacctggcatgggggcattaggagtgggacatatatgatacagcatgaagatgtcagtgccccaggttctcattcatggacactttccaaagtgttcctcggaaataaatacatggtctttaatggtctttggctctgagacagcttgtcagagcaccatggtttatagtatggcagagtgacattgctgaaggtctctctggaaggagctgaaatttcagatgtgaaagtgatttgagaaggtgcagcagggatgtctgttaagagctgggcagcatgggacagtgagcaggacactggctttggagctagttgctatgttctgtgagcctgtgcctagaaaccagtctagaaaactgtgcatttgaatcccatcatttctggagcatggtgggtgctcagcaagtatttcctaagtgtgtgaatggatccaggtagtcctgggttccaattgctaatctagactgagtgtcagtttctctctctgaaaaatggtgaagatattgtctacccttgaggattactgaacaaaggaggtttcatacgtgaatagtgcctaacacaacctcgaagactactaggactggtaggacagcattattagtgaccatgtgataaatgcattacacttattaatataggttagggcctttacatatgttagggacaaacacctaggggccagcaatacgtcccagtggtattttagttgtgtgatactggaaaggttattttattttattttttgagacagagtctcactctgttgcccaggctggagtgcagtggcgagtgatctcggctcactgcaacctccacctcccaggttcaagcaattctcctacctcagcctcccgagtagctgggattacaggcctgcgccaccaccacgcccggctaatttttatatttttagtggagacagggtttcaccatgttggccaggatggtctcaaattcctgaccttggtgatcctcccatctcggcttcccaaactgctgggattatgggcatgagccactgtgcctcgcctattttattagtttttcaacactctcagctttagtttctgcatctgtaaagtgaaaacacataaatacacataaatacagcagacgtgtgtttggatacctgctgtgagatggcagagtgggccgaatggtgaccttccagaaattccctaatcctggaacttgtgcctgtgactttatttggtaaaaagggtcttgcagatgtaaccaagttaagcatctgcaggtaaggagttcaagttcattccagattatctgcctaggccctaaatctgctagcaattgttctagaacagacacgcagaagagagacatgcagagaagaaaactggacgaaatgtgaccacacggcagagatcctggagccaccagaagctggaggagacaagggatgggttcttccctagagccttgggaaggggcatggccctgccaacagcccaatttcatacttctggcctccagaactgagaggaaaaaagttctgctgttttaagccactcagtttgtggtaatatgttacagcatcatcaggaaactgacaatcagtttctgtattctggctctgcgggagccttttgcatattataggtgcttactgaaatgcccttaaaaagctcacagtcagcctggtgtgatggctcacacctgtaatcccagcactttgggaggctgaggtgggcggatcgcctgagatcagaagttcgagaccagcctggccaacatggtgaaaccccatctctactaaaaatacaaaaactagctgggcatggtggtgcgtacctttaatcctagttactcaggaggctgaggcaggagaatggcttgaacctgggaggcggaggttgcagtgagtggagatcacgcaattgtactccagcctgggcgacagagcgagacttcgtctaaaaaaaaaaaaaaaaaaaagctcacaatctagagctgggagatgacacattcaccagtaatacagtctagctggtcaaggttgtgatagaggggcacacaggaaggtcaggcaacctgacagggaggtatgtgtgtgggtgttcctgggaatacttcctggagcttttctcagctgagccctaaagagcaaggaggaattagccaggcaagaagagaacaggacattttattagagaaatcaacatgcacagaggcatgagacagcaagaacaggcagtcattcttgtcttcttaattcctgggaaggtcagatagccacctagaacagtgcttcccaaaaggtgaggtgcatgtggatcacctggaggattgtgctaaaatgaagaaaaacagattttgagtaagtgagtctggggcaggcccagagatcctgcatttcttacaagctcccaggggatgccgatggtgaccacaccttgaggagcaaggccttagtacactaaagtctacggcacttttgcccatttctttctttcttttcttttttcttttttttttttttttgagacagagtttcactctttttgcccaggctggaatgcaatggcgtgatctcagcttactgcaacctccacctcacgggttcaagccattttccttcctcagcctccagagtagctgggattacaggcgccctccaccatgcccagctaatttttttgtatttttagtagagacggggtttctccttgttggccaggctggtcttgaactcctgacctcaggtgatccactcacctcggcctcccaaagtgctgggattataggcatgagccaccgtgcctggccatgtttttgtatttttagtagagatggagtttcaccttgttggctaggctgatcttgaacttctgacctcaggtgatccgcccacttcggcctcccaaagtgcgggattacaggcgtgagccaccgcgcctggcccacttttgcccatttcttatctcatttaagcttctccctctcaagagggagcgagatctgcagctgtgaaaccagatgctggaagaagggaggtgctttgctcaaggtcacacaggctgaaatgttatcattgattttagaacctgggttttctgactttgaatacactgttccttttaataactcatcatacaatttcagtatgacataggaataaggactagattttgatttttgagccagtctcagggtctttttctttcagtagattgtttatgtcacatttccacttgttgatctaaagtacatgtttattaattagtaataataatgatcatttatattataggcaatgatatattaataaaccatccaataactactaacaatcattataatcattaacaatcgctaatcattaataatcacgaataacaaataagttaattataattaagctgtcactctttatagtacctcccaaaagatgtggcagcagtttatttgctgttttcttcagaggtctgggggtgaactgggctgtatctgatttcttcccctaatcagagccctagaggactgttcgatggatcttacgtttagctcaaggtaaacatgttaccaagttcttggctaactagttatttcaggcaagtacttaatattgaaagggagttaatagttttttgttgttgtggattgcatgagatttaagctgtcatctaagtccaccttcaataacagcaaagatgtacagttttttagaagaggagtggtggatgatctcggaaagatggggcagggactccagaaagaatgggaacatgacagggagacataaagggaggaggacagtgtggtcttaagggcaggtgggcatggggtgatcagagctggcataaccttagagatggcaaaattacagctggtcacgagaggaaggggacagataggtgtctgcaagtagcactggaagtggattaaaagaaggaagggtgcagatatgcaattagatatataaatatttcttatctttggccaagctagtttgaacgcagagttactcgcccaggaaccccatggggctgttgatagtagtgcagtgaaagctgatagattccattttggagcactggagccctttggcttatctgcaaggacctgttaccaggggactttttaacaggggattgcacagcaaacatctgttccttccccacgaaaaggatgaagctggtgacccctgtgcaccaccaggctgcatggaagcaccatattcatagtgccccaaaggtttcccatggtcgtatgtagggcggagaacgctggggactgagagaacatattttttcacataaatatttatgtcaaaccaactctgctaagaaggtggcaaaacaaggcgtgaaaacacaatgagacagagcagcctgactttttgcaaatatttatgagacaggaaaatgctgagagagagaaatagccctggaaggttggcaaagaagggagagaaacacccaggatgccccgagctgtgggaaggctgtcttcttagaggaagaatgcgtagaggggcagggctgattaaataacaatactgttagcgagggaagaggattgacagcttttctgtgccttttaaatgcctgtatgacagtcagattgctaagcacatagggttcttcaggagactttcacagcccattttacaggtggtcagggggattaagaactttttttaagctactcagctgccaagggagagagctgtgattctgttcatatcagcttgtttccagcctctaggagtcttcccatcactatactacagttccctggcccactgcagggctgggcagtagtgtcataggcgattaaaataacctggaggctgaggtgcgagtattgcctgagcccaggaaggtgaggctgcagtgagctatgattgcattcattgagccccagcttgggccacagggggagaccccctgtctcaaaaaaattaataaattaaaataaataaataaataaaataatctgggctgggcatggtggctcacgcccgtaatcacagcactttgggaggctgacgtgggaggatcacttgagcccaggagttcgagaccaacctgggtaacatagtgatctcccctctctacaaaaaattttaaaattagccaggtgtggtggtgatgtgtacctgtggtcccagctacttgggagattgaggcagaaggattgcttgaacacaagtgtttgagactagagtgaggtatgatcgtgccactgtgcttcagcttgagtggcagagcaagaacccatctcgaaaataaagattatttgtctctgcattctgtgcatttcctgtaataatcttatattacttttttaactgaaaatataaacattaaaatattaattcaaaactctaataagcagtctaatatacaaataattattcttaatataccttttttgaataagcaatatctgctctgcaagcatccacaccaaactgcatcaatgctaactccgtggggatgggggcagggaaggggaatgggcaatttcaaagcttcattttgtcagtttttgttcaaattctttttacaatgaacactattgcttttataataggtcacaacattaaacacctatacacacatacacacacacacacacacacacacacacacacacacacacacacacacacagaacaggcctacataacagacataattagcattcttccctctcagcctgagtttcctcttcgataaaatgataataaaagcaatcccgtgaggattgagtgatactgttcacataaactacttaccacagtgcccagcacattggaaactctcaatccatgtcagatgtcatatttttagctgacagcccattgcaggagtccattgagtactggtcgggggatctagcacatgccttgcccatagtaggggctcaatgcttttgttgaagaagtaaatacactgggactgactctggctttgagagtaagaaatccagcctttgtgaaccattcaggtttaggcagttgtcagtcactgccgaattcttttgctgctgctcagccaaggttccccagaagtcctcttctgatatccctttaggacacggccacttcttgccaagccaccaacaattgttcctgcctctggcaagcagttatcttcagagggacgaaacaatctcatccttcctaaatgctggagagaatgcaatagaaaaaaatctctgtgctacaggaaggcagccaggctgtgatggtcaagggggaaagagaagctcctaagatgtttgcatattttctcgagaacaggttgcaaaagaaataggtagagtgtcacctggatttgaagggttgtatagagttattcaaccccagttttctataaggagcaaacaggcaagcataattattggctgttgcagaaaaaagggggagaaggacattgacattagcagactgtctgttgtgccaggcactgtgtttgatgcattaagtatgttttcttttttcatactcaaaccatattattaggttttaagatttaaaaatattaaaaagggctgggcatggtgattcacactggtaatcctagcactttgggaggccgaggcaggaggatcgcctgaggtcaggagtttgagacaagcctggccaacatggcaaaacctcatcccaactaaaaatacaaaaattagccaggtgtggtggcaggtgcctgtagttccagctacctgggaggctgaggcaggagaattgcttgaacccgggaagcggaggttgcagtgagccgagattgtgccactgaaccccagcctgggcgacagagcaagactccatctcaaaaaagatattattatcatttctgttttatagatgagaaaccaacttgcctaaggtcatgtaatgcaaataaacaggatagaactaggatttgagaactaggatatctatttgggtccaaatcttcctgaggatgtatgggagacagaaaaattaaaaagacaagttagtaaatggatacattagaatatggccaatttgattttctgctatcttgggaagcggggcaggcaggaagagactttgttattcaacaaggataaattcattcattcatttaggagctgggattggcttgggccatgggtggcaagaagattaaatcttgagtgcctagtctaatccattgggagtggctgctcgatgggaaattgattaatggtgcctgttaaggatatgaaatagagattagtggtctagttgctatatccttgatacctactcatgaagaagagaagtggctgttctaagtaacacaggaagaagtgctatactgaatggcacagataaggtgatggtggattctatctttgtgaaaacaaaggtctgagatagatggtgaacacagctggcagtttctgagaatcccatgaggataggtaaaggcttcatttgagatagtgaacttataattcttgaactacctctatgggaagcagcccagtctggacaagagagaggcttaaagaagaatccaggaagcaagcccttcttgtggcaaagtggtagctaacagtgggactatgggagctagacaaggccacatttcaaatcctggctccatcatgtatgagctgtgggaactggggaatttacctctctattttcaaccacaaaatgtgaatactgcttctaactcttggtgttgttctgatgatgaaatgagataacattattaaagtgctttgcacacaactggcactcaatgtatgactgttcccttttccatgcaccgcatcgtatcctgcagctgggaatactccccctgtgaggaaagtcctaaccggaagacacttagcctagcccttggtatacaggtgactctaatgcccccttcccatgactgaacttcaggggccctttactattaatagaaactgtgttcctaattcctctcccactgtgcagtcaatttacctcttaaagcctgacagaggcagcatgcaggaagattgacaacattgctcacactatttgaaggttccactgtgtgttgaaaattgtctaaatggggggataatgaacagtcaccaaattggagctttctgaaactgagaggaaagaaaggctttggagagaggttgccatcttaccaaacatattagccagggtagggagatggaggagggatggtgtcagttccccaagcccaagaaaggttggacctgttagagtatgaagcatctgggggccgttcactgttagcagtttatgtgattactttctagggaatgctgggatcagacagggatgggcacaccttggactctgtgtgccccagacaggttaatgtaactgtgagcccatgggcatccaccatgatctggactgacctgacatgtgaagacaatcctaaaacttatatggaaccacaaaagacccagaatagccaaagctatcctgagcaaaaagaacaaagctggaggaatcacattatctgacttcaaattatgctactgagctatagtaaccaaaatagcatggcactggcataaaaaaaagacacataaaccaatggagcagaatagagaacccagtaacaaatccacacacttgtggtaaactcatttttgacaacagtgtcaagaatatatactgggaaaaaggcagtctcttcaaaaaatagtactgggaaaactggatatccatatgcagcagaatgaaatgaatccctctctctcaccatataccaaaatcaaatcaaaatggattaaagacttagatctaagaactcagactatgaaatgactacaaaaacatgagacacaatctccaggacgttgaagtgggcaaagatttcttgagtaatacccaataagcacaggcaaccaaagcaaaaatggtcaaatgggatcccatcaagttaaaaagcttctgcataacaaaggaaacaatcaacaaagtgaagagaccacccagagaatgggagaaaatatttgcaaactatccttctgacaagggattagtaaccagaatatataaggagcacaaacaactctataggaataaaactaataatctcataacaaatgggcaaaatatttgaatagacaccactgatttttctgatggcaacttccctaatgggatgaggtgtcctgggtggaaggagtgtctcaaatcctggtttcctgttttattagcagtgtgtctttgggcaggtagcttcacctctttgagtctctacttctttcctggcaaacgaggggtggtaacacttatctcacagaaccattgtgatggcttacagtcatgaatttagaaactacaagtgtaatttgccacattcttactttatggtggatgagacactatattagtctacaatttgatcaacaatcatgcaatgtaggttacactatccactcttgtaaaaatgaaatgttaagcctcatagagttggtgtttctcattcaaaacctcacaattagaaaccaaaatctgtttgtctccaaacttgatactttattccctctacacaagactaccttgacattaaatgctgctgacggcaaaacctagtctgatgtaagaacatcacaagtgctcaagaaatatttatttgtttattgttcattgattgattcacacaaatattgagcattgatcagctctgaggctgatgttggaccttagctggttggtatctaacattactggctattgactgttaccagggtcagagtacagaagcaacctgttttctttttctcttaacaatgattaataactatctcagaaatggccatcaatatttgcaattggcaggaggtgagaaggaggtgaaatccaactcattgacatattctagctactggcaatcccttagtttcttatagcctattggaaactcagtggtatatggaggctcacaaagattcggcagccccatgtgcatagatcagtttgcacagcagtttggagagggatgcagaggctgcctgagaggaagccttccctggggccctcctccaattcctctatcataacgctgacctcactgctgtcatgatctgttttcctctttgctcctctactccagctgagtatgagttcctggggtcagatacaatatttaattgatctgcacataaccaaagcattgcataaggtcaggcaaagaatgggcagttaatcagtgcagagagaggaagaggaagagggagagagagagggagagggaaagagagattgagggatggagagggaaggaaggatgagagagaaagggagattgaaggagggggagagagatggagggagagagggagagagaaagagactgagggagggagagagggagagaaagggggaaagagagagagaaagagagacagggagggaaagagatggaggcagaggggtggggagagagagaggtggagagagagactgaggaagggagagagagagagactgagggaagaagaaagtgggagggagagagagactgagagaaggaaagagagagtgactgagggaagaagagagagagagggagagagagctgagggaaagaaagagactgaggggaggagagagagagagagagctgagggaaagaaagagagagagactgagggaaagaaagagagagctgagggaagaagagagaaggaggaggagactgaaagaaggagagagagagagactgagggaaggagagagggagagagagctgagggaaggaaagagagagaatgagagaaggagagagagagagggagagaaggaaaaagactgtgggaaggagacagagagagccgaaggaaggaaggagagagactgagggaaggagagagagagggagagagacagctgagggaaggaaagagagagagactgagggaacagagagagggagggagagagagagagagtgaaggagggagagagggaagggggagagagtgagggtgggagagagaaagaaagagggagagagggaaagagagggagggggagaaagaatgagtgagggagagagagggaggtgggagagggagggagggagagaaagagatggagggagagagagagagtgagggagggagagagatgaaggggtgagagagtgagggagggagaaggagggaaggagagagaaaagagagggagggagagagaggaagagagagaaggagacagaggaggagggagagagggatagggagagagagatcgagggagggagagagagaaacaagtaaaagaggaaagaaaagagagaaaacaagaaaaggatagagaataaaggaagaaaagtaaagagaagcggaacttggaagggaaggagacagagagaagagaaggggagggagagcagcttgacaggtcagctcctgcagagtttctctggctgtcctccaaaagatgcactcttaagctgtaaacatgcactgggctccagggtaagcttaggaattttttattccagaagacccaattctctgtaagcctcagtccccttgtctgtgaaatgggcttaaccacgtctatttcacacagttgttgtggggattaagccataaaatcacagtgaaagagccagagctcccaagcacaggaggctgaagtccagatgtagcgctttggagagaagctcacagggagaggcctggactgctgggagagcccagcttctgatgctgacctcttagcccttccagttctaagcactgcgattgttcaattcttttattagatgcttttctctggctcaataggcccacgtctgtgaacgggacctttcctggggtgcatacagactgtgctattttgaattctgcatcattaagataattagatgcccagacggagtttaaatactattaagagtttggtgtatactggctggccctggtgacagagtcacttggggacacagtctctacttcctgctgattttctgagcccagaaccttgattagcacaaaaaggctctcctgggtgaaggaaaggaagggaagagaagacaggtgacatatttttgggcccattcttagtgccaggtgttctgcagggaattctatgtgcattgtctaatttaatttcgcccttctaacaaacctatcaggtgttgtgtggttgctcccatttcatagatgaagaaacacagtggtggaacagagggtaaatttgtgtgcttccaacctagcagctaggaggctccattggctcggtggccttgagcgcttttctttacctctctaagcctaaattttctggcttgtggagtaaagacaataataatacctaccatgtaggattggtaagagaatgatcatgactgagatggggcatataacactcttaccacagtgccagacagctggaaagaattaggtcagtgttagttaacatttttattcatgcccagattgttgggaccaaaccttaggtttgattctatgactttgtgagtctagcttatgtcccactgggaggcagacttgggtcccacatgtgtatgggagctgaaagtccctgatcctgtttaggatatgagcacttttggttctcctcatgctgttggaattcattaggaattcatttatgctgtgtctgtgtacgtgtgttgtacccatgatggcacaggaacttggcgctgccatatctgtatatactttctgtgcttgttcatgtgcaaatccacctctgtggggataatagaattaatatcagaacaaaactttgctgtttacagaagtggttttgtggatatgcttttatcttgtctttccaatgactctatgtcattgccatttatattgcccttaacttgccaatatttttgtctacaaatgttatctgagcatcttctttatgtcagacattgttctagaaagaagagtgaataagaagacagagttattgtcttcattttcattgcagatgcttctgtttcagtgacagtgaatataaaagaaaaaataagaaaattttgtggattaattagaactctgaagaagaaaaacaaccccaaattctcaatgcatgtatataattgatgtttatttctcattcacagtacagtgagctttgctccaagcagtcattcagggactcaggcagctttcatcctctggctccactattctcctaagttcttggagtcctcctctaggtcctctgcatctgaccagcagacaaggggagagtgaaagactggggactagatgggagggttttagtagaccaagcttcgtgtgggaaacataacttctatctacattccattggccagaactgtcatatggctatacctaattgtagagaagcctggtacatctggtctagctggtttcctaggaagaagagggaaccattttagtaaagatgcatacaccctctgctacagtacacaggtagggctgtgtttatgctccctgtggatgtgtgttcacatggctttctttggagggctcagaggagctggtctctgcaagaaaaggatgcatcttcaatggatggtcccatatgttcagcaggggaagtctgacctctagacctgcctttttcacaccatcctttctcctatttaccatctcttaccccatgtccaaccagagactcagatctattgctctacttgtgtgccttctttccttctcccttcccagagtgaagctcctccactcttgtgaatccctcatcactccacagaggctacacacaactgggaacccagctagttttttgtacctttgaaacattcttcgccattagtagcagtcattgtaatgctaccacttaagttgaatgaccctcacaattttcaaagaactttcatgtattgaaatttcttcctcaagatctatttcatgagaccccaatgaaggtctattggcaccatgggctctctgagcacatctgtatgtctggtgactatcatgggtcctggcacacaatgggacatcaatatgacatagccaatgaaaaaatgagtcaatcattgattatgtcttatttaatccttccagcaaccttaagatttaagtataattctctctccttggttcatattattctcagggaagaaaactgggactcaggaaatttcatagctctcccaaaatcacaacagtaataattggtgggacttggattcaaactcaggtgtgcttcatccctaattctatgtttttttgtttgtttgtttgttttgttatgttttgtttttgctacatgataccatccctatcatttaatattgataccacatccttatatttcttggtacttttccaaagtacttcacatatgtgattttatcagagcaacacagagtttcagtgtagtatataacacaggtatgactttttattttcataggtttaggtatgactttttattttcataggtttaaaaaaatcttctgcaatgaaatacatctacactagaacttagcagactttttctgtacagagctggatagtgaatattttagactttgtgtaccatgcaatctctgttcaacccctcaaccctgccacagtagcacaaatgtggccacaggcaatatgtagaagactggtttggccatgttccaacaagactttatttacatatgtttgttggctgcatgaatgtcttcttttgaacatcactgatcattagagaaatgcaaatcgaaaccacagtgagataccaactcacaccagtcagaatggggattattaaaaagtcaagaaacaacagatactgatgaggttgtggagaaaaaggaatgcttttacactgttgtgggaatgtaaattagttcaaccattgtggaagacagtgtggcgattcctcagagatctagaagcagaaataccatttgacccagcaatcccattactgggtattatatacccaaaggaatatgtcattctattataaagatacatgcatgtgtatgttcattgctgcactattcacaataacaaagacatggaattaacacaaatggccattgatgatagactggataaagaaaatgtaaaaaatatacatcatgaaatactgtgcagccatagaaaggaacgagatcgtgtcctttacagggacatggatggagctggaagccattatcctcagcaaactaatgcaggaacagaaaaccaaacactgcatattctcacttacaagtaggagttgaccaataagaacacatggacacatggcaggggtggacaacacacactggggcctgttgtagaggttgtggggaggggagagcatcaggaagaatagctaatggatgctggggttaataccaaggtgatgggttgatctgtgcagcaaaccaccatgacacatgtttacctatgcagcaaacctgcacatcctacacatgtaccctagagcttaaaagttgatggaaaaaaaaaggttttatttacaaaagcaggtgacagccatatttggcctatgagccacacttcttcaactcctgctctatacaacccccaaggagtgaaaatggaaaatcccaaaaaaggaaaatcatgactgagagtctaaggaacttgcctgaagcctcacaacctatttgggacagagttctggtcctgaatccatgtttcttgcttcctaagataatgttctttccatgataccatcctcccttattaaccactgtggtggaaatagacgctgatcccggactcatgggtttgccatttgttctccctaattacaaacattagtcactgtttagtcttcagtcctgacagcttttttcctgcaaaaacctatacaagtgcaaactccttgctttgctgagttctaatcacagcgacaagcacaggacaatgtgtctgtttctaaaaatgaatgtatcagccagaacagaaaccctccctgatttccaataggccagagtggtaaagaatacagatttggaggcagacaatcgaggtgtgaatagcagctctgatggttactagctgggtgactttgtgtgtcttagttgcctcatttgtagaatggggatagtaatagtatccccagaagactgtcggatgagaatgaaaacagttaaatgtaaagcacttagaagagtgtctgatacctagtagatgtttactgctattgctgctaatattattatttttttcccaaaatgggatttgtgacttcatgtatttactgcttttaaacttcaatgcctctaactcagaattttcatacctttggcatgactgacattttggactggataattctttgctgtggggagtgtcttgtacatttttgcagcagccctggcttctactccctagatttggtggcatccacttcccccatctgtgacaaccaaaatatgtcctgacattgccagatgtccccttaatcctagaggcaaaactgcccccattaagaaccagtgggtctaaagccattgtctcctccttgtgattgtttggctacttctgacacatgctttcctgatgaagggaaaaattaacaggcagtaaggaaaggtattgaaagcaattatcttctgagtgagaccctctcactgataagatgaattgaaggtctttggagaaaaattctgggaaaaagtgaacaagttgtaagaaacttttctgttataaaacaaaaaattagggatggctcagaacttctagatcttccccatgactggggtggggccagtggagggacattctgtgtgaccttgtccatcacttggggaaggtgtattaggaaagagtcacccaggtctgatcatgacagagacaggcaaagccatcattttttcattcaacaaaccaaagactacttctgtagctaaaaaagcaaagaggaatgagatattgcctctacattccagaaactcacaatctagtccaaggaggccaaaacgtagacaaataaggtgagcagtcccccagactgggactacagagctaggtggaatcttagatatgtttttatttttctggatcttgatttctaccaagtataaagggattttcattgatgtggaggaaagtgtgcaaatgttgaaattcctagcctctctcatgatgaaatgtccataagattataatcaaaggctcaagaaagagaatttgctcacaaggaatgtccataattttcatttctcattttcttgaaaaaagtaatagtttggtaagtagtgggctgtttaaacttggctcattgcccagtggtgtctttatcaattcaggttcccagttccttcccgaatgctccttacatttctatagctctggccattggcataggcagggcaccagggtgagatatttctctgtccccacatctcaggttgatgagtgatgcaagccccattgtatatgaaaagcggactattttcttcctttcctgaatgccagtcccctccagctgggttggctggtttcccctcacatttcgcccacattacccaagggaagcaacgtgtcaaaccaggctataggctttgctttaattgaaagtcatggaagtaattggcttgttctctgtcaattgctacatcttcatcactctcattatcatcaattctatcaactcgttcattcattcatttagcaaccattcagtgttaaatcaaagggggtgtgaaatggaaatggttcactttggcagggaagaatattttatcatcgacattgtttcaaattgcttgtgcatggtgataatataaagcagataaaatcttagtgattctattagtgtttaaaaatttcctactgacaatgtactctatgcctgcactaggagcagactctacaatcatcttgatctcgatacactactgctaccatttattgagtgtccactaggtgtaagaaactttgttagaatctggtcatacacggattgctgcacaacagcacagtggttaagaagtgggtagtagcaccagactgcctgggtctattactgccaagtgtaaactaagctacttaacctgtctgggtctcagttttctcacttgtgaaatagggaacagtaataatacctatcttaatttaatttaaaattaaataaaataatgtacgtaaagcacatagcacaatgcctggcacacactaacatctcagtatatgctagctattatttattccagtaaatatttgttgagcctctcttgagtgcctgacaatgtgcaagggactggatggggatgagcaaaatggtttcttcccaggccaatgggggagagaggaggggttatttctgcctatggagaaggggtgaggaaaattttcacagagtagagaatatttgagttaaatcttaaagaagggataggatttttttgttttttcaggaagggaaatgggtttgatgtggccggagcaaaggtgaggtggaggtgagtatggtgggagacgaggctggagagatgggcaggggctgaatcatgtacagtcttgctgagaagcttgggctttatgcctcgtagttgatgagaggtgtttcagtcagtctaggctaagttatgttgccataacaagtatcctcaaacatcttggtggcttgaaacaacacaagcctatatctcacatatgtcatcgtccaatgtatggagtgcctctagctctgctccatgggcctttactcaggaatctatgctgaaggagccaccccttcagccacctgtgggacatcctggactcttagcagagagggaaaaagagacctgcaatgactcttgaagcttctgctcagaaggtacacatttcacattcactcagatcttattggccaatgcgagtcacatgactcagcttgctgtcaattcactggccaaagcaagtcacatgactcaccttgctgtcaattcattagctaaaacaagtcacatgactcaggttgccatcaatgggagcaagaagcaattcttccatagggaagaacagcaaatgttttgaacaacaacagaatctactacaggatatcatgatcagatctggattgtgaggagcaaatgtatcagcaggtatgaaactgtcacacattgtaaagctctattcaaataccaatagttatcactagttttggtaattagagatgcaccacctggatccttcttcaaaaaagaactttctgcacagcttcaaggagtgtgatcagcagatagcctgcaactaacagctccttcatctgtagagatctacatcatcatagtctttccagggcagccaacatccaatcactgaatgcggcatatatacaaagtttggcccattcttgccagaaggaggacaaccccaatggacaatattccatccagatctccttgctgggttgtcccatgctagcctggttgcagttgaacttctccctctgcccaatcttgttgcctcagccttcctgtcacaggtgttgattccttgcttaatgtattgcatcccaaattgtatctcaacatctgcttctggagaactcaatctttgaccttattataatagtaataataatcataatataattacttgtatagtatacagtaacgccaacagcaagatagatgcaagggccagcaaaaggaaacaaaccagattgcagaattagtaattaaggcaatagattattctttgaggtttcatctggcaaaaacaccattttgttgcttaagggttttgtgcttctggggtagatattccagggctccactatcaggtcctttctggaatcaaccagaagctgacatgtcagtcccaggccatttgaaactgagagttctgggccaggaatagccctttaagagaacacactagcttttagctgccaaagttctctaagaatatccacgctgaagcatatgctattctgaagtctggttctttgtttaaattagtaatatctctcttgatgtctctgtttattagaatatagtgggaaatgacccatgtttcaatctagagagacttgggtttgaattctagctcttcatctactacctgattggcagtgggcaagtcacttaacttgggcacttatagggcaatatttaccctataaggtagtctgaggattaaatgaactattttataaataaaaatttcttgccaaagtgcatgtcacatagtaggggctcagtaaatgtgcactttctctgctttctcttcttttcgttgtgtgaaatatacagtttccttcttttttttttttttttttttttttggagtttcgctcttgttgcccaggctggaatgcaatggtgtaatctcgactcactgcaacctccacctcccaggttcaagtgattctcctgcctcagcctcctgactagctgggattacaggtgcccatcaccactcccggctgattttttgtgtttttagtagagaaggggtttcactatgttggctgggctggtctcaaactcctgacctcaggtgatccacctgccttggcctcccaaagttctgggattacaggcgtgagccaccatgcccagccaatttccttccttaataggtagtctgatcacttcacctgatgactctggaataagagtcctttctactgataagtccacaccatgtggaaaaattacggcagccttttgttccctcctatgcccagtaaaatttttttttgactaatgtctcattgaaagatgggttaaaagatgagaaggatttcctcttagatgcaagctcttctcggtcattggcaggttcctaaggagttagattgagaaggtttctgcaaaagcttgtaggttctgcaggaaacagaacaaggattaattattgatgtctgtctccgagtagaattaggaagtgatgacacacatgataccaccttgcattctccatggcatttcaacagaatgtatcctttccctttcaggagttttcaagcctgtctcagcttgtgagaagtcaagtccagttttgccttggcaacaatcctaaccttctgtatctggccagatggagttggatgaaatatatttgttggctctgaaatgggaggcagatagtggaatccataatagatgctgttgtgtggggatcctaatacggcagtagtgattggagtctgagttcatgaaaaaatatgtctcaagaaacctggaaaatgaatgagtgacccccaagttgagataagtaaaagatcaactcacttattacatctattagcataaatagtgttgaattgatcacactagggaggctcgttagagagcccataacggaggatctaatctttttatttttttttttttgagacagagtctcaatctgttaccaggctggagtgcagtggtgagatctcggctcactgcaacgtccgcctcccgggttcaagtgattcttctgtctcagcctctcgaatagctgggactacaggtgcatgccaccacgcccagctaatttttgtatttttagtagagatggggtttcaccatgttggccaggatggtcttgatctcttaaccttgtgatctgcccacttcagcctcccaaagtgctgggattacaggcatgagccaccgcacctggctggaggatcaaatctttaatcatgttccctgcctcatttctttgatcatgcatgctgcatctaactattcctgggccccagttcattcctcttcctatggctttgtccagctgtttctttgcctgaaatgccattttctcactctgttttcatggctaactcgtatttttcttcaggactaagcgcaagtagattcccaaggatgctgcatctcagatgttacatgaatgatagttcacacagataatttggtaaaatagatttctgggctttagctccagagattctgactcggtgggtctggggtaaagcctgagaatttgcatttatgcacacccaaaagtgatggtgatgccgctagtccctgggctatattttgagtggctgtgctctaggactttgcttctctacctgtgttctgtggactagcaacagcagcagcatctgagagcctgatggaaatgcaaaatctgaggcctcatcccagagcaactgaatcagaagctgcattttaataaaatgtgtgggtaactcatagattggaacttgagaccaatggtccaggaactcttctttgaccttcctttcctagaataggtgcttacattttccacagtgtccttctcctacactgtttcatccttatcacactattataatcaggatggctactttttagaccttaagcttttgataacaggggcggcatcttcatcactgtagattcatctcctatgacactgcctggcatataggagattctcagaaaatataaattgaatgaacagatatggcagcccccagaccttagactccacgaactacccctcctctcagcctcattcaagttgtcttttgtagactcttgaagaaagattttccttagtggttcacaattatggatggatgtctcacaaggggagtctttgagccgtttaggaggactagagtgttccacacatatcatctcttgttcacatgcaaagaattgctgccctatgagtcattttcccccattcatgtgagcatgttatgaggattcctatttggaaacttttattattttttttttgtaggattcatggctcctgacatggccagagtgtctgaccccttatttgcagtttttaattccatggtacccacctttacctttgctttttgattcattggacatcttgggcttggagcatctattaggacaccctgaagcattgcgggatggaggggaggaagatgtagctgatgcaactcctatcctcaaacgtggggtactaagttgcgaattagaggaatgaagttgtcaccactacagtgccattaccttccactgtggcctcagaaatatcatcctttctgactgttttctcattgcagggttgggttttatttgtaatttgtttcttcacttcttcatttctcttccttaactttattccctctattatctccctccctcccttccctcactcccttcctttcttcttgccatctttcttttctttctaattcccttcctctatctcttccttcttccctctttttttaactttctccatcccctcctctcacttgcttttcctttcttcacaccccttccctccctcccctccctccctccctccgtccctcccttccttctttccttccttccttccttccttccttccttccttccttcttctcttcctcttcctctccctctttctctctctctcttccttccttcctgtctttcttttctcccttcatcccttcctttactttatcggtaaagtagaaccactcccttaaggatttcctgtggagtgccaatatggaagcctgctataaacagagttgccctagttgaagtgtgcatggcatggtctgtagcacgagtctcctccgcattccctgtcttggaaacaattcttcagaattccagatttcgtaaaattcagtttccaaaccactggaattgaccatctgaggtggacattttgttcctaacaatttaaggttcatatgagtaaacaagacaagtcaggttagaacctgttatttggcattgctcagcaaggcagctttaaaactgtcaccttggaacctcagaagaggcaggccttgctcttcagagtcactcattaagctactggctctgactcagttgaggtccctggctgtctatatcctggtggctttgtcacagcctcacccacctctcacctgactgcccagcttggctctggctttatgctttggcttttgaccctcggtcattccttcttgttttgcgagtagatagtcccctcccctctcctctcctctcctctcttctcctttcctcttctcttcccttcccttcccttcccttcccttcccttcccttcccttcccttcccttccctcccctcccctcccctcccctcccctcccctccccttcccttccctttctttttagacagagtcttgctctgttacccaggctggagtgcaatgataccatctctgttcactgtaacctccacctcccggattcaaggaattctcctgtctcagcctcctgagtagctagggtcacaggtgcccaccaccacaaccagctaatttttgtatttttagtagagacagggtttcactgtgttggccaggctggtctcaaactcctgacctcaggtgatccacctgccttggcctcccaaattgctgggattataggcgtcagccactgcacctggccaatggtactcctttctgggggtacctaaacatctccttatttgtccatttaataaatccacccaacacagatttattatagcaagttctgcatttaatttacagcaagttctgcaagttcagacacagtactaggtactggggatgcagggatacatcagacactatccttgccttcagttatctcataatctgtgtaaacatgtgaatagatcagtatcaattactgtgacaagtgcaatgataggaacatgtggacagcagtgatgggagagtgtgaattctgtagggagggtttgaggggtcaggaaaggtttccagctaggttttgaatgaaacacccaataactagactaggaagttagaaggcatttgaaagtatgagactggatgtacaaagtcacagagcatgtctggcacaactgtgggcacttaggattatctagaaatactggcatgtaaagggggaaggagaatggaggatgctgaacctggagaaataggaccagatcatgaaagccctggtgtattacttgaaggagattcatcttgtagatggtagaacaacagtgaagcctttcaccgaatccccttatccttcataattaatcatggaaaatttagaggacaaagaaaaattaaagcaagaaaaaaaaatccattgactttgcatatggaatcctaccatctaaaggcaaccattgctcttattcttgcttatttccttccagtcttttttctacgcaggtttttttctaccatggtgataatgacaatggagagatttaaacaagagacttaaattcagacttgcctattacagcagtcactttatgagctgaggaatagcttgaaccctacacacaatctcaatgaactagaaatcacttatcatcttttgtttttcattttttattattaaagagatgggctgggtgcagtggctcacacctgtaatcccagcactttgggaggccaaggcaagcagatcatgaggtcaagagatcgagaccatcctggctaacatggtgaaaccccatctctactgaaaatacaaatttagccaggtgtggtggtacgtgcctgtagtcccagctactggagaggctgagtcacgagaatcgctgaacccaagaggtggaggttgcagtgaactgagatcacgccactatactccagccaggtgacagagcaagactccatctcaaatatatatatataataaaataaaatagtttagatttacagaaaacttgcaaaggtgatatgaagagctcttgtatcctccttgccctcgtttgtcatttaagtctttcaattaagtagtcaacattacttgctgttagtcaaataaggaaataggcaagtcatggggatttgtctactaacataatggctaatcactgcctccctttacctcctccatcctttatgtctgtaataactggacattgagaacaagagttcacattgacaaccctggagagacagatctgtagatcttccatgctgaagcaggaaattaactcagattgtagaaagattacgcactgcacaagttgaaataaacacagctttctattctacctgaaacaacattacagtgtccccattctaggagcatttctgaggctcagcattgaatccatagccagttcgaggtggttctgctgggtatgactctaggtctctcttgtctacgtgtggactgggcgaagtgggagtctagaaatcattctaatttggctaggaatggggcgtctagcaggcccaagctgcttggtgtaggcacgattacttattaggtcttccctaagcccagatcagtaatagcccacgtgttcccttctgtagctattcagtttgagttccccgaactatattgcctgaggcgggcagtttaattttttgcagtttctgagtttttccaggtttcactgggttttcatgctctggctagatgcaggtaatcagagctaatttattgtacgcttctgtggccagctgcagtgggaactatctaagtaagtaagaaccggtagtcaatactcaaactccaagtcttcatatagagttgtctgtagtttccttgcctctcctgtgaagtctgcaggcaatgccttctttctccttctgccagatagtccttttgatttttcatcatctggctcaaggtaccctgtcttttgtttactccaagttcgttactttattatcatctcattattacctttattttattaccatctcattatttcacagagtgggggggatgtttccatggtgatacagcaaccttaccatgttgaacacactgaaagcacattagcacactggctagggatttatttttagaggggacatgattcaggatgctatagagactgtaacagagctatatggcccttcctaatttccttttttatatatttaatgggaggggatatattcaaattagtggggatgaacttagcattctgtaagggtggatgaagaacctctgtagctgtttccttttattttattttattttattttattttattttaagacagagttttgctcttgttgcccagggtggagtgcagtggtgtgatctcgactcactgcaacctctgcctcccggattcaagcaattctcctgcctcaggctcccgagtagctgggatacaggcgtgtgctaccaggcctggctaactattttttgtatttttggtacagacagggtttcaccatgttggccaggctggtcttggattcctgacctaaggtgatcaaccctccttggcctctcaaagtgctgggattacaggcatgaggtaccatgcccagcctctcctttattctaattagcctgcttacttcatgaaagcttttagcctaacaccacggtgtaccaaggatgaatatatccccgtacctatccttctggaattcagagccatccaggaaggaagcagttacaacagaaggtgatttgaatttcacatgaggcagaggaaaggccagtgggtcagctgcatgggtcccctatgggaagctgtactgtgatctggtcaccatttccctaccgtgctccccagccttagtggtgatccctcttgatgtgatcatgctgcagggactgattcccactagattgatgtataaaccatcatgcaaatatatctctttccattgaagacaagagccagccatcaaacagacaatgcagaggcaaatgaattctcccccatgggccaaaccacataggaagctacattacaatccctgaggcagtaccattggcaatgcttgagctagcttgtcctgagtgactcataaggaccaattgctcacatctcttcccaaatccacattcagtgactttacatcgactgcttatagttgaccatggtggggatatttacaccatgatcattggaaaatcttataaattaggacttattttatcccccagaaatctgattgctgcacatttgtcaccaagagcatttgatctatttcataaaataaactcagttggttaaatagggtaccatatgtttgggaggggcatggtcaatgtctttttcttttacttttctcattgaaggtatggatgatcaagaagccttctgacagatgaattagtgtaatatcctagtatgggagattattttgcagttggaggggctagttcttttttttttttttttaatggagtctcgctctgtcatcaggctggagtgcagtggtgagatcttggctcactgcaacctctgtctcctgggttcaagagattctcctgcctcagcctcccaagtagctggaactacaggagtgtgccaccatgcctagctaatttttgtatttttagtagagacagggtttcaccatgttggccaggatggtctcaatctcttggcttcatgatctacctgcctcggcctcccaaagtgctgggattacaggtgtgagccaccgtgcctggctggggctagttcttgaacatcacctatctctgctctggtgtgcatcttgtattcagtgggtaatttggcttctaggttctgagttctttgggatcacctcactgttggccatgtgcatattacgaggtcggggaaagaagagatggaactaaaaaaatagagagaaaagggttgctatcatttttagtgacttctatcatcttaaatgtctttgctaaacaatagaaatagatttaatggaagctaaagttttatgctgaaactggacttctgttgattttgggccttggtttggacaaatggagggcagcggaagccgccactaagtggattttgctcttcttaatgagggatatagtgccaaaaaattaagtttctttcattagtgaaaatgaggctcctccatcaactttcacattatacaaagaaagaagggggaaaaatctaggcaagagagaaggagggaggttaggcaaagtaaacaattatttttgatttattgatccctgcaagaagatagagcttttggcagaggagggagcatctttcttaattagtgtcatgattttctggcagtgattgacaatgtttcttcgaccctattgttttcttagtgctggctgcttcccatgtgttccttgccaggtggcttgcagaccctatcgcagggatgagagatacagaggattctcagcatctcccgaaacgacaggagcacctgcattgcagcatagtccatttttgaaaccagccctgccctcaaatcccaattctagcacttagtagttatgtgagttgggcgtggtggctcacgcctgtaatcctagcactttgggaggccgagatgggtggatcagttcaggtcaggagttcaagatcagcctggtcaacatggcaaaaccctgtctctactaaaaatacaaaaaaattagccaggtgtggtggtaggcacctttaatcccagctactcgggaggctgaggcaggagaattgcttgaacccgggaggcgggagttgcagtgagccaagatcgtgccattgcactccagcctgggcaacaagagcgaaacaccatctcaacaacaacaacaacaaaaaaaggtagttgtgtggctgcgtggaaggtgctgacctcactgggtcctagattacttagcttgcttacctacaaaagggaataatcgtgatttttgttgagagaattaaagatgaagtgtggagtacattgtatagtgcatgtggaaagtgagttattaataatagtgatggttggagagattaattgcaatctgccagtaggtgcagtactcattaccttaacagatacttactgagcacctactgtgtgccaggcattgttctaaaccctgaagttacatcagtaaacaaaacacacaaaaaaattctgtcttcatagaactgacattccaatacctgatttaaaattcatagtgagggctgggcgaggtggctcgcgcctgtaatcccagcactatgggaggccaaggcaggcagattgcttgaggtcgagagtttgagaccaacctggccaacatggcaaaaccctgtctttactaaagatacaaaaattagcgaggtgtggtggtgtgtgcctgtggtcccggctacttgggaggctgaggtgggagaatttcccttgaacccgggaggggaaggttgcagtgagccgagattgcaccactgcactccaggctgggtgacagagtgagtgagactccgtctcaatgaaaataaaattgacagtggaagtgattatttgaattgagaagatgctggaggtctcagcctaatggactaggctctgaaatgaagccaggtttcctgcattcaggatatgaaaagggcataatccaagcctattaggaggaagttaggtgcatagcttttatttttttttaatttttgtgtttaatttttgtgagtacatgtaggtgtatttatttatggggtacatgagtgattttgatacaggcatgtaatgcataataattacatcagggtaaatggggtatccatcacctcaagcattcatcctttctttgtgttacagacaactcaattgtactctttttgttatttgaaaatgtatgatcaattattgttgtctgtagtctaggtccacagcttttaaagccaacatttattgagcccttggaatgaggcaatatctcattcaaccctttgagatggtttattatatgaagcaacagaagtacaaaaagtttaaaaacttgtccaagaccgcacatcttaacgttgtcagaatcaggtttcaatcccagatgtgcctaatcctgaaatcatgctcttaggtgtattaacagggcaccaactcaatgaatgggatctgttctccaaattcttcttccctccagtttcagatatagattatgggacgaggtttctggagaaaagtctgatttcagtcaattttagtttataagctttataaaggaaagaagcatactttttgtttggcacattctagagcctaaatgatccactggaatctatcaattgctcaacatatttgggatgaatgagtgaatgaatgaatgaatgaatgagtgagtatagtataatgtgtccttattctttctgcaaataagagggacttattgagcacaaaagacagcaagatgcatattgtttttggctgagatagcattgcctttgaggaacagtcagtaaatgggtgagcctagaagatatggtgacacggaagaatggtaggaaataagaaactagcagggccagggtctttgagggtatgataaggagactgaattctatctaagggctgtggggagccactgaatagctgtgactggagcgggaaagagttaagacaagattctacaaccaagggtttgcccaaggtcaggtcataaaatagtgacagcaggaactagaaactttaaggctagggattttttttcttctaagctacactgtgttttcttcattcttacaaaaaagtgtaaactgagctttttttttttttttttttttttttccagtctcgctctgtcacccaggctggagtgcaatggcgtgatcttggctcactgcaacctccgcctgcaggctcaaacaattctcctgcctcagcctcccgagtagctgggactacaggtgcacaacaccacgcctggctaatttttgtatttttagtagagacagggtttcaccacgttggccaggctggtctcgaactctgacctcaggtgatctgcctgccttggcctcccaaagtgtgggactataggcgtaagccaccacgcccagcctgaactgagctttaactctgggctgtttctgctcatgataggctttatggtttttctttttgttttgtttcatttttggacacctccaccgggtgggaaaatcttttcctactgagcatagcttgagagaagctcacatgtgccaagaaatgctactcaccccaaatactttgtgcccagtaaaagggatagttagggactgaggtccgagagggggacagcattctggagaacacttctaatagatctctgcaaatatgttgaagaaggacctagggtgttctaaacattggggaggggtgctcaggactctgcaactgtctttcctggtgtcactgttcacggcatgcacactcacaacatacacacctgccagcacatacctacatgaccttcgtgcccttcccgtacttctggtgcatcacccctgcacatcacatttcctacatgcatttcccacatgtccccgcacacccgaatatacacaaacacatattccccacgctccgtgaagtatgtccaccacacactcacataggcaagagcagatgcaatgccttgggttcacacactctttacacacccctgcaaacacatccacactacacacaccatgcgcagtttccatgacacacccacacaatccatatttttggccatagacatatagcacataactgcatcaaaaccttttcacccacaaaacatatatacctcacactcacctacccacccacgtcacattgacactcatatcgacaccatctcaccaaagcaaaccacagtccacattcactctatatctattaatatatctatatctatcatctatacctatgtctatattcatatgcatacatctcatagacacacacattctcattcacacacccactcttcacatcctcattctctcacacatacacaagcacacacacacacacacacacacacacacatcatgactataccctgcatatagaccatacttatttcccagggatcataattcaacattgaaaaattgcctgaggccacacacaatcctagcctagaatcaccaaaaaaaaaaaaattttaagtctaaaaagtttatggggaaataaaattctatttgcctatttttagctcccccgaggttaaatatggccttattccatgctcaagcagcttctgggattatgtaactccaacagctctgatgtctgacgtcagtgccttctctaccctcagtgacggaagtgcaacaccctttcatccaccaccagcagcagcaggtgttctaggcaaagggatatttactgctgtggtgaagggatggagtggaataaatgtggggaagtggtgccctcagccagtgagatgagtctccttgacaccaaaaaccctgcttggtaaggactgaggcccagaccaacatctgaaaaatgatcctatcttgccatatgctccttctgaaactctcttgatgggagacaagtgtttggggaaaagggctgggactccagctgcccaggctgatgtcctgagcctggcattgaagggcagctggggatacagaggagggggtatggggtggagaggctatcgttcaatgccttgggttttgtggttcatgctcactgggcacagggtcacagagggtttcctgaatccacttaccagcagagattgagaagaaccactgtgttgccaggttgggggtagtatagcgtagtggttaatcacagggtaccctgagttgcatcaggtcaatttctggcacctcatctattagctctactagctccttgaccctgagcggattacattgcatctctgagcctctcttttcccaacattaaaatgggggtggctctgacattcaaagagatagtcatgggaccaggcatggtgggtcacacctgtaatcccagcattttgggaggctaaggcaggtggatcacttgaggtcaggagttcaagaccagcctggccaacatggtgataccccgtctctactaaaaatacaaaaattagcctgttgtggtggtgggtgccggcaatcacagctacacaggaggctgaggcacaagaatcgcttgaacctaggaagcagaggttgcagtgagcagcgatcatgccactgcactccagcctgggtgatagagcaatactccatctcaaaaaaaagaaaaaaaaaaaggaaaaaaaaagataatcatgaaaagagcttagcacagtgcccagtatataggaaatgctcaatggtcattatcatcctcatcattaaaaaaaaaaaaaaaaaaaaaaaaactagcctgtttttcttagttaaaagtccagagtgtcaaccctggccaagattgacttctaaggaggccccattcttttcctttttcctttgaatgcagcctgttcctcttcacccaaattggcctttcaggagttccctaaatctactgcgtttgttccacctctttgtattttctcatgctgtctcatctgcatgcactgccatcctctcccttgttggttttggcaaacatctactcacctttcaagaggaagctcaaatgccacttgtcatggagagccttccctgacacccccaggcagacttgggtttcctctgatctgtcactgctccttagatgtggtgacgtccatgtctcccaaccccctgccatccttcattattgtggtagacttggccctatttgtcagcagcaagagacacagcaagtagctaagaaagagggctcacaacaaactccaagatagtgagattattctactcttagctttgctacccagagtttattctgggaaccagtagtgtcatcaccacctgggaaattgttgagatgcagaatttcagccctaccccaagcctattgaatcagaatatgaatttttaaaaggaggtgattcatctgcacagcatcattgcggaggcattgtctgggacctcccaccacccctgcaagcagtaatggtggcaagcagggcaggtaaagccatgtgcatatattaacccttgatttacttagttgggattcaaccatgaccatggaagaaaccccaggtagggattatatccaagatgcaatcaaaaccacaatgtaacgtttcctttttattgaatccccaaataatccttccctcatttcttcctttttgccctcatctcaaacctctcccaaacaccatctcaatttttctaaggttgaaccagcagaatatgagttactctaccccaattattaccgacttcactttcataggggttttcttcttatattatcattagcatgaggtgggagctcaatgaatggggataactaagagtggcacctggtcacttttatttttatttttattttagatggagtcttgctctgtcacccaggctggagtgcaggggtgcaatctcacctcactgcaacatttgcctcccgggttcaagcgattctcctgcctcagcctcctgaggagctgggatttcaggcgcccgccaccacacctggctaatttttgtatttttagtagagatggggtttcaccatgttggccaggctggtctctaactcctggcctcaagcgatccacccacctcagcctcccaaagtgctgggatgacaggcatgagccaccacacccagtcactttgattttcaagggatcacaacctctctcaatgtggctgaacaacaaccagctcaccttcttcttatggtcccaagaatatgaagaccctacagctgtaggcttattacttcacctgtgtctggatatatcttatccacccagacatgttacctcaaatcccctcagttagtaactatctctactcttgttatataaagaatatttccaaatttacatgaattcataatttacaaactctttacaagctcttgaactaaatacgttttagattcttataaattagccaaatacacttctctcattcagaaaaacagatttccctgatgatcattctgcacgtcagtacatgcccacttaatagcttttattactagtcttgaattgctatgagaatggagccatggattcgctggcctgtagtaggttttctcaggaatttattcttaggtgaataaatgaataagacccttgtgtccagggagtcagactttttatctccgcatcaccagggtttctggcacatagtaggtgttatcatttgttttcaatgaatgaatggacagaaactgcagtcatttctgccgcctttacctctagggatccatgtggattcttagattaaattgtgtgagaagaagatcagggaggaaaacaaagcagaaaccttatttcgtgcatattatcatactgcttttttcattcagtgtaaataaataaaaggggctagttccaacaatggaactataaaaatacccagagatgcatatgaaaagtctaccactccctagaaataaattcatctagttgagctatttatttcagacacttttttttccccaaaaataaatcttctgtcctccatacaagtcaggagaggttgtctatgtgtctgcctatctttaggcttgttaggtttctctgtttatctctctgtgtctttatttgaatttgaggctgccaaggctcatgggttataagcaagagaaactaactttggatgacttaaacaaatacatgatctattggaagaaaagcgagatattaatagctcacagaatcagaagatgttctagagaatcacactttaggaaggagggagatgagggaagtttcagagttctggaactagcatatcctgtcactgaaatgattggatgtcaatcattttccattattgggtcactcaactcaagattcaaatcccaggggcagggttaaatgccaggacaatcttgggtcacatgtccagtcatgtgccaggcaaggatggaacacccagtttgccaggcaaggatggaacacccagtttgatgaattgatgaagactctatctgaagaaggaagaatagatattgtggtagacagaataatgggcccccaaagaggtgcacatcctaataattggaaactacataaatatgttaggttacatggcaagagagaattaaggttggagataaaattaaagttgctaatcagttgactttaaagaggaagattttcctggattaccagggtatgccactataatcacaagctttctttaaatgtaggcgaggtaggtagaagagtgacagagtgatgtaattagccacagctgaatatctgagtatgagagggggctctgagccaaagaatatgccagtccctagaggctgcaaaaggtaagaaaatgatcctaccctcaagtctccagaaaggaacacggctttgctgacaccttgattttagcccagtgaaacccattttggacttctgacctccagacatgtaagataataaatctgtgttgttttaagccactaagtttgtggtagtttgtcacagccaacttaggaaatggatatagagctcaaccagaaaaaaaaaacaaaaaaaaccacatgcctataatagagtgtgcctttaaatgtttgtttctatattggatttttaatggaaagcttggtagttgtaatccactcagggatggagaattggagaatcacaattagttccaaggcctagctcagaggaggtgcttgagaaattccggctgcataaattgatagacatggaacaggtgtggtgtacagtagattgttgatgtatctcatgcccatttctggagaaccttgtggtggaactccaatgtgggatttccacaacagagagggttctcaagcactgcctcccacagggtcttcagaaaaggcaaaagcatgccccaaagtaccaatttcatcccagtacaagctccggcaagcagagaaatgtggccctccggagggtatcaaacctgatgttccaggatgtttgccagtcttctctggagcatgagaaaatattgcacttgatgatcgctcattttgattacacttctgctccagagattatggtacttttttctgcaatgtttgggaacgcagcatctctgggtattggtctatgcccatcagaaatcagtgttgtgatataattacatttgtgaagcagatggttcaccaacaagcacgtggctgaagctcctgttgcaaatagaggcaacagatctgagggctgggatgggagtgggggtgggggtgggttgaaagctcctctttgttcccagataagagccatctagcttgtgtctctggtgtttttgcaaggattttggcagggagataattgcagaggctcagagaagggaattaccgtttattaagcacctatcatgtgctgagtttcttctacacctatctcatttaatatttataacaaacctaagaagtagattttaattatcgtcattttacaggtggggagactggggaaatttaagttaggggtttacagttatgtagctgttgtggtagtcattagcattgcccaccaaatacttcctgttctcctcccaagcacaagagaatttccctgctctttggccatctcaaagtgtggtttctgttctctgacctttgaatgagggtagaagcatgtgacttgcttaggagagtgaaaggtgagcagaaatgtagcggatctcttctggatggaagctttaggagccaatacacagttagccatgtgcttttcccctccatcatggtgatgggtaatgatccagatagaagttgctctgttaactggctcttggcagtgaggatggcatggaacagagaccccaggcaatgtatgagagagaagaatcatgagtgagcaatacaactttgttgatttaagctactgagattttgaggctgttggatgcagcagcataatcctgtctaatacagctgctaaggaaaaggtctggaatttgaccactaatcagcctggctttttacctcctctctgcagagcaccaaagtggtcttggtttctcgttcatgatccctgtagagagttaggatttcaggtttagggtctttcctttgctgtgaatcttaatttttctgagcttttgaaagcagacacggttacgtggttgttctcaggatgttttgtcagggttgtttctgcctccccaagaagcctgcagagatgggaactctgtccctctctagacatccctctctagacatcactcatggtacacatggctgctcagattgtagatgatgatgaaatacttcctgtaggagttattggcataggttaaaatgactaagaagacaatgaaataatgacatgggatgaaatatactggagtagaatgaactggggacagaatggcttgaaatggaagaggctgagttgcaatgcaatgaaatgaaatggaagtagattagaacagaatggattgaactgggatcaaatgggatgagttggactttaaatgggatggagtggcttagaatgcaatagattggagtggaatgtattggaatgatgtggagtggaatacttggatatcacagaatggaacgaattggatggaacataattatttattgagttaaaggcatatattggaatgaaatggattgaaatggaaaaagttggtagcttagttcttttcttctagggtcctacccctccccacctgccctgggactatttttgctgctcttaagtagtcaacataatgttgagaaaatgatgttgactagatgacccctctgagggagataatttcagtctcctcattagctctaccagactgctctgcaggggatggcctctggcctttcatagtgtgtttgtttgtgtgtgtggtgtgtgtgtgtgtgtctgtgtgcatacgtacatatgcacatatggtgggggtagggcactgtgctagtcaaggtacccaggccacagcctttgaactaattagcaattactgggcctgggggaaacgtggctggggtgggggacatttgttaattccatttggtgaagtccatgatattatttgcttctctgcctcttccccacttccccctctccccctacccctattccatgttccctgtatagtaacaagaggatttctctgcttttttttcttccctctcccagaatgagggaatgtgcttggaaacagttgccgagggagcaatcttgtttttgaaaaagaaactgtaaaaaatgtgtttgcggggatgccaaagtggaggagccttatttaagtgagtggggtggtgggaatgtgtttacacagcaaaaaaacgcaagctgggtgtctgctgtttcttaagtggatggtattttgaagggacttcatgatctgtcttttaattcactgttactgcttctagtccaggaaagtgtgccttcctggcattcttcatgtagcttaggttaagcagcagaaaattggcagccagtctgagccggtgcttacctaatagaaaaccgtgtacacgcagctcagacagagccatatacatgggtgtaactgggtgcatcaatgaccactgtgaggattaaatgaggtggtacttgccagcatgcttagcactgagcctggcatgtagtaaactctaaatgagtgttagcccattattaattgtgtgtacacgcgtatatgcacacaatcctgccaacactcattgataggtgcaattgtatacacatataaaattacttccttggccaggcatggtggctcacgcctgtaatcccagcactttaggagcctgaggtgggcagatcacaaggtcgggagatcgagaccatcttggctaacatggtgaaaccccgtctctactaacaatacaaaaaattaggcaggcatggtggtgggcgcctgcagtcccagctactcaggaggctgaggcaggagaatggcgtgaacctgggaggtggagctcgcagtaagctgagatcgcgccactacactccagcctgggcaacagagtgagactccgtctcaaaaaaaaaaaaaaaaaaaaattacttccttgcacaactgtgcagaccaatagctaggcacacctgcgggattacattgttacaccaaaccctatgcacactcctaactatggatacgtataatcaggtagtctctcatctttgcgcttctccacatcatgtgcgtcatcaaaagatgaaggcatgaaagaagaaacacatttactgagtgttttttatatagaatgtatataaatgcaatttgcaaatttcctttggaaacctggctgagggcttttcaagtatgcatcagaggattcctatttagagctttgtttctgtgttccactctttcttggttccaaatggctctttcctttccatctcccctgctgtcatctgaatcttcttcttacgtgtttattcatccatccatcatccgtccatccccccatccatccatccatccatcccactaagatgctttatgtggtgctgagtgctgggctataagaaagatttgaatcaaccctttcagagcctctcatctatcctagcattaaggaagttgtttgtgtgaagcttcgcactaatatatgtgaagcaatttagcatcacaaagctctgttgcatacatgataatacttgattagcagagaatgggagatctcagattttggaacttgaatgcctgggtccagatcccagctctgccaattatttgctgtaactggacaagttacttagcctttctgtcccccagtttctcatcagtaaaacagagatcacaaaatacccattttcgaagattttcgtgaggattgaaggaattcatacatggaaagtacttaaaacaggatgtggtacatattcagtgttatgtgttgtgactaaaattgctattgctgattttctcaggcagacctgggcagctagtggtgttatctccattttgcacataaaaagggtcagggcagttcagcattacccctgaatgactgccactgcctgtcagctgtcctccctgcctgttcccaaggagggagacaacccttctgccagcccccaatccggaggcattcattcattcccactctcagtctcccaggaattgtcagtgaacacagatttgagtcttgttctgagaggagggcttcataaaaggctgctcaaggctcaggaagcctcagctccatttgtttgttttcaacactctcctgctttgactcatctccagggttcttagcccctctaacatgggctcctcagttagtctgaaacaagttttttatgtcagaaaggggtggtggagaatgattggttaagggtgagttgtggtatattagaaagaaccggaaccttggggccagacctgggctttagtcactttcaggcagaacagttccctgtcctctctgtgcctcatctgtaaaatggggcgacagtttttccagtatgtcctctcagagcagtgtagccataatggagaagcaggctttgtcttcagactgaccaacattcagatcccagctttgcctctcactgactgggacttgcttgtcttccttgcaatggaattagtctgagttcttagttgcaagcaaaagaacccaactctaaatgatcccagcagaaaatgaatgtattaaaaggaagttcatagaatttctggatgtctgagaaactggcttagaaactgagaagaaacaaagagagaaaaaatagccagaactacccccaaaaccatgccacaaaagctgtcctgggaggaccctgctattgcccacagtgcgcactggatattgccgcagtgttacttttctcaagatggcttattcactgtccctgttacttgggctaccagctcccaattcaaagacacatctgattggccaagcctaggtcacatgctcttgcctgtgccacaagggaggctgggaaagcaaatatttggtcttttcaacttgttggagggaggctccatttctttccaaggcccataagatggggagctcccaaacataggagaaggtgatgaagatgattttaaaaacacagcaaagcccaggcatggtggctcacgcctataatcccagcactttgggaggctgaggtgggcggatcacgaggtcaggagggcgagaccatcctggccaacatggtgtaaccccatctctactaaaaaaaaaaaaaaaaaattagctgggcatggtggcatgcgcctgtagtcccagctactcgcgaggctgaggcaggagaatcacttgaacccaggaggcggaggttgcaatgagctgaaattgcgccactacactccagcctggtgacagagcgagactctgtctcaaaaaaaaaaaaaacaaaaccaaaaacaaacaacaaaagaaaacccagcaaaaacacaacaaaaacaaaaaacgaaactaaactgtcaactacaatgtggattcctcttctgtacaatctggaaaacaagacctatttctaggaatattgtgaaagttacataaattaacatgaattaggcataatacctagcacattatatgcactcaacaaatgctggtttcctgccccagttactagaaggtgctccagggtctgagtttctggggtggttcccagaaggcttccttttcctagctgtggaagaggaaagactgcctttgtccatgatgctgatttatctccagatccccagtggctcacagatgctcctgagcacagctgttctcgagatgtgagagaagaaagcccagtactgtttggttctcaggaggaggtcaggattgggagtagtctcgctcttttgcctaaaactggagtaaaatttcactcagcagagggatagatatgaagatgactggctcttggttcattaatcagagcatcctttgagcatacgcttttctcttgataaagatttactatatttcagttccaccaaagccttctacaagttccataggttccagatatcaattggcctcccttagaggagaacacagactcacagatatgttcacatcatttgcccattctctaaggccgaggttcaagtccatgcccttgggtgaagctgtccatgattaattccgcagaaacttctgccatctttgaatgctgctgaagctcatattgctgcctcttcttcctgactcctgttctttctcccacaaatatttgttgagggcctactatgtgccaggcactggaaataaagtaagtcataaaaccaactagctatctgctgtcagataattttccattctggtagaggaaagcgaaaataaacaagaaataaaataattctatattgctatgggtgagtgttaggaagactgaaacaatgaagtcagggaagattgggaaactttaagtgtggaggtcaatgaggtgccttctaagaaaggctgagccatatgaaggcctagggaagagagttccaggtggaaggaatcacaggtgaacagattctgaggcaggcgtgagctggtgtgttctgggtacagatgaaggattaacatggatagagagcaatgagggagagagagagagaggaggtggatacagcttagttaatagtgcttgatatcttgatttgttcaatcagatttcctataagtcagacctgtgccttctactttttggtgtctgcctgctattgtgtctagtatattctattcacccaagaggcacttaagtttatgcttgattaacatgaatccctcctccagtaatatatcacactgcataggtggccctggtccctttgagttgttattttctacaaaatcatgatgctgaatgcagactgtgaggttctacactgggttaggtgggatgcatctaagttgggtcacgttttgtcaatgcagtcaaatcaggaagtgcaaacctaagtatggtgcgtgagaaccaaaatctgatgagaaaattttattatgcgctctttggggcaggttgggaccattttaacaccccccaggggcttagtttaaaggcacagccctctggacctcccatttcacaacctccttgtcaaatgcttgcatagatgtgtcagaatacttctgctagaaacatgcccacaggagagaagcggtgatgttgccctggagcctcctaattctgctgcgtctggctgagacagggtaggcaagaaatcaacactttccttttcaggctggatggcttcaaggaaacaagtaaattcttagcctcagggtagatattggtatgaaatgaccctaatttttcttcctagccccattccccatggcaggagaagttaggttggcatttgaaccaaagctttataaataatttgcaggaaaaggcacaccctggttagaaccaaagacttatgtatttcagtggagccgtggaaattctcacttttctgtcctggctggctccagggagttggaggcagagagaattatagtctattgtgctccaggctgtccagaggttttagagatgtctgtgggaaatagaattgcccaggatggtcagagtcaaaaggcgtggtgagccctttgctacattgatgggtcgctctgtggtgtcactcaggatatctttcccccctgcttgggtctttgtgttttggactcatctgcccatgtggctagcctcacataagacctggaccctaacacgtcctcactcatctgtcctgtttctgagcaacttctctgaacctatcttgcaacatccttctgagcagcttctgacccagttaattatactctttcatttgggtcttgactttgggcatttttctcatctaaaccctggctgtccccctacagctaaaatgccaagtctataagaactcaaaggcatttttctgtcccagccatcccctcctacgttggtccagacccatggtcaggacccaagctgtgaagaacagaatgagtctttcttgtctctgcattctaggtcctttatcccttgactcttagatcttccagcctcttttataggcagggggtcctttgaatacctaccatatgcaagacaaaattataagtgggctgagggtggaaagtttgaactctaccttataagaaaaaccctcgtttttttttcctctatcggtgctagaaatggaaagtttctaaagatttgtttccttaggtactacaacctctctttctagtttgctgaaagttttttattggtgatacacattgcatttcattgcatgatttttctgcatccattgaaatgatcttatggctgttcttttttaggctgttaatattatgaattacttggattgaaattcaagtgataaaccaaccttggattaattagaaggggataatgtaatggcagaggtggacctaggatgtggctattaatagaagacaagttagcccatatgaacctcagtattctcaagtaggtaatgtaagacttagtaaaagtagccagaaaggtgggtattcagagggggtgggagacagctttctcctggggacagagtgtatgcatattattctcaggttctttggagaactagttggtgtagaagaaataaagagactttgagtttttaggatttatgagtgggtgtagaatcgtgtaattctttcttgggaaacagggaagggaggcatttgtttggatataggagccattaaggtacaaattaaacaaggctttcaggtaattcttataggactgtcaaggaaaaacagtttgaggcgtagggatgttcttttttaccttgcattagcatcaatcactgcgctgagcatacagtacatctttaatacacgagactgattgcttgactgatactccaaattccattaaaacagattcgaaactcatccaaactctcctctctggtagaactgggctatggcaaatggaacgggaaataagtagcccaccccttggccttgacagtgtgttacacacaggactttattataaggccattttacatagtaggtgcctattatcaaacaggtgtatggatattgtcataagagaaagtgggaatgaatcttagcaaagtagatgtcagaacatttgaaaaagattctaattgctagtgttctggaaaggaaagcaaattaagttagtcatttacatgaaaaaaaaaaccgatacaagaaacagaggaaggggttttgagcacatcttattttatcaccttggagccgttatcctgttcaccaaaggtggttcttcttagtcctaattcttaagctaaatgtgttatttataatgctttctaagtcaaagagagaaaaaaataatgaatgaaagaaggaaagacaaggaattctaagttagtctttatccttctcttgttctgaaagccagtgattttaaagaacttggacaaaaactgagtgaccttggacaagtcacttagcttacctgagtctcagtttctttgtccgtgaaaggatgctaataatgctaagcatttaggtttacactaaaaaagaaatgagaaaatgtatttgaaaatacctacctagaataggcccaggttgggggacaagatgagaccccaatgagtctcaaatgtcttttaaaaaagagtcttcatttgacctttgaaaagttatttaacatctctaagccaactttattctacttcccaaagttgtcttggctcttacagatctttttaatttccatatgaattttaaaattagatgatcatttctacaaaaaagtgtgcttgaatttttactgcgattgcattgagtttaataaatctgctgttatttttatctctgtttccactgtatataatgtgtccttttttctctgattgtttttattattttcttgttggttttcagcaatttaattaagattaatttgggaaagaaatgatagcttaaaatactgaatatttaaaaccatgaacatgacatatttctacatttatttaggtcttttaaaatttctctcagtaaagtttttatagtttttattgtacaggccttgcacatcttttgtgagatttatccttaaatatttaatatttttgttgctattgtaaatggtattttgttaaatttcaatagtccattactatgttatgcaaatacaacggagtttggtatgttaaccttgtgtcttgcaaccttgctaaaatcacttattagttgtaatagtttttttttagattccaaagaattttcaacagagatgatctcatctgcaaataaacacagtattaattttccttttccaatatggactctgattcttttctttttcttgctgtattgtactggatagaacctctagtaaaatgttgaatataaatggcaaaagcagatgttcattcttgcttttttcttgactttgggggatacgtgttggatctcccactattaagtatggtgttatctataatatttttcatagatgtccgttatcagtttgaagaatttctcctctattcctagtttgctgaaagtttttttattggtgatacacattgcattttatcacatgatttttatgcatctattgaaatgatcttatggctgttcttgtttagactgttaatattatgaattacatggattgaaattcaagtggtaaaccaaccttggattaattagattatcaccacttagtcatggtgtgttatttttatatattgctaaatttagtttgctataatttactgagaaatttttaacctatgtttttgatggacattggtctgtagttttcttttccttgtaatgtttttctttgtatcagggtaatgctggctttatggaatgagttgcaaaatattccatcctcatcaatgttttggaaaaggttttgtaaaattaatattatttcttccttaaatgtttttagactagaagctgaggtcattcctttgagatttcctaatgtgagcatttatgctataaattagcctctaggtattgctataactgcatctcacacatttcgatatgttacatttttcattctattcagttcaaaatacatttttatttccctcttaattttttaattttattcataggttatttagaagtgaattttgaccaccaaatatttgggcattttctgttattggtttctaatttaattccacaagatttcacaatagagtttggatgacatgaacctttttaaaatgattgagattttattctatggcttacaatatggttcatctgtggatttttctaggttgtattatttctgataagaaatctgctactattctcatctctgtttcctctgtatataatgcatcctttttgcctttgattgcttttatgatttctggttggttttcagcaatttagttaaggtatgccttggtatagttttctccatgtttcttgtgcttgtggtttgttagccttcttggctttgtatttgtagagttttcataatattttgagaatttgtggccattaattgttccaattttttttatgcctcctcctttcttctctcccctaggaacactgattctatgtatattaaatcacgtgatgcattccacagttcagtcatgctcttttcatattttgctgtctgttttaatctaagtgtttaattttaattgatttgtcattgtgttttccagtttactaacattttctcctccactgtgtcatctgcttttaatccaatccagtatatttcttttatcttatatatagtagttgctatcattagaagtttgaatttgcttcaaatgaagtaaaggtagtgatcttagacctggatttattttaagaagagttatttaataaatagtagtataggtagtgtttgaatttggcaacagccatggaagtgactgagacttaggaaacttcctgttacctgttctctgatacgtggagaaactgaggctgagatggatgcagattcctcagaccatgagcaaaggtactttgtaatgtctttcctctctgtcttcagtcagctcacagttccacacactccagcctttcccacaacagtcagcaggttagacacagtatcacgtgctgatcagtgagtaaagtcctttctgctgtgtatttattaagattaatttactagggtggttgggggtttatcgagcacttaaaaatgttaatggacactgttcccaataaatcatgtcaacagatctctataaaaacagtgggaagcttttaaattgagcctaagaagcagtattgacttcacatggtgggctcagtataacctttaagaaaatgacaggtattatcagcccgagtctggagcctgtaattcgccagctactgaattctccatgggaagccatcctcatagtaatagttattatttgttaatgcctgctgtttgcaggagattagtcttggcatttgatagatggtctctttgatctcatcaatgtctgttttattaacttccatttcatggatgagataatcaaggtcctgataaatgaagcccaagattgtggcttttctccaagtacctctctctcaactctagcaacgtcagacttctaagagtttctacaatgatatgttatccttttctgtttctgggctttggcttccatcgttccttctacctggaacatcctttctcttgcttttttgcctgcctttgcatcccagccctcttgataaagcagatcagttcatgttactcaccacttaactgtcttagaacatcctctttgctttaggatgaagcgtgtgcttcttagcatggccaaaaaggcaagattggagagacttttcctagccacttcttctaataaaacccatctctctattccctctgcaccctctctcccttttcctgctttacttttctccatagcctcagtcttacctgacactatacatttatctactgtgttatcattctcccccgcttgaatgtcaccaccatgagggcaggcattcttgtctgttttgtctacggtgtgcccctaatgcctcccccaaatgctgcagagaagctgtcaaaagtgaaggcaaaggaagaatcatgggatgcgatagtgggaaggtactggtgatcttcacaaggtggttgtgggcaaagaagccagaccatggtggcagaagcagggaagaagaggaggcagtaggcagaacactctatcaagatgcttttttccttagctaatgcatgctgtgcttaatacctacgtgatgggtcgataggtgcagcaaaccaccataacacacatttacctatgtcacaaacctgcacatcctgcacatgtaccctggaacttcaaattaaaaaaaaattttttaagattttttttcctttaggagaattttttttattcttactttactctacttcttctctctctctctcttttttctttttttttttttttttgagacagagtttcgctcttgttgcccaggctggagtgcaatggggcgatctcagctcactgcaacctccgcctcctgggttcaagtgattttcctgcttcagcctcctgagtagctgggattacaggcatgcaccgccacacctggctaattttgtatttttagtagagatagggtttctccatgttgatcaggttggtattgaactcccgacctcaggtgatccacccaccttggcctccaaaagtgctgggatcacaggcgtgagccagtgcacccggccactttactcctcttctcagccacatttggcacagttccctgctcctttcttctccttagaacactcgcctcccttgacttgtgcctcttacgtttctggtaactccttgacgtggtctggatgtgtgtccccacccaaatctcatgttccattataatccccagtattggaggtggggcctggtgagaggtgattggatgatgggggccatgcctaatgatttagcaccacctctccaagtgctgttctcctgatagtgttctcatgagatctggttgtttaaaagcatgtagcaccttccccccttctctctcttcctcctgctctggccaggtaaaacatgcctgctttcccttcgccttccgccatgattgttattttcccgaggcctccccagccattcttcctgtacagcctgtggaactgtgaaccaataaaacctcttttctttataaatcacccagtctcaggtatttctttatagcagaacttagtgtgagaacagcctaatacagtccttctgtcttaattcttggatttcctgtgttgttctatgtgtttcaagcaggtcttattactctttccatggctgatagtttctcattattcaggtctcagctcacctgtctgtaacaaccacattttccagcttctgtgcttgatgctttgatgtcttggcaccttgctgaccctggagggactgctcctctcaggattagccagttcctggagatagtaaaggacttaacttcaagcgtgactgtcttatgcaaactaaccaatccaaagcccacacccccaaccacctccgttatgggctgactcagggttgattacccatctgtcctaatcaccccagggccagtgattaagatttagctcagttagacaagaccaggctatgtagcagcgatgaataaacctgtaagtccagtagcttaattccttaaaacattcttacctacacaaactctgccacacatgggcagccatctccatctcatagcaatgccatccaaacctatggcctccaacattaccatatcagtcacctggaagcggcttacatcatttctacccttactccattggccaacatataatcacatggtccatgtctaccagcaagggaagctgggaaatgtagtcttcttaggtgccccagctgtagcaaactgcaaagccttgtctctctactacaccatgaaagggagaagggagcctgttcaggaggttgtgaactactgcctagagaaagctggccagaaagcagtgagagcttaggagcagctagcgagctgggatttgctctggatctcatcagcacctagtttctcgtattctgcattctctagcaggctaggagcccaggatgtggacagtgacatcggaagtgcattattcacgttccacttgcaccatctgccaactgtgtggccttggccaagtcacttcacctgtctcagctcttatttgtttacctctaagagtaggcatcaatacctgcctcacagagccgacatgagaactggagacagatgacgcatgcatcgtgcctggcaggaacactttgctcagtgagtgattgtcaccatgatcattgtttttatcatcttgataattatagtggaacctattgaggcatggaccttagcaaagtgggagcagcttttgcttttggatttccaactctctgtatacaatgacccctacggaagacctcacacctgtttcagagaagagaataatacccgcccctgggtttggccatttcctttgtcttacagttgtcatgggatcttcacccctcccagctccattggaaggtcagttgcagtgcagcccttttccggggtaataagtttttaatgtagacgcaattagtgaataagcagttgattagttcattacgaaaatagtgaaaacaacaccatttgcggtggcagaagcttcaggaagacagatgcgttcccttttcatgttattggctgggtcagaatgccaggaaagttaacatattttaccataatattaagcccttttaacactgaaaggccattatgttaggaaaaaatccccctctggggtattaattagagagatagagctttaaaaaaatcataatcccattaaattcctctcttatagccattttcataaagaatccttaatgtgaattgtggatgaaaaaccacaactctggctaaagaatttatgaaaaacactaggcagctgatgtatcatttttaagaggaggaaaacaaaacattttatcagtttcctggctttggatttcttaaacaattatgaacagcctagaccagaagtcagagagcaatgccgtctttgtagtatagtctttagccttcccgaaagctaatgatgacatatgattgctatgggtggaaatgtatgctctgtgtcccagcttcggatcactctcttctcttggggctttcctgggttgcactgggtttctggctggcatggcagtctggttatgaatccttacatgcgtatttaaaataggtatttaaaatacatgttcaggccgggtgcggtggctcatccctataatcccagcactttgggaggccgaggcaagtggatcacctgaggtcaggagtttgagaccagcatggccaacatggcgaaactctttctctactaaaaatataaaaattagccaagcgtgttggtgtatgcctgtaatcccagctattcaagaggctgaggcaggagaatcgcttgaacctgggaggtggaggttgcagtgagctgagatcgtgccattgcactccagcctgggcaacagagtgagactccatctcaaaaaaaaaaaaaaaaaagaaaagaaaagtaaaatatatgttcatttgttcatttatttgtccctatgataagtatctactgagccactctgcatgccatatgctgtgtgagtgcctgagatacaatggtgaatggagtagacaagatccctgaactcaggggctttgtgttagtcaattttgtgttgctataaagcaatacccaagactgggtaatttataaagagaattgatttgtgatgacaacacatggatgcgtggcagggaacaacacacactggggcctgccaggggtggtgtggagagcatcaggaagaatagctaatggacactgggcttaatacctaggtgatggttggtctgtgcagcaaagtaccatggcacacgtttacctatgtaactaacctgcacatcctgcacatgtacccctgaatttcaaataaaagtttgtttgtttgtttgtttgttttttgagatggagtcttgctctattgcccaggctggagtgcaatggtgccatctcggctcactgcaacctccacctcctgagttcaagccattttcctgcctcagcctcctgagtagctgggattacagatgtgtgccaccacgcccagctagtttttgtatttttagtacagatggggtttcaccatgttgggcaggctggtctccaactcctgacctcaggtcatccacccgccttggcctcccaaagtgctgggattacaggcgtcaaccaccgcgctgggcctaaaataaaagttgaaggaaaaaataaaaaaagaaaaagaaaagagatttatttgattcacccttctgcaggctgtacaagaagcatggtgctggcatctgcttctggtgagggcctcaggaagtttccaatcacggccaaaattgaaggggaagcaggcgtgtcacatggcaagagagccaacaagagagagacagcaaagatcccagactctttttaacaaccagatctcttgtgaactcattaaggtggtggagagggtaccaagccattcatgagggatccacccccatgacccaaacacctcccaccaggccccacccccaacactggggatcacatttcaacatgagatttggggcaggggagaaaacatccaaaccatatcaggcttctagttcatggaaagctacacattaatcaacaaatcacagagactggcgtgaagttgcaaatggggtagatgtcatggaggagggacttgtgcagtgctgggagagtgaatgacaggccattgatacagcagggggcgggggtgggggcgggagtcaaggaagccctttcttgaagctgacatgaaggaaggcaggggtgtgctgatgaatgggggtgcttccagcagaggaaatagtacttgccagggttctgccctgggagagaaagaacaaagagcatttggggaaatgaaaggagaccaggtggctaaaagtttagcaaagagcaaaaaagtggggagtgacatggcacgaggctggaggggtggatgggggctgtgtgggccgggtaaggactgtcatctttatcctgagagaatggtaaccactggagcaacgtaggtgacatgatcatgtttgcatatatgtgttgacattcgtatgcatatgataaaattgcaacattgtgtgatgctgagtgaatagctttctctctcggattctctcctcatttgttaaatgatactaataacaggacttacttctagttttacagtagctattatatgaaataacccaaatgaaaatgcttatccctagtgtttggtatgctggatgtatacaaggcaattttcttccttccttcccactttctctccttcccttcctttcccccctttccctccttccctcctctcttctgcctttataaaatgagctaactgaatatatcttgcttcttttaactttaggactcagggctgttttctttttcaataggtactcttctttgtttattgcttttattaaatcagttggttatcaaatcagtcaatcagtgagtattaaatgggcactaactttatgcttggttttgcagagacacttaagatgcctaggggattggaaggcttcctagttataacacctgcacatctttgtagtccaaagtgcacaagaagtccttaattaaacaggtggctttaggaatagatactaaataaagccaggtaactggctggttgttcatcctcaagggaattagtaactgagtcattagtcgtagcatataatcaacgtgtgcatgaagcctctttaaatatgtgcaaccatcttgactttggtcttgactatttcctctctgtgtcaccatctagggctcctcagtttcttttttgtgtgtgtgaaataacaatgaaaacaccatttcaccatcaccttcgtgctggcaagaagagccgtcgttgagtcttccagcaacaatgtcagcctggtttcgcgtctgtttaggcccatgagagagtaccaagaacaatcatatgacttaattacaattcacttatcttgatgatttttttttttttttttttggtaaataatcttgatgtaaattcctagtgggccacgagagaggaggcgggattgtaatgaactggtgatgaagtggaaatattttgaaacgccgaataatgtattttgcttgtcacctaattacttttcttctgcctaatagcacatttcataatatcttacttcccgatctgttcaactggcaataaaaattcttttttgtgattgccgtgtgctcccaagtaaagaccagtgcattaggagctcaacatataatgatgctttaatgaccccgataatgtcccttttatcaaatggaaaaaggagtttgtttcattgaaaatacattttcttctctgtatgaatattatttgaaaaggaattgtttatcagtcagaagagatgcacgtgcgcacacacacacacacacacacacacattcattctcactcatttaccaatccagaaacaaagagtttttaggttttgattaacaccttagcgttaacaatgcaatataaacacacagaaatgctgaaggtatcccagaagaacaaaactcttatatgctttgatatatatatatcctatatatttcagacactacaatgtggaaatggcatgtatgtgtgcatgtacacacacacacacacacacacacacacacacattttcctaattgtagattagattggttgcatgtttaccatgttccaggacctgtgctgataataggagtgtaaagaacaagaggacactgtttctgcccgcgtggacctaacaatctagatcagcagttcttaactgggggcaattttgctccccacccctatttggggatatttaacaatgcctagagacatttttggttgtcacaacttgcaggaggcagtgggcagggatgtgctaagctcctgaaatgcacaggacagtcccttatcacccacccaagccaagagtgagttttcccaagatgtcaattgtgccgagatttggaaaccgaggtctaatggagaagacaaatgaaaaacccggcaattacaacagagtcaggtcaatgtattctaagccagaggaagttcacagggctgttagaggagagtggttgagcatctcacccagcttggaggttcagggagggcttcctggaggagatgatggctgattggagtgacaaactagaagaagaaatggggaaaaggtgttctgggaaacttaatgctgactgaggagtcggagtcctggcagattccacagtctgggacgtgctggggccttaaaaagtcatatcacctctctaggcctcagtttcccatccccacccttcattctcaataaaatgagcggctggactggttgatctccaaggtctttactaacttgatatttattatcctacacctctggcttgtataaacttgtaaaatatagcatttgttttttgttgttttggtttgttttctgggttttaattttcattatggggccttctcatgcaaccatttccagcctcctgtttgtttacccaacaaaaacatgactctcctctggtcctgccttatgctgggctctgggaacccagatattcctcctcctcatgtaccttgcagtctggccccagatcagttcacagaagctccctttcatcactgtcagagtccttgactgtctcttgggagttaaggagctgtaagcccattggtgcctatacctcttccttaagaccatgttggtcctcagagagatagcgatggcctgaattaaggcaggcaaactggagacagaactgggggcagggatgaaggctaagaaatttgagaaatatttatgagaaagaatctccaggactggaccccttactggggatggagggatgaggtgatggagaagcccaggaggggtttggacttgagagggtgagtagcaatgccctcctctcacatggggtgaggtgcagagggaagacgctggttttgtaggaagatgaaatgatctctctcttgcttcctggtaaggggaccagggaggcctgtgggagtgtgagaggtccaaaggagccaagctgattcctttataatctctggatccaaggcagctctgagatagaaaaagaaagactccttatgtggggaaagggtcccttatattccaggtacttcctgagcttccataaaagacttaggcaaagatatgagagaaatttatgactgggtcctcgtcctcagcacaggacacaaaaagaggcttgcatttagcatgaaataatctcagcttcagtcccagagctgcctatcggatgctagctcttggcttcactttccgtcttttaaaaaaggtctgggatggacgtggtagctggctcatgcctgtagtctcagcactttggaagaccaaggcaggaggattgcttgagcccaggaattagagaccagcttgggaaacacagtgagaccccgtctctccaaaaaaaaaagaaagaaaaaaaaagaaaagaaaaaattagctgggcatggtggcacatgcctgtggtcccagctactctggaggctgaggtgggaggatcgctcaagtccaggagttcgaggctgcagtgagccatgggcaacagaatgagactccctctccaaaataaatacatacaaataaaataaaacaaaaataaaaagatttgattttttccctatgttccagagatgctataaggagtaaatgagagaatggatgacaaaagttatttgcaggctgggaagttgtgtgatttgagtgagacacgcccaggtgagggttctgagatgggtacagattcagtctcgtgcccacagctggccaggaagaaggtgaaggttactgtgacttgtaagagaggcagggctgattgaaagttatttttcaactggtcttaaaggaacttggaatattagctccagtatttctctgcatgggcacggtgagcacattgggtgggatgaatccctgtgggacaccacacattgcaggacattttagcaaacctggtgcccaatgctagtagcctcccctgcatcactttgataataaaatatgcccccccacactttcacgtgcttccaagggtgggtgggggctttccttagaacgtcacatgtgaggagaccaagcaagagagagaaactagttaggtacaaatccagagggctattgagttggcagaactgagatttgaaccgaggtatgttctcactctccctctgtctcttgccaaatcaaatctctaaagttacatttaaatgtaactttaagtaggcatagcatttttttcctactaaagttacatttaaatgtaactttaaatatcttttttataacttagcttaatttccgtgtttttttaataaaaacctgcctaatgttaaaaacctctattagttgattacaatttctttactcagtttattctacctttatccttgtccctaagactgtatctagatttggagggggcttatatagccaggcatattttggggggtctaggtatggcctttgatcattatgtgcctacagtcagttctgctaaccagtttggtttttgactgacacgagtcatctgtcctggacacctgcagaggtgcccattttaatctctttggtctctgatcacacaggtcacaccacgcctacttctctacctcctcgtcctgaccccaaagtctttccaggtctcacagtccactctctttagaacctggatcttaaccaatgcctgatgccaccactcttgtgtttgatggttttatgcccttcagggccaagtgccactcacagacactgggaagtccagcccaaaacagccagacagacccaggaacacggacccacagtgggagttctgaattcagcccaaggcttggccccctcctgcttacataactagtgatgcccattccatctctgagctggctttttgactcaccactgttttttttttccccaagaagtaaaatgtaattaattgcaggcttattgttatattataacctcacatgggggagtgggtggtagggtgggccgaagctcaagacagataatggccttgtagatctgcaaccctcagatcacccacacctcttctcccctctctgttcttaatctaatgttgagacaataatgaagccatgatgctgagtcgctgttattcatctgagtggttactcggaggctggggaggacacatgactccaattacagactgtctcccagcttttgatctttgagggctcagagctggggatcctctgaatttgctggctggggaaagcctgattctctctgcatttcattttctcagctcagcccaccatcaggaaagatctgtgatccaaggtgaaactctcagaagtggtggggaatttgagggttatgaaaatctgcactttgtttgcaccagggacagtgtacagaaccccctctcagagaacatattagcagctcacttaattgctctctgatctttttcctctcctagagcccagattcttcataccttctggaccagaaacaaaacctagctcagcaaatgctcatccatagcaatacgaagtttggaagctcaaaatcttagaatggctcttttgaggtctgatcctgttgtgcagactccccacagagactatggctgccctgtggccatctgctcaataacaaagtattgccactgtatacaaaaatgggtgggggaaaaaaacattcagttcttcataatatcccacctcatgtgaattaggcaagactagtgctcaatacttctacttttattttattttttttaaaaagcgcaattgaaagcatatatctactcatacgattttccctaactgatacctgtcttgcttactagattactggctcctggaggcaagaactaggttcacggtgtttttgtttgtttgtttgtttgtttgttttgttgagacagagtcttactctgtcgcccaggctagagtgcaatggcgcagtctaggctcactgcaacctctgcctcctgtgttcaagcgattctcctgcctcagcctcccgagtagctgacactacaggcaatcgccaccatacctggctaatttttgtatttttagtacagaaggggtttcaccatgttgtccaggctgatctgaaacccctgacctcgtgatccacctgccttggcctcccaaagtgctgggattacaagcatgagtcactgcgcccggccaggttcatgttttgtaactgaggttgttccagtccctggaatgatgctttgcacatagagatatttcaaaaatattattgagtgaacaaatgaacgagtgaataatcacatcgattttgaggttctttaaagaagagaaggtgcttgaacttgaagaacacttgtgggcacagacaaaggagctagggtattttattcttctcaagttgctcagagcattctcctccatccatggatcagctacaaggatgggtcaggtgcacgtgtggagagagaagtaatctagaattctagagagttggctttcatcttgacatatttgtagggtgaccatgagtaagcccatccctctctctgggttttttttttttttcttttcatctgttaaatttttaatgggactgaaagagtcttcaaggttcccagttctactatctcctgacgatgcttctgcctcccatcttgggccccacgttttacaagttgcttcttccaatcactctccaagctcccgacacagcagatggagctggtgcccgcccacgactgacagatgagcctcatttacagccctcaacatttaaccatttggctatttggcagagtcatctagctccgagatgctgggagagtcctccccgtccccagcaacacagacaacttcccactcccaggtctctgctagtgccggggacctgggaatgtgaaacagagaagccagcctccagccttgggtctacaaggccttagagggaaaccacatttgaaaatagtaatatttcccagagagcagaagatgatggggaggtgtctggacatacattaattagccagcttggtctatttccaggtccatgttttcagaggccaggtttttgttgttgttgttgttgttgtttgtttttttctgccctatttagtaataatatccataattctagaaaagcctgatgttaaatgtaaggtggtctaagcattgaagcaaactttcttcctatctcaaaatcattgagttgttgatgtctaaggctttgagtaaccacttaactctataacaacatcatccctctaggctgggcatggtggctcacacctgtaatcccagcattttgggaggccgacgtgggcagctgatttgaggtcaggatttctagaccagccaatatggcaaaaccctgcctctactaaaaataaaaataaaattagctgggtgtggtggcaggtgcctgtaatcccacctattcaggaggctgaggcgggagaacaaccaggaggcggaggttgcagtgagctgagatcacaccactgcaccccagcccaggtgacagagcaagactctgtctcaataaaacaaaaacaaaacaaaacaaaacaaaatctctctgatgtctgttgagtgctggctctgtgctagtcataaacatctctacatgccttatcttattttgtcctcacaacaccattaaaagatagatactatgattaccactgttttatagctgaagaaacagagaatcagaaatgttaaatttatacagtcatagagctaccagaaggaagaactaggactcacacctaagaaaatcaaagctctcttccttgccttctcaggtgattgaggagaaatcctctgttaatactcctgcctcctggccttggctccaatgatggtcccctgggaatgacagtggggctgtgggaaaggcaaaggttctctccaatttgttctatcaattaatgattttgagatttggtgtggaaatccaagaatctatgaccccatgagaaaattaaaggatgagatggggccattgaatgggagcagatcagaatccaaagaggaaaggttagagtgtaaaattccctctactgcgtcttcctggcaggatgtgggtgtttaattactgtgttgagagcaggattgaataagtgggacaagactggaaatgtttgtttaggggctgttcctttaggctgatctggacccagggcattgatgatggttttacaatgtgagagagctatcaggtgggtaggaaactctcctgagtctgtgaggcaaatgacctctggctaatcaagtttcttaactaagattgcctgagaacttaagatgtagaactccacgaagcagtcaggtctggacatttacaatgtacgtggaacatttgttcaatgaatgtagacactgtttaacacttctacactttcaatacttggctcctatgaaaaggtatagatatattcagagcctctgccgcctgtctggcttctaagctacactgcctatccacattcctgttgagagatatttgctgtgttgactgctacataactctgtccccacaccagtttacagaagtttggaccaggggtgcaggacacctaacccagagggagcctgtccatggctgaccttggtgcttagagtgaaaaagataaactgatcagccaggcaccgtggctcacaccgcaatcccagcactttgggaggccaaggtgggtggatcccttgagctcaggagttcgagaccagcctgagccacacagtgagaccttgtgtctataaaaaattaaaaaattagctgggcagggtggcatgcacctgtcttctcagctacttgggaggctgaggtgggaggattgcttgaacccaggagtttgaggctatagtgaaccatgactgcatcaccgcactccagcctaggtgacagagtgagaccctgtctctaaataaataaataaacaaactgatcaaatgagatcaatttgtggaactgaaaatgagagactgagccatccttatggaatcaggattatcaacactacacagagtgctaagtaggattctacattccatgtcccaggaaattgatgtgggggacagtctcctttccagatggagagttattcctgcttcaggagacacctgatggaatcatagtcaattggagtaacatttggaatcgtgcactcagtgttaattcactattttttttcatccaaaaacgttctgagcagttaccatgggctagaaattgtgctggatactggcattaaaccagtaggcaaaatagatattgttattgcacatccagtggggaagacaggtatcaaataatcctgcaaataaatatatacattttataaactatgattatggaggaaaataatgggttttattgttaccattatttttgttgtttatataatcataataataattataattactatggtgggtagagcagatttatatgggagattaggcccaagaaagtctttcctaaaataaaattttatatatatatatatatatatatatatatatatatatatatatatacacacacacacacacacacacatatacgagcaaagtacaaaaagatgaatgggaaatcaagagaagtgagaacattctaagcaaagggaagaatgtgtatgaaggctgtgaggggggaaatcacatatttgaaggtttaaatgagggctcagcttgctgggggatagagatcaatgggaaaggtaatgccatgtgtctggagaagttggtaggtgcgggatcatgcaggaccttgtcatacatggtatgggttttgattttattctaaagtgcagcgggaattagttaaggggtctgaagcaggggaatgatgtcatagctcgtgtgttagagattaccctgacttgtgagtggttaatggattggaagtgagtgagagaaagagaggtatctcaataggaggtccaggtaggaaacaatgctggtttcatctaaagagggggtgatggagatggggagaagggggataaatttgaaaaatgttttgaaaggagaatctgaaggtcacaacctttaaaatacccttgagatgtgtgtgttgggcaggaagggattcaagattcacttagaattattttaagggaaccagcaaagaatgaagagtgacattaggtggaaattcaacaaaggttttgttccatgcgagcaataagtatggtgcaaaacagccatcaggtgtgcagggactgacgtggggaggcagaaatcgtgccagagccaatggtgaccagaagctacatagtgatggaacatctagcaagctcagagtaaatatgtaaagaaaataattatgtctgggacatcccaagttctaacaataggtttcacctaagttgccatagtatctctcatttatctttgtgggttcatttttgccagatagttttgaaaatggggacttcctataaaataagtgtcattattcttattttatcggtgagggacaggggacatcagagaagttaagtaacttacctgaggtcacatagccaaaaactccaagcctggagctcattgtataaaaccatcctctgggtttaggaatgtttagctgaaagaagaacctttcctttcctctttgatcaggcattcatatcacttgcccctttttattttccagcaggtctcagtgtatccactaatgatgatggtgaccggttaggtttataacactgagtcaaaggtataagggttctatttttcctctgatggcctcagttgtagtaaatgttgggatttcaggttaaagttcatctcatttgatttcttataaatttggaattggagcttatgcaaatctagtgtttcagatatacaaactaagatgtttttctgatgtcattgctgtgtactgaaccactctacaacttaataagcaatggacacagacctccaccactaggtggaaaaaacgtcaacatcactttgcaaaaaatgcatttgagagagggagatattgtgatgaccatctttggaaacttagtagcttaaaacaacaacaacaaaaaacaatcattttattatcttccatagttcttggagttgactctgttcagctgtgcagttcccactcagggtctgtcacacagttgcagtcacacagtgactggagcagaagtcaccctgaagttgcttctcttacatgtctggcaatggatactggctgtcatctggaacttcagctagggctgttggctggaacatctacacgtggctattcatgtagcctgggcttccctacagcatggccactgagtcccaagaaagcaagtagaattgcctggcatttgatgacctagacacaaaattcacagggcataatttctgccctactccattggccaaagcagtcacaaagttctgcctaagtttaataagaagggccacagacctccaccactaggtggaaaaaatgccaacatcactttgcaaagtccgtatgagagagggagatattgtgatggtcatcttcagaaaatacaatctgccacagattaggtaacacacttgaaaagtgttaacactatgtatttgtgtacttagaaaccttgaacactttcactgcaaagtaatccatggctagtgttagtaatagaagttatagtaaacaagatctcttcccaatgtactttctgctccagcttcgctgattttcgtaaggttccttaaaaggcataaaatgctttttcatggttctttaccttcatccttgtagtttctttggacagaaatgatctcccaactgagagcttaaagattcaagaaaccgtccctgaatgctctggatacataattaagtctctataaagtgccctatcttggtttccacaactatgttttccttttgtgaataactctattaggttcttttttcataactacctattctcatttcaggtatgcaatgtactctcatccttctgaggatgttaattacacttactttaaggtcctgatctaattgctctcttggctctgtttccatggatttgaattcttccacttttgagtttatctttcctatttcatggtgttggtattatgcagttagtgaccatggattggatgtgaagttttgtgattgtggttccttgttgactctgctggatttgttagcattatgttcttgtgggaggggcggacagaaactcttattactggcagtttcttatccacactctgggggagggacaggaaatgtcactcaggagacggttgggcaggtggtcttctgggtgggggcagtttttcctaagcaccctcctctacccagaggattgttctgtccctccactccaagaactctcagtcatagtagctgcctcactaaattgagaagccagatggtttgggaagaggcaggatggttttcaatctacttacccacctatttccattccactgcctcacataactaatcacctgtaaacgtcctcacctgcttttgtttccagactctatcaccgctgggatgtttgagcctatcttctgcagctgtactttctgcctcagatcctgggctatggattcccatcttaagctaatcccatttaagctccatatttcagagagctctcaccgtttctggaacaccagcagttactctacgtttctaagtagggtgatgtctttgcatattttttaaaaactttttaaatttactttatgatttacatacagtaaaattcattcttttggggatggttctatgagttttgacaaatgcgtagagtgctgtaactaccgctgcaatcaagacacaaagtagttttgttcccccaccaccaattccgttgttctgcacttttatggcctttgtgaacctggcagccactgctctgtcttctgtccctataattttgtcttttccacaatgtcttataaattgaatcagacagtatctggcattcgagtctggcttctctaacttagcatgatgcatgtattaataacagtccattcatttttaattcctgagtgtaatttgtttgtatggatgtaccacagtgtgtttatgaattcaccattgaaggatatttgtattgtgctcagtttttggcaattatgaataaatccactttaaacatttgtacacaggctttgtgtaaataaaattttttatttctcttgattacctagcagtgggattggaggatcatattgtaagtatatgtctaaaaagaaactattttcccaaaagagctgtagcattttacattaccaacagcaaggtgcaagagtttcacttgctacatatcctaaattgagacttggcattgtcagatttgtgttttggtttctgttttgctttttttggtattcttacagatatatagtgataactcatttttgtattatttatgcattttaatgtttattttttatatctttgtttgcttgttcttagaaacagggtcttgctctatcacccaggctagagagcagtggcacaatcatagttcattgtagcatcaaactcctgggcttaagtgatcttcctgcctcagtttcccaagtagctgggcctacagggacatgacaccatgcctggctacttaaaaatttttttggtagagatggaggtcttgctatgctgcctaggatggtgttgaactcttggcctcaagtgatcttcccacctcagcctcccaaagtgctacgattatagtcatggactgccaagcctgggccattttttatatcttgattaacatttttagaaatttggcataggagggattacaaaaaggcaagccccaatttgaaacagatgttgcctctaatctctctttgtacctgctttttaataacctcacatgtgttacaaggaaattgtttacctgtttccctcactggactctgagcttctcaaaggcaggagtgagtcttgtccatttttctttcctcagtacccagaatgatgcctagcctaggatggacacatggtgattatttgataagtgagttgttcatgaataaatttgcccaatctctaattagaaagggtttgatttactcaacaatcaccaccctgagcattttcagaggaaaataaaatggctaggttgttttaatcaaggactgagttttgtaaaactggaaatgttatagggaaacgagataggatctaacattgcagagcacttccgcatgccaagcactaagggtgatattctcaggacatatctcattttaccctaccttgaactccatggtagcgaattggctgggacagagagaacatttgctttggatgaagctgattgtgtctctgaggcttgtgaccttgaataagtgactcacagcctccctttgcctctgttttcttatcttcaaaatgaatacaataatgcctggtttattgaatgggtttgagaataaaggacatgtatgtgaagcacattgttgtgtgtgtgtgtgtgtgtatgtgtgaaattgtggggaaaaaaataacatgaaatttaccatcttaacctttttttttttttttttttttttttttgagatggagtcttgctctgtcacccaggctggagtgcagtggtgcgatctcggctcactgcaacctctgcctactgggttcaagcaattctcctgcctcagcctcctgagtagctggaattacaggtgcatgccaccacacccggctaatttttgtatttttagtagagatgggatttcaccatgttggtcaggctggtctcgaactcctgacctcgtgatacacccgcctctgcctcccaaagtgctgagattacaggtgtgaagccaccgtgcccagccatccatcttaaccatttttaagtgtacatttccgtagagtttagtacattcgcattgttgtgcaaccaatttccagaactttttcatcttcccaaaatgaaactctgcattgctgaataataaatcccaatccccgcttctccagcccctggtaaccattctactttccatctctatgaatttgactactccagggacctcacagaaattaaatcatacagtatttagtctttttgtgactggctaatttcacttagcataaataatgttgtcaagatttgttcatatcatggcatgggtcagagcttccctccttttaaagctcaattgtattccactggatgagcagactacattttgtttatccattcatctgtcgatggacacgtgggttgctaccacctcctggctgttgtgaagagtgctgctgtgaacacgggtctacaaataccacttcgagatactgctttcagttctttggttgacctctgtttcacatgcagcagcactgacttccccgtttcccccattccatgtgccctagcagactctggaaggctaattaatttgcctatggcctgacaacttatgcattgctggggcaggattgcaacccaagttctctggctctgcatgacccattctgtcttcacagcctcactatctgaaaacttctcaggaggtaggattggcaccttgagggacagagaaggcttcttttcttttcttttcttttttttttttttttttttttttgaggcagagtcttgctctatcacccaggctggagtgcagtggcacaatctcagctcactgcagcctccacctcctgtgttcaagcgattctcctgtctcagcctcctgaatagttggaactacagacgtgcaccaccacactgggctaatttttgtatttttagtagagatgaggtttccccatgttggccaggctggtctcaaactcctgatgtctagtgatccacccacccctgcctcccaaagtgctgggattacgggtgtgagccattgcgcccagcccatctggggaacttttgaaggtctagaaaagagtaagactgatgatagtgacctttgctgtgaatttcataaccattcacttatactttttctgatagatccttaaaaatgaaatttcaaagcaaaatggggagatttgcaccctaacttcagtggggttgtgagtggacaaaatgtacaaggttgtcgacaaagtagcatgcttccacacgttgaccatgtgcagcttcaacctagatgatgcacagtgaacatttcatgaataaagcctgatatgggattgtctacaggttcctccaacccctgagtagagatgttccctcctagagacttgctgtagatcacgtttcatcctccaaccgtgggggaagtgtgctgtgttattacctgatcaatgtagtatctttattttgggggaaaagctgagcctcatttttctcatttgttatattgctttccttttgtgtggtcatttgctgtcccaggcatcaaatggtccataaacaaaacacttacccactgcacacacactccaaaaaagagcaaacaaatttcagagcaaccaaaatgttgttgctaacccagtccatgaaagctcatgcatttttcttggagcaatgtctgacttttaggtaaagcaccttgcaaactgccttgacacagcaggtgcctgcaaaacattttctttttctcttcctttcctgggttagaattcagatccagtaaggagtgaggctaagtactggaaatggaatgatgaaggagatggacatccgtcctgacctcagaaaggtgtggggaggctgggcacaatggcttatgcctgtaatcccagcactttcagaggccaacgtgagaggatggcttgagcctaggagttcgagaccagccttggaaacacagcaagaccccgtctctacaaaaataaaaaaatcagccaggcatgctggtgcatgtctgtagtcccagcaactcaggaggctgaggtgggaggatcacttgagcctaggaagtcgagggtgctgtgagctatgattgcgccactgcactgcagcctgggtgacagagcaagaccctgtttcaaaaaaaaaaaaaaaaaaaaaaggtatgaggaaaacaagaattgaaaataaatgaaagtattaatgtgagtaaggaagaaaaggaaaaggaatgttacaatataatattatattgaagtcctatcacccagtacccccagaatgtgacttaactgcagatgcaattagttgagatgaagcacactggagtaggatgagtccctaatccaatatgactggtctccttataacaaagggaaatttggatgcagacacacacagagaatgccatgtgaagacagaagcagagatccccaagccaagaaatgtcaaaggttgccaggtaaccatcagaagctaggagagaatcatggagaaccctcccaaggaactatccctgctaataccatgacctcagacttctagctctggggactgtgagattatagatatatttccattgtttaagccactccatttgttgttctctgttatattaccttagcagatgaatacagggagctacaggggtatttagtgaggggatgaagattagggaggtcggttggtgggcatggtagaaggaagatgctcaaggcagaaggaagtttcattccatagaggtggctcaatgctgaacctccagattcttcctgatatgtgctaggggcagcttagcttgacggaagaaacatcgatgttgccatcacacaaacctggcatcgaatcctgatgttgttacaacatgctgtgtgactttgggaaagccactcaacttctctgagctttggtttccttctttgtaaaatagaattgttatacttagagatatgagggtaaaaagtttttacgtggttaatgtgcctttttatttggcctttctgagtacacgacttttgtctgagttagcctgtggtaaccatctgctttggagagaaaggagagagaacgatgtggaaggcatgtgtttaagctgagacctgaaagatggctcagagttagtttggggaaaacataaaggagagcagaggattttacagaagaaaactgtatttttacatatggttaattgttacatgacaatttatcctaacgagcttgagtatctggtttctaatttcctaacacattagaactgcgagtaaagaaggctgcctctcactatgtggctggtaaaacagactgacaatgatggaagacaaaggaagactacacgatagaaggaattaggaggagagggacgcagagggaggagaagagaaggggcagaaactaaacagccatagtaggctggggctattgagtgaaggggcaaacatctcctgttaatagtatctcattaaattggatgaagtggctgctgtgggcataaaacaccctttagtcttttttttttttttatgctttaagttttagggtacatgtgcacgttgtgcaggttagttacatatgtatacatgtgccatgctggtgcgctgcacccactaacttgtcatccagcattaggtatatctcccaatgctatccctcccccctccccctaccccacaacagtccccagagtgtgatattccccttcctgtgtccatgtgttctcattgttcaattcccacctatgagtgagaatatgcaaaacaccctttagtctttagaatgatgatggtgagccaccaagggtgagttatgggacgttagggatgttctgtttcagaactgataacaatacattgtggtttcttcgtccacatatacatgatgctacttcaaatcaaaatggaactcctcctcttctttttgctgcctttgaaactcttgcagaatacagatgagcaaggccccctgccttctaaaactggattaggtggccctctcttgtgcttgcgcgggaacctctgttttgctgcttcacatcattcaccgttgctggttgcaactagttcttcatgtatcccgccatgctgcggatctgcctcctaccctagactgttatctatttgcagcacaaccgggattttgaaatgaatctctgtcccccagagcctgcataaaaactggctgaaagtgagcattaaataaatatttaacaactctagttttaaaatatttccatcctaaatggttcaaattttttttttaagttttcatgctcaaacatataaactcttgggtaacaccaatgcctcattttccaaaggttttatgattatatatgtgtttttttttctttattgcaaattcctgctggtctctctgccaccaagattcaaaaagattcaattctccttctacataaaccttttctgatgtaagcctaggctgctatattctcttttgacaaattcagggtaattttgagttggattggatacttcttttttccttgcttgtggacagaaaaaaacctacatggtatttcaaaccataattttaaggatttccctcaaaaaggttgctggcataaagatttggaaaggttagaaagaaaaacagtgctaaaagccagagctctgttctgatttctgaatgtctattctccttttttgttcttatgagactaactagtgcaattggccccagcagggacatctcctgcccattccctgtcattagtctggttttgaggcaatggaacaatctagactatgtccaagaattctgagcccagagaggaccttatggaaacctaacatcctcttttcctcatggccacctgttatgttgtcttggctttctaaacaattggaggcaatcaagcaagctttagctaccatatgttgggtgcttactatgtttcagtgcgttgctaagcatgatgatcataatgtatttgaacctcacagtgaccccatgaggaagctgttatggtcccaatttagagcttagaagactgaggcttatataggctttataagacacccaaagatgctgttggtaagtggaagagcaaaaatttgagtccaaaatggactgactaaaaactccattcttatttcattatgttgtcctggatcgtgctgtctgtggagagagagatggctgaggccacatcatagggtatagaaggtgtgttgcaaacagtggagatgaagaatgtccctgggcaggaccagtgtggcctcatgggctaggcaaaagcatggtccctcttgagtattgaaagctttagtagaattttatacaaaaaagacaccagtacttgtatgttcatcgcagcactattcacaatagcaaagttatggaaccaatgaagtggaaggagtgagggttggaaactgttgatgtgctcatcaacagttgactggataaagaaaatgtggtatatacacactatggaattctatgcagccatgaaaaagaatgaaatcatgtcctttgcagcaacatggatggagctggaggccatttttctaagtgaactaactcagaaacagaaaataaaatactgcatgttctcacttatggatgggagctaaacagtaagtatgcagggacatgaagatggaaatcacagatactagggactgcaaaagggaggtggatgggaaaggagtgagtgttgaagattacctttcaggtacaatgttcactatttgggtgatggctacactaggaccccgaccctgacctttatataatatgcccatgtaacaaatatgcacaaatatgtatctaaaataaaataaaatttgaaaaagaaagctttggaaaaattttatgaaattctttagtaagtggtataagagctgggaatcgttaaccaagcacaatgcctggaacaccatagacactaaaatatgtgaggaagaatggatggatgaaccaagctgaagaggcaagcacataggtaggttccaccaggaagcagggtatttctaatttgggaggaaacttgtttattatctgcatagaacagtaagttctgttctctggatagaagaaacaggccgaggcgggtggatcacgaggtcaggagatcgagaccatcctgactaacacggtgaaaccccatctctgctaaaaatacaaaaaattacccgggcgtggtggcacgcacctgtggtcccagctacttgggaggctgaagcaggacaatcacttaaaccccagaggtggaggttgcagtgagctgagatagcaccattgcacttcagtctgggctacagagcaagactccatctcaaaaaaaagagaagaagaagaaagaaggaggaggaggagaagaggaggaagaagaggaggaagaggaagaagaagaaggaggaggaggaaaagaagaagaaggagaagaagaaacaaaaaagcatagatctggccagcagttttctcatctgactgggaaattttgcaggaagaaggaagttattcaagacagaaggaagtttctgtccacagaggtggttcaatgcgtggttcaatgctgaacttccaggctcttcttgatccattctgggggcagcctagcttggtgaaggaaacattagttttgccaacagacaaccttgacatcaaatcctgatactgttataacatgctgtgtggctttgggcactcaacctctctgagctttggtttccttgtttgtaaaataggatggtttaacttaagagatgtgagggaaagttgtttttacatggttaatgtgccttttcctttttatttggcctttttattttttagatggagtcttgctctgttgctcaggctggagcacagtggcataatctcagctcactgtgacctctgcctcctgggttcaagcgattctcctgcctcagcctcccgagtagctggtattacagctaccatgcccggctaatttttgtattttttagtagagatggagtttctccatgttggtcaggctggtctcgaactcctgacctcaggtgatccacccgccttggactcccaaagtgctgtgattacaggcatgagccaccgcgcctggccaatttggcctttctgagcacatgacttttgtctgagttagcctgtgataaccatctgcttaggagagaaaggagggagaatgaagtggaaggaaacccagtccacacaactgtgtagggcccattgccccatagtggcaggttctgtggtaagaccccagctcttggggtatctggtatctcagagttattggggagtgccaaccaggcaaccttttggttagattatatccctctgtttcttaactggctcagctgccctgtgacagctcagagcttcactatgagctcctgctagagtctcagaggaagcaggacaagagactcctgcctcaagcatttcccacaactcatccaacattcctcccctaccctgcatctgaaacccaaagagggaaagtcggtgacatgatcttagtcttcctcctctctctttcttttccttctcacatccccccaagaactggaggagtcagacatcccatcccattcctctctggtccattcttgtaaaaatcctgtggtcttgccaaccaagtgcggtccttaatatgccgaaaggtggagattaaaaaaaaaaattagaacaaaacaccttccaaagacaaatgtcttccaaatgtgcgtgacttcacattgtattactgtctggctgccaaatcatttctgaatgttagagatttgaatattacctccttcagcagcaataaggaagtgcctaagtccacagattctagagtcagactgtcaggttcaaagcttggctctgctgtttccagtgatgtaactttgggccaaacctctctgtgccttggttttctcctctacaaaatggagttgataatagtatctcataaggatgcctgggataattcgattagctagtatatggaatagtgtggggtacctcataacccctttatgtttattatgtatacaagtgtgtcttcaccttcctcatcattatcaatatcatcattttttgtgttacttctgtaataaatctcaattcctcaaccctacccaggcatatggaagtcatgggccatccagagccaagcccacacactcaggaagacaagaagagaaaaacacattaaaaacttaaaaaatacatagtccataagcactgtgttctagttgataaagttgtgtcccatgaggatatgggttaacaattctgatattgctataattatgtactggaattgaacaagtaacaaatggatggtggataatgggagccaggtttattattcttggagtgggaggttacagataatcgagggaggaagctagaatgattcatctgacagtgagttagagttggagacatcaggatgacttcatgcttaggtcaatatagacacggatagttgcttctgtaaatttttgtagatatgtgtgtatatacatatattagcatacatatctaaattcccttaccttgtcagcatagagggagtagaaaaaaccagcacacctggcacctagattttggtttctaatattattctccaataaaatgaaccaggctccttgaagaaatggttgattcttggaccaggataacaaatctatacaagatgagcctggggaatcttgtattgccagaaagttagaaagtttaaaaatgaggggaatctgtcaaaggagacaattgaaatagtttccgattcccaaatttggaacaatctgagcaacaaaacaaaataaagtggtagtggattataacccaaggtataaaatacatatccatgtgtctacactgatatgaatacatgattgaatcaatacataaatgaggaagaagagacaaatcttccatgaggaataattccaaatagtttatgtagatatttcttccactcaaggaggtagagcataacccctactccttagatacggtgtgaatggcacacagtgacttctttccaaagagtaaaatgtgaaaaaaggggaaaatagaataattttatagaggagaaatctgtccaacacttcctaagccaggcaatagtttaacatcaatagcgatgagtcattatagtacatatttttgctatgttatgagaatgtcactttacctcagtgattcccctcactcccaaacccataaccccaatctaatcatgagaaaaatatgagacaaattccgtttggccaggcgtggtggctcacgcctgtaatctcaacactttaggaggctgaggcaggcagatcacctgaggtcaggagttcaagatcagcttggccaacatggtgaaaccctgtctctactaaaaataaaaaaattagccaggtgtggtggtgtgtgcctgtggtgccagctactcgggaggctgaggcaggagaatcgcttgaacccgggaggcagaggctgcagcgagctgagattgcaccactgcactccagcctgggggacagagcaagactctctctcaaaaaaaaaaaaaaaaaaaaaaaaaaaaggccaggtgtggtggctcacgcctgtaatcccagcactttgagaggctgaggtgggcggatcacgaggtcaggagattgagaccatcctggctaagacggtgaaaccccgtctctactaaaaatacaaaaaattagctgggcgaggtggcgcgtgcctgtagttccagctactcgggaggctgaggcaggagaatggcgtgaacccaggaggcggagcttgcagtgagccgagattgcaccactgcactccagcctgggcgacagagcgagactccgtctcaaaaaaaaaaaaaagaaagaaaaaaaaaagtccattctacaagatatctgaccctgtacccctcaaaactgtcaaagtcatcaaaacagggaaagtctgagaaactgtcacacgcaagaggaatctaaagagatatgactaaattctaagtttaatatggtacctagatattttgaaacagaaaagatggacattaggtaaaaactaaggaaactcaaataaagtgtgggctttagttaatagtaacatatcaaaattgattcattcactgtgacaaatataccacactaatatgttaataatagggaaactgggtctggaggatacaggaactctctgtactatctttgcagtacttttgtaaatctaaaaccgtttcatagtaaagagtttgtttaaaaaatttattgtttgaggccaggagcggtggcttacgcctgtaatcccagcactttgggagactgaggcaggcaggtcacctgaggtcaggagttcaggaccagcctggccaacatggcgaaaccatatctccactaaaaatacaaacattagccggacatggtggttcacacctgtaatccagctactcggaggctgagatgggaggatcacttgaacctgggaggtggagattgcagtgagctgagatcatgccactgcactccagcctgggtgacagagtgaaactgtatctctctctctgtacatacacacacacacacacacacacacacacacacatatatgtgtatatatatatagagagagagagagagagagagagataacatgagaagctcttttcctactgtctggaacacggtgtgtgctcgacaaaacaacactatttgaccatctagtgcctttctgggctattcctccttgggatatgctttgaaggagtcattatgttgtctttcctttaagatgagccagaatggtctagtttctgacagttaatatttgtctcttctgcatggagagacttggagcattctctcagtatttataactgagcatttttaccttaagtggctctgagttgcatccgttttatttccctgtttagtaactaagatatcccacacaacaacaggagttacacggtagttaccttggcgcaagtctgccagatgcttccaatgagtaattgtatcttaaccttctttgaagacgattgttggatatacgaggctccttctctgtcttaggaaggagagcacaggacaccatcaatttgtcgtttgtggaccaagggtctgcatggaaaaacagcatcacagaagggcaagtcttcattcattatttcgaagggtcgtaatgagttgcgcttataatgggtggaggggggaattttcttgtggcattggataaggagtacctttccacagaggtgggtaagatatctctggggatggggaatgtctagaagggaacttctgagagtgagacatgttactggattccatctattgctatgactgtggaaaagaaattatatatgcgggccgggcgaggtggctcatgtctgtaagcccagcactttgggaggccaaggcgggcagatcacctgaggtcaggagttcaagaccagcctggccaacatggagaagccccttctctactaaaaacacaaaaattagccgggcttggtggcacatgcctgtaatcccagctacttgggaggctgaggcaggagaatcacttgaacctgggaggcggaggtcacagtgagctgacaccactccactgcactccagtctgggcgacagagtgagactccatctcaaaaaaaaaattaatatatgtgtgtatatgcatacatatatacttgtgtgtatatgcatacatatatacttgtgtgtatatgcatacatatatacttgtgtgtatatgcatacatatatacttgtgtgtatatgcatacatatatacttgtgtgtatatgcatacatatatacttgtatgtgtatgtacatatgcatacatatatacttgtatgtgtatgtacatatgcatacatacatatatacacacacgtacacacatgcatatttcttctctcaacttggcaagggcaggatttgcagattataacctagatctcattcatgctgcattttttcactcaccctattgttctagttttcttggattccaacctgggcttatctccaatctgcatttttttttgtttctcctccctagctgaatatatttgtggaaaactcacaaagcaactgggttgccaggtctggtctctatcttcctgtccagtgaaaagaaaatgacatttagaaaacctagtcacaaatgtctgtttaataaattttgtttgttgccctgaaactggattttaatatttctgaatattcagtgcctggaagctagcacaaaatggctatctaaaactgccagaaatttgctttatgtggttcttaatgtgaaactggaaatgcaccttctggatggtgtcacttcttttgagagggatcgctttggtggggtattatggttgtgtctacttatattaagtaactactcactgcccctgaggtgtctcaggacttgggataaataatctaaaagcaaatactttataatggaatatcatgtattctgtttaataatataaaagtgtgtcccaacatattcagtgaggaacatctctgtagaattattttttttctttaacgaagtgtttagtattttctctggcagacctggacacagggtttgagcctagtaggttgagtctgagactgacggatcaaacagatgagagaaaggacttatactggaggataataggctttgaaggttcaaatctttaattagacagtctagtgtttgggatgtatttccaggggtaggggggcctaccattgagacattagttagcttactaatgtccttgggcacgctctatgcacgagtcagccaaattgttgtttgaaatttctgctgtagctctgtagaaaactgaggggcaatgcattttccatctcgaggcaatacctgggtttgccccatggacagccttccctctggtcagtttcagcttcccagaggaaatccagacaacaattgccttagtcagaactctacattgcaagtggcaggagccaggagccacaaaaaacactctttagaaaggggcttctctctctcctcagctgctttcctgtgggtgtgattcttattctttaataatgaagaaagattttctccacatggtaggttcaaattcacttgacttcatggccttttcgttgtttgactccaatggttccaagtagaaaagttgatggaagatggaagaactctgattggcccagcatagatcacatgctctcctctggtccaatcatcattataagaaggaggtattgggattggtttgattcaggctccatgctcgcttccatggccaggggtctgaattactgtatagcacaatgagccctcgctagctgggcacatactcacctgcttttcaactgccagctcttacatccctgagcgagggtatctctggccactggagctagctttgcctgtgaacatgggaagttgccagtgctaacgaattaacatctcccggaagcagctctcaaccaatgactaataggagtttgtgtgtaaatactaaggggtcctttgcccttggggtgacataattttgaggcatgcattcaatacgatttaccagaattccagagtgggattaaactccagtcgaccacattgcatcttgcttggcattgcactttatttgcttcttcttgttctctaactcccccatccttttgctacaagtatttcctgagatcacctgccaaatatgcttgcatttaagtcctttggtatgtttctttatcctttatcgccacttgagttgtgtgatgagctgccaatcacggtaactgtcttagtttgtgtttccccggaagtcactaagataaggactttgcacaaaaacagtagctatccaccaaaaaatatatcatgaaacacacacacacacacacacacacacacacacagcagcagcagcagcagcagcagcatacaatgagaacttaacagtaagccatttcccacaggaccaatacttgggaacaaaacatggctggcctgacatgcccaggggaagcagacaggaaccctggtgggttggctttggagaggagaatgtcagaggatcttgggctccaaggtgtggtgaaagccataccttatcaacaccttttctactgttactttattaatcctgggactctcccatcgcagctgaatctcggccaaaaagctatcgtggtagaaggatacatgcgtctctccagacgttggccaaagactgggttacttggcacttatgtttggcgacattcccatttaacacttgggcttgtgtgatggcccatgcaggtaaagtgataaaaatactgtccctaacctcatgcctcagctagggtatctctgcctgtttccatttgggtttgttggtttctaaagccacacattttccgtatgcatcaggggttgagttatctaaaagcaaagcctgggaaaggggttcagatgcatgtgactttgagggagtgttcttcaggtaacaaataaacacacacctctaaggttatgagggaagcagtgtaggaaaggttagggagccacacaaaaatggggctccaagtaaagtccagattcaggggttgtcaaactatagcccttgggtcaaacttggtaccacctgtttttgtaaataaagttttattggaacacagccacacccatttatgtagttgtcccacggtatccatggggatttggtttcaggaccctccaaggataccaatatcaacagatgctgaagtcccttataaaaaaatggcatagtatttgcatataacctactcacatcctctcatatactttaagtcatctctagattacttataatactagtacaacacagatgttatgtaaatagttgttacactgtatttttacttgtattatttttaactattgtattgttatttttaatttttttctgggtattttcaattcacagttggctgaatccaagggtgtagaacctgtggatacaaagagtcaactgtcttctgtctagggctgcattcatgctacaaaggcagagttgaatagtcaaagcagagactgatggcctatgtagtctaaaatgcttactacctggccctttacagaaaaagtttcccgactcctactctaaacttgtcccagtccatgtgaactctgaagtatcatcatttcataaagttatccccatgttgaggcaaggggctggtctttggacttcagtgtcagcgggacattggttgctgaccacttgaggatgaggtgtgtgaagcatattgaccccagggcagtggctcctatcagccaagagcaattctctgggtattgaaggcagctgtgagctgttagcagccaacatttgcagcagctgggaaatgggttcacatactagataaaggggatctttcaaggcaccactggcaaccaccgcagtgcatacctggatggacacacatgcttcatgaagccagagggaacccatactttccacctcaaagtgagccatcattatctcccagtgatgggatggatagacaggaggcgagacccattcccatttgggtctcgcctcctgtctatccatcccattgctctcaggatgaagatggtgacacttaccagtgttcactgggtcctgccaccctctccaaccccacctcattccagtttccttacactgtattctctagctgtgcatggccagagctcagagggcaattccttccgttgctgagcatgttgggttccatccagctccacggcttttgctcatgctgcttcctctgcctgaaataccctccctcatatcttccaccttccaccacactgaactattataacaaccctccttcctgtagatctcagctcagaaaaaccttcctgaatctctctttccttgaatctcatttcccttcaagcagccaatatttagtttgtttgtctttacatttgtttgtgtcttgtgcaaacttgtagtatgcaaaaatatacacataggttatattacttaacaaaaaatgctatactatttgctttcctttaaagcttccttttttccctttaacaatataaaccataagaaactgttcaagttttccttcattttttctaacacctgaaagatattccatcatatgtgtacatactatgtacatcatatgtattataataattcatttaagaattcccatattgatatgagctcagattgtttctgtgtatgtgttttcatttttacaaataatggtgcaaaaacatctctgaacaaatatccttacattctgatgcttttatttctgtaggctcagttgctaaaagtggtattgttcagtcaacatatacatacgctttacatttcaatactcagtgcctgatttcttcctgcaaatataggaaattgcatgtccaccagcagctttaagaggcctccctgtgctcagcatctctgccagtactcatgtccttcaatccctttaacatctgccaatctgttggcaaaggaatggcttctcattgttcttctgacttccatttctttgactgttactgagattgggcatctttttatacaaatatcatttcattgacaaaaataacctctctactgaaaggaccttaacatgttagtttaacatgttttgagcacatcttttgagatgatgtcagaaaaacacccacctgtcctcatttgctctccagtgaagactatgaactcaattgtgtcccatgtatctgtgaaccctctgctgttttgcgacttgcgtccctaaagggtggggagagttttggtctccagtgatgtggtgatgggagggaaggtagatggttctgccctgtctgtgacaatctccttctgtgtcttcacttccagatgccacccagatgaacaacgcagtgcccacctctcctctgctccagcagatgggccatccacattcgtacccgaacctgggccagatctccaacccctatgaacagcagccaccaggaaaagagctcaacaagtacgcctccttaaaggcagtcggtaagtgccacctgatggatctttttctctttctcctcttcgctctcctttgctgcttcttgtagatctctttatctccagttttctttcctaattcctttttctagctctctttttttctctttctgcttttctctgcctctatctcatttttgttctctctctgtctataaatatgtatatctatatatctatctatgtctgtctatgcattcattcatccatccacctatacactctatccatccattcatccatccacctattcacttatccatctacctacctacatatgtattatctatctgtctgtccatccatccatccatcatccatccatctactattcacttatctgcctatctattatctattgaatctatctacctattatcctatcatctgtctgtctatcatctatcaatccatccacccatccacctattcacttatccatctatctacctacctatgtattatctatctatcatccatccatccatccttctatccatctacctatccacttatctattatctatctatatcatctgtctacctattatctatcatctaactacctattatctatctatctatctatctatctatctatctatttatctatcatctttctatctacctattatctgtctgtctgtctatctatctatctatctatctatctatctatctatctacccatcttctgggtctctctacctgggacccaggtttctaaggaccagagaccctcagctgctttctctgacctagaacaagttctacattgctgtgtgaggcagggtggctgggcgaggggcacatgtgcggtgagggctatttcctggggagaagaacctggatgctcatttggtcccactgacactttaacccctttaccatctccatctaccctagctgatcctcagggaatcttgacatagaatctaggtctctccatcccagaaatgccttatactttagtgggtaacacccttcacctacaaagtccatcccatttctaagaagttggtaaacaatgcacgttcctatcccaggcaacttctgctcttcaggatttaagtatttacgggagtgggcagcctggggctgctactaatggagttcttaccaagtgcaagacattgaattaaacccttgttttctcatagtgattccaaggtgaagacacaatgattatcccaattaccagattagaaaactgagactctaagaggctaatataacttgcccaagtcaagcagcagtgggtgacagagctgagaattgaaccctatttttatccctccagagccactgcttccaccactgtcctggttccttcagttcattcttcaatttaaacatgagggggtgtgatagttaccctgacagtgactgaggctcctgaacagtttgctcataaaagggttctattggatagaagcaacagtcacagaaagcaattcctgactcctgattggctgtggcaacctcagggttccctaaatcaatggttctcacatgtggatgccaattactagaatcacctggagagcaggtaaaatataaggatgccccaggtccaccctggagatttcaattgaactggttgaggataagattcagacatgggcatttttaaagcactctgtggctgtttctagtgtgaagccaggggtgacagccattcatgaaaactacttcatcagtcccacatccaggaaaaccaaatcctatttcaaatgcttgctctgaatttcctcttctaatgaccttaatacatgggggaaattccttttctttccttctcactgtgtcctgtgagctctaagtttttctccctgtctcagaggagagattttaaagccaggctttccacttaacctgattcttctgagtctattccttggggagctagaaagagccaaacagatgtgagttcaaatcctggctctactgcttaccatctgtgtagccttgggcaacatttggcccctttttaaggtctcagtcttctaatctgtaaaatgggcctaaggatgcctgtgatgactcatattatagactggtaaaggacattcattcaacatacatttgtcacctcccttctccagagctccctggtcttgtttctagtagccccatggatgaatccttttctcatttccatcttagagcatgctcagatatcataggaaggtcttcttcttcttttttcttttttgagacagagtctcactgtgtcactctggctggagcgcagtggcacgatatcggttcactgcaacatccgtctccggagttcaagtgattctcctgcctcagcctcccgagtagctgaggttacaggcatgcaccactatgcctggctaatttttttttttttttttaagtagagatgggtttctccatgttgctcagctggtctcgaactcctgacttcaaatgattttcccagcttggcctcccaaagtgctgagattacaggtgtgagctactgcacttggccaggaaggacttctttaaacattctccttttccaacatggagtcctcaccttcccagcagaattgactgtcagaagctccgaagcattagaacaattcactttgagtggaatcccatttattggtagaggtcttctactctttagttattcataaaatttatttatttatctattctcacatagttttggttcccgaaaaactctgggcaggcagaaaaccccacaaaccatatactttcttttattatcaactgttcatcctattttctccccccactgccaagcccctcattggagatgggatgagagatacttgctgatcgatttcagtatgaaatatgctaatcctgttataaactaacaccagaacccaaagcactgacacaaccatgtgtctaagatgcatgtggtaaccataatcaacacacatcagattcacaaaacaagcattttggtgcctagcatagggccaggcacttcctaggtgcttagccagtgcttataccagaagtctatgtttgggaattcatgttccctgatctcttaagatttccagatggaatcattcaaatagtgactgagccaaatttataataccaaggacacaggatgtgcaaactgacacaggcttttctaaatctgaagccttgtaagaccctacgtactggttacccatgtttcacattgaatttctatgcccagctcaaccctcgttatgtcccatgaccacagattccttctattccatattgcctgtttgcacagcatatgcatcctaactgcattcaaatatactcagtgttactaggaagggatgagggctgttacctaggagagcaagagtcacggcatctttgccagtgtaactgtggaagccttcatatgctatttggtggcccacttccctttctgagcctcgcagttagatgataaataacatatgccattttattttattcttctttaggcatttaaaaaatcaacaggccaggagttgaagaccggcttggccaatatggcaaaaccctgtctctactaaaaatacaaaaattagctgggcatggtggcaggcacctgtaatcccagctacttgggaggctgaggcatgagaatcacttgaacctgggacgcggaggttgcagtgagcggagatggtgccactgcactccagtatgacacccagtcgctccctgggaaaatagcagagggatattctaacagaaattccttgattttatccaagatttatgtggagctcctctacatggcaaatgtctgcaatgcatttgggattaaattttcagtgtgaaaatcatttcacactctttgagtaaccctctgttcataaatcaggaacttctgaaatgtttgttgaatgaatgaatgagcttgtctttgacaagaataaaaaaaaaaggaatagcttggttgtaaggaagcactctaatacctcctagaaaactctgaagcatcccacgtgggacaccttccccagtcctagatggggttgatgtaccccctcctgttcttcatcctttttttctgaccactgtgagagttctcagggctttctctgagacataggtggtcttgtgaatctggagggccaatgaggagcagactgagggattgcttgactcaatgggttagccaggaatccagcatctgcctgcacatataaaatgcaaatcccataataaatgttctttcaagggttctttgttaaagcataatgtgatcatggtgtgaatgatgaaatgcattttattaatgaaattattaccagccaggagagaagttgtttaaaaaatggtttgccattgaaagttctgcaacctccgataagcagattcattttctaaatatttcaatccagagaataaggagaggttagacaatctttagcattcactggtaagctcaaaaatacttctggaaaataaatttctctgggaagctttaacatccagagctctgggaagatgatcagaggctctgtctcactcagactctaactgtacttagctggatgactttgagcaggtcaatgaagctcttggacttcagcttcttcatatgaaaaatgagaaaactgaactataagatgtccaagttccattttaattttaaaattagaaaattaaataattctactcattctagttattagaatgccttaaacatgtgccattcatttcctgccaactcagggaaaaaacggtttgaataaagggtgttaatgttggttgttcctgaggcaaattctccccaaacctgccttcctttctattttattgtattttatttttgtttgcttgttgggatcaccctcactcatgtttaaagagacctcttttcctttctttttctttttttttctttttttttttttttgagacagagtttggctcctatcacccaggctggagtgccatggcgcaatctcggctcaccacaaccgccgcctcctgggttcaagcgattctcctattgagagaattggacatgcaccacctagtcatacatggcatgtaactgcagaatggtttctgttcccaagggtttcactgcccagctcttggtaaaatattagcacacactggggaattgttagtggctaaaccgtataggactttgtaccagaagggatgatgactttgaattattccttcagttgttcattcattctccaaacattaagtctggtttcccttgactgcaggtcccactgaggcatgaaccaaatctgtcccatttgtcaatgtatccccagcacctagtgtcatgtggggtgcttagtaaggactcccaacacctatttgtaaaactagtgaataataccatatgagaagcaccttatctagcctgagaggggccttagagaatcagcaggatagcagaatatagcacagcctctggaatttgtcagggctgagtttaagacccagcttggacatttatcaagtaattggagaaattatttaacttcctcaggtctcagtttctccttctgtaaaatggagataataatgataacacacagataatggcttagaaaatttgatgatatagtgtaggtaaagttcttagcctgacatatgtcagtcctcagcaaatactgcagcatattaaagacccagaccagagttatctgcggtcatcattttcccctgatctcggagatacgctggtacctggattaacatgcaattgcccacatttcattttgagggagaaagggttggttccatattctttactccagtctgatgggaaagacatacatgaaagttaactcatgtcagggatctgataaaacaagcaggcaagcaagcaaacaaatggcttttctaagctgtcctaaggaccctcaaagaatcagtctagacctcttcaagttccccatcttcagggtggacaataaaagttgatgcccaggcatatagatactgtaatgttagccatcagagaaatattctgtttcaatacaatccatcagggaactattctttttcactcaattgactctccttactaaagcaaaaatgtaatgtggatttaaacatttcccaccaatgttgaggttgagaagtgggtcttgttatagaccgagccaaaaatgtaacctgaaaatccagttaagcatacaagttccctggcctgaggtgcccatatggttacaatatgggagcctaccttgtgattcttcacaggccaaagtttggaagacagacgtctttatgaaaatatccctaggccgggtgcagtggctcacacctgtaattccagcactttgggaggccaaggcgatggatcacggggtcaggagatcgagaccatcctggttaacccagtgaaaccccgtctctactaaaaatacaaagaaattagctgggtgtggtggcacatgcctgtagtctcagctacttgggaggctgaggcaggagaatggcgtgaacccgggaggcggagctcgcagtgagccaagatcacaccactgcactccagtctgggcaacagagcgagactctgtctcaaaaaaaagaaaatgtccctaaagctcacttggtggttcagagagggatgattggtacttccagaactggaaaagatcaccctttcacccttttatgtaattcctgatgggctttgcaaacagaaagttgcctgcacattgacatttatctttcattagccccttgtccagtttttcctctaggtttctgattattgaactcctaagtgaccaaagattcatgatcatgtgcccttaagatggctcaatgcaaccttggccattgagtataagaaagagacaggatgtaccagcatcattgataaaatgctgcgtcacttcatttctaattcaaaattttaattttattaaaaaaaaattgtctgtgttgctatttgacagatgattgacattttgccagaatcacaaggcattttccaatagcactttttgaaacaacagcaacaatacacttcaatatggcaggaattccctctttactcttggaatcatgagtgaaaaccctaaaagccatacatgaggcacttggccatggattggcctctactagtttaatttcttttcaagttagggcagaaagggggctcacatcactgagctcataaacagcacacctctgagggaggcatcagtaccccccgttttgcagatggggaaacaagcttagcatagttatttccccataatccgtacttttagtaaatggcagagccaagtctcatattcaagagtgcttgacttggaatcctatgttcttcccatgaaactatgctgtcttctgcagagaaatttctagcatctaaagtatgtaaccaggcaaaagaaaagctggggaagcctatcccctgctcttctgggggaaggagagcttaccaaggtactcatcatttttctttgtttgaaagtaaaagtttggctgggcacagtggctcatgcctataatcccagcagtttgggaggccaaagcagacagatcacttgagatcaggagttcgagaccagcctggccaacgtggtgaaaccccatctctactaaaaatacaaaaattagccaggtgtggtgctgctcgcctataacctcacctacttgggaggctgaggcaggagaatcacttgaacccggggggcagtgggggtggaggttccagtgagtcgagattgtgccactgcactccagcctggacaacaaagcaagactctgtctcaagaaaagaaaaaaaaaagaaagtaaaaatttccctatgatgttgagtataattgaactctagtgtatttgaggtatgctatactggaggtatattttacatacagtgacatacacagttcataattttacaatagtgtgattgtttaaaaaaaaagcatacacttggttatccacatcccaataaaaatgagaaatattttcgtcacactgaaagttccctcatatctccttccttttaataccttaggtctacttcctcttcatgagcatttttcaccctcaaagtatttttctaatgtccatgagtgtgaccaagtacacagtggagccttaactaaatgttccgtagcctatacatcatcttattaaatgccctattgtcaatgaacttataaatgaaaattcattattgtaatagctaagccctatctgagctaatgggaacagaggtgacaaaataatggttcctgccttcaaggcaaacagcaatggatttaatttggggttcagatggcttccctggagtcagcgacttgttggcttggtcagcgtgtggccatccacacaggaagaatgggggtcgcaccactatttccagatgaccctggctatgggggagaagagaaccgagtcatcctgggtgggcccgactcagttttaacttcctcactcttctctcttctgttgctccaattgtccctcttgtgagtgatgaggggtgtacagttcagatccacgggggggatgtggcgatttgagcatcctttggcacgcctggggaggccagccagaaatgtttaaatggggccggatctgtgctctgtaatcattcagatgacagactgttccctgcgccttcactcagcctgatatatctctggaaatagtgccaaactgttgaggacttggtctttctaggtagatgcctaagaaaggaaagagctaggaccacacgctgattggccaggtctccagccaatgaggagaggtctcgtgggtagggttgccccactttaagcaaaacccaatcttacagagaactatcaaagaaaatgcgaggttggtgggggttgggttgggtatagccttggccaattctcagtatccttcattttatgaaaggagtcattatggaattctgttaataatgttagatctcccagggctcattcgggacatctgaaagggaattcaattcggataaactgatttataatgaaaactccaggcacacacctgttctgtaaagcaatgtattactcattatgggattctcagataacaagcttgatctcgttaccgtttagaatttccctaccttagaaagggtgactctgtggataaaattgaatgcattccttcattcagtcatattttccaaacacagaatgtgtgttaggtactgtggtaaggtagcccccaccccatggggcctgtcacccagcatttaaagtcgcagtcagtagagcctgtcccaaccttgaatctggggctaataatgtgccccttttcaggagggggattgcagtggaacacgatcaaagtctatctcttgtcatcagagtgtagtcttgagccaaggtgagctcatataactcaaactttcctttctttctaagcaggttgaaatttacagccagattttctacctaagaattatctttctgccttacgtaactgaaaatatctcggcctttttcaggaggcttcttttgatcttctgttgggtgttaacgtgaggctgcttcaaggccttgcagaaagaggtacacacatagctgcattttcacacgtggctcccttccctgttccctgggtcccctgaggcctgtccctgcttggaggctgcagcaggggcagccaacagcacctgggtgtgagggcatagtgaacatgggtgccctgcaaacagatcatcagcatttcttgattgttatttttttaggaagttctgatggtgactgggcagtatcgacacttaagtcaccaaaaggtactgtacagctttttctagctcttttgtccaggtgttgtcaaagttagcattaaataatgaagggatagagagtcctggtgtctgtgtgacctgtgcacatgtgtgtctgcatagggtggcatctgcaagtccgtctaagttccagtgtgtaggtgtttgtgtgtttgtgtgtgtgtgtgtgcatctagcaattgttggacaacgtggtagccctcacttcccaatatttgctgcctgatggaaaatatcactatgagaaatcatgccaggtaaggtgaaatatgttgatttttctcagaaagctgcaatggcaaatggcaaaacacaaggttaattaatgggggcggggcgggggaagaacacagcttctgagggagagaaaaacataatcaagttattggccaagggtcttgggaatgactagccttttagagaacagaatgctattttcaactttcctgggacagcgtggtgagcagagagggttaggaagttggtcgacttgagtctgtgagttaacccagctgggtgaccagaccaggtggcagctatcattaattagcgccctactatgtgccagaggactggccctttacatcattttatcatttaattctatgatgatcaggctgtgtaggcattgtcatctgcatttagaaatgaggacatgatgtctaagtatggataagtcttgctggtctagagtcatgtgactattcagtggtagatctgcagtttgaacctctatcagtctgacccttattctaagctattttccactagggtgtaatggaagcagctctttttagaatagaccagaaacacccttctccatatgctttgttggacttggtggagaagtaactgacctaaggaggtggaggtagaactatttatctatttatttatttatgagacagagtctcactctgtcactcaggctaaagtgccgtagtgcgatcttggctcactgcaacctcctccgcctcccaggttcaagggattctcctgcttcagccttctgagtagctgggattacaggcacatgccaccgtgcccagctaatttttgaatttttttttttagtagaaacggggtttcaccgtgttggccaggctggtcaaaatcctgacctcagatgacccacctgccttggcctcccaaagtgctgggattacaagcatgagccaccatgcctggccagtagaactctttaatgagctcgaactggggaaaattaggagacattgccaggatatcagcaagaaactggtgtattagtctgtttcaatgctgctgataaagacatacccaagactgggcaatttacaaaagcacaaggtttattggactcacagttccacgtggctggggaagtctcacaatcagggcagaagggaaggaggagcaagtcacatcttatgtggatagcaaagggagagcttgtgcggagaaactcccatttttaaaaccatccgatcttgtgagactcactcactctcacaagaacagcacaggaaagacccacctccataattcaatcatctcccaccgggttcctcccacaacacctgggaattgtgcgagttgcaattcaagatgagatttgggtgggggcacagccaaaccatatcaatagttgtggccattttttttttgccgtttcaaaagattattctggcttctaagtggagactggattaggggactgtggactagagttgcagacacccactggaaggctcttgcaggtgggtggtgacctgcactgaggtgggtagaggatggagagaagaaaatgggagtggaaggatcattgagagactacaaaaagtactgagtgaggagggggagggatcatgagaccaatggttctcacgttgtaaccagcttgagcacacatcagcatcacttggagggttgttacaaacccagattcctgggccttacccaggagcacctgattcactaagccttggctcagaaacatcctgagttgttgcagggaggagagtgcattctattccctcattgggaaagagagctttacatcagtgtatttaatgagaatcccctgactacctggctgttgccttcagagagacagatttttgggttttgcattagataataagtattcacatgtcaaagtccatttttagaaatgcaaacaatttggaacatgacagacctcctaatttgaggcattaacttcttttttccctccctgtgaaaaacaaagccgttatgatctctgtgacagcatttggaggcagcctgcatttctgtccttatatcatccttttgttgtcagatgcatttagaacatatttcagtttaggttaaaagcaaggagctgttttctacccaaaccaagctaacttcacctgtcctgctaaaggcacctttatcctgccttgtcgggggagaggaaaagtggtcccagtgagaaccaagttcctctggggtcattggtctgcctctagtgttctctactcaacctctagacccagactctagatgaggtatggtagcaaggttagggagtttgtgtgcccccaccttccacatcctgccactttcttaaaagggagagagacaggctgggtgcggtgtctcacacctgtaatcccagcactttgggaggctgaggtgggcagatcacctgaggtcaggagtttgagaccagcctgaccaacatggtgaaaccctgtctctactaaaaataccaaaattagccaggcgtggtggcacgtgcctgtagtcccagctactcaggaggctgaggcaagagaatcgcttgaatccgggagatggagtttgcagtgagccaagatcatgccactgcactccaccctgggcggcagagcgagactctgtcaaaaaaaaaaaaaaaaaaaaaagagagagacaatttggatatgatgggcttagactcaggcatatatgggttccaatacaggcaccatcatttgctagtcttgttgtcttcaacctctctgatcccctattttctgatctgcaaaatggagaccatcatatcacctacctcctaggtcgttgtgagataaggtgttgaaaacacgtgtcatagtacctggcatatggaaagtaataaatgcatgcagttcattactggtattagtagtactgttattatcagatgagcaaattaaaggctctgaaaagccttgtggtaataaaaactggtgaactctttttaacccaccatttcccaaacacttttgacatctgatctctttgctcttaaggaagaccgatgaacatcttaacattcagtggcatgaatgttgctgggaacctactttgggaacatagggcgtgggcagagaagtaggtagaggtgcagatgtcactggggagcagtgggggagatgggaaaaggaagaggtagctgtcaaggggaaaggacaaggtccttgaagatacaagtttcttactgccacctgcattgataatgactccctttggagtgtgtctgccaggacaggaaatgataaacatcatgctagttggtacgatttatttttcaccacctagggcttcccatgcaagttgccccctagtggtcactgctattgatccacccacgcccagccttggaaacaactgtcacaccattttaaaatccacccacctgtcacacctgtttaaagtccaccctgggctgggcgcggtggctcacgcctgtaatcccagcactttgggaggccgaggtgggcggataacgaggtcagaggatcgagaccatcctggctaacacggtgaaaccccatctctactaaaaatacaaaaaaaaaaaaaattgcagggagtggtggcgggcacctgtagtcccagctactcgggaggctgaggcaggagaatggcgcgaacccgggaggtggagcttgcagtgagcagagatcttgccactgcaccccagcctgggtgacagagtgagactccgtctcaaaataaataaataaataaattaattaattaaaataaaatccaccctggaagacaccatctcaagaccagcagactgtcttcaccaagatgaagccgtgtctttggaaatctgtttattttgcaaacagaaactttaaacttaagcccagtgctacagcaaggcaatcaaattaggagaaactgccagcatagactgcagtgtaatctctctgcttctgactagaatcagcctgcgtccccctttccaagctacatacatgctccacgctcccatttctaccattgctccaatagaggaaatcagagaatgtactctctgtaggttttgcacagggcttggcttggtatataataggtgctaaataagagtaaaagaggccagtactcacaaagtctccatttatctctgctttggagatagctcttagtcatcctgatggaatctttcagaaggaaatacacttcactaggccgggcgtggtggctcatgcctgtaatcccagcactttgggaggccgaggtgagcagatcacttgaggtaaggagttcgagaccatcctggctaacatggagaaacctcatctctactaaaaattgaaaaattagccaggtacagtggcatgtgcctgtagtcccagctacctgggaggctgaggcaagagaatggcttgaaacgtggaggcagaggctgcagtgagccaagaacatgccactgcactccaacctgagagagaaggaaggaaggaagggagggagggagggagggaaggaaggtaggaaggaaggaaggaaaaaaagaaggaaggaaagacatttcacctagcttttctgcttttatacatgaggaaactggggtttcctaaaaccgcaaaagaaaagtacgtcacaacaggaccagggtccagacctcaaagaggggcttgaggacttgacccagaatcactggagacgcttgttacaaatgtagatcctgggcccactcactcctaaggaattagaacatctgagtgtcgtgtcccagtattcatttttaaaatgcacctcctgggtgattcttatgtacattagagtttagacctagcttttcctaatcccccaccctagatgcaatcgcagtttgcgacacagcatccgtttacataccggcgttcttcccaatgtatttttgctgtttgctgaaataaaactgttttcttagtggtgatttgagctggggccacagctggacggtaacagcattgaaagtggatagtgttgggtttggtttcttgctctgccacttattggcagtgacagagtaatttgtcagccaaattatttaacatctctggaccttagttccttcatctgtcacgtggaaagaatgatattgcctgccatgtctctttaagagggtttaaatgagacaatgtacgtaaaatcgctaaaccagtgtctagcccatagtaggtactcagtacatgctagttctttccttcttctaagaaaattgacttagcccaatgagaaatgctcatgcaggaggcacaagacaatagacaatgtgcaatagggttacagttccattggagtgcatgcatcctatagaccatcccaggggagggaacacccatcgaaaggcagctttaaaacattacttcatgaaatttgggcttttgcaatttcctgattttggttattggtttggtcatgagccgccgggtgcaaagcaggtggaagacaggagggtgatgtgaggtgaagttttttaataaaaatcaaatcctactcgctcctgagttcagtcccctttgaaaagcacacagcaagtgctgggattttgatgagcttccttgggaacccatagggcatgaaatgaatgcgcaaagagggttctctggtttgtagaaaatgctcttgcatcaagattgcaataaacatttgactagtttggccgtgtgtccttccgaggctaacccagccagatcctgttcattccaaagccatcttgcgtgacactcacagcacacacagtaggcaatcaacatatattttgttaataaattattaaatgaaactgggcatagtgttcaaaggaaattttgtcttttctgaaaaggtactgggaaatgagaatcaaccagagggaagtctggaaacctgtattctagacccaatactggtttatccatgtgacagtctttgagcttggtatataacaggtgctaaaatttcctctcctgaaagatggaaagcttgagactattaatttttttgccccctgagcctctgtaagtaaatatcccaggttttgctctgattaccttaccttgtcatgtgcccacctctgaacaaatttgtaggaggagggcaaagaaatggagaatgcctggggcatggggaagtggagggatatgacatccaaaccacatggattaggaataggagagaggctttgggaggccgaggtgggcagatcacctgaggtcaggaattcaagaccaacctggccaacagagatggtgaaattgtctctacaaaaatacaaaaattagctgggcatgatagtgggtgcctgtaatctcagctactcaggaggctgaggcagaagaatcacttgaacccaggaggcggaggttgcagtgagccaagatcacgccactgcactccagcctgggtgacagagtgagactccatctcagaaaaagaaaaaaagaataggaaagagatgcatctcacctgaaaattgggggctcttcttggaagtatggtgagtgaatgattggcatttttatcagtcagctactgccacaataacactgcgtaacaaataacctcaaatctcattgcttaaaatgtatttagaccagcatttatttagatcaggagtctatattccagtgatttcagctgatgtgggaggttcttcttatctcaggtgatttcacccatctctctgggagttggctggatgttgggtgatctaggctggttttaactggaatgacttgggtgacttgactctgctccatgtgcctcatcctcaaataaggcagcccagatatggtctcatgagggtgggagaggtgcaagagagaaattcaaaccagcaagcacttctccaaatgcctgtatgtctcatgtctgctaacatctcttagtcacacggaacagagtgtagagatggagaaagtcaaagaattgattcatgcattaatctaacataggatcccaaatctcataattatctacattgacatggtcccaggaaactacagccaagaggaaggtgacaagtagggcttagaattctttcccttaatttgcttcatttagaaaaccaccagttgtatgaaatttcaccagctgggaggatgattggaagacagaccatgcaatgaatttctggaaaaaaaaaatctctatctatatagcagcaatgcacaggaaggcagtgagtggatgcagttccatccagaaccctgtgtgggaatcggtgggaggggatctgtgctcagccatggctggagaatgagcctgtccaccgttgtccagtagcctttcagaagatgttgactgcacagcaggactgcctaagtgaagagagaaagggcctgaggtttcagagggctcctggcagccacaacaaagggggcccatggtacaggctggacagctttgttgcaaagcccaagccaggggctgttttagaattctccctagcaaaggctccctcctcactctggattaatagtttgcctatatatgggattttagaaaaaaaaaaaatcacagtaccaccgcctgttgggagccttcagggttaagactaaaaaagggccaggctcctggacgcctttttccggttttctctcttagagcaatatggctttgggaaagatatggtgccccgtggggagggccagatgccccgtgcttctttaggacctggttcatgtgcagcctccgctacttgtgtctctgcagcaaggcccggaggcaggtgaagtgcaactaattcaccataaagacaaatcttccatctactccctggtcctctcctgcttaggaaactcaggctttttttttcctgcctttcttgtttctgtctgctgagacagcctctggaatctgcacaactttataccatgtagttcaaaagaagagagaaatacctggactttttttttttttttttttaacaacatgaactctttccctatcactttttaattcagcttgtgaagaagaagaaagcagagaccgagaaaacggtcctatataagttaaatactgttttacggtactaaaatgtcccacaaatacagtgcttaagagaaagaagtatttcttttttaaacaactttattgagatatgattcacctatcatacaattcacccatttaaagtgtaaaatccagtggttttcagaatgttcacagaattgtgcaaccatcattacagtcaatattagaacattttcctcatcccagaaagaaactctataaccattagtagacattttccatctcttactgtcttagcagtcctctcccagctaacccctggttcaagcaatgacttgcctattttgtgtctttatatatttgcctgttttggatatagctgtctcatgtgatagacctgtattagtttgttttcatgctgctgataaagacatacccgagactgggtagtttataaaggaaagaggttcaatggactcacagttccacatggctggggaggcctcacaatcatggtggaaggccaaggggaagcaaaacacgtcttacatggcagcaggcaagagagtgtgtgcaggggaactccccattataaaaccatcagatctcatgagacttattcattatcacaagaacagcacaggaaaaacccacccccatgattcagttacctcccaccaggtccctcccaccaggtccctcccaagacacttgggaatcattataattcaaggtgagatttgggtggggatacagccaaaccatatcatgacccaaggagagtaatccaggttggtgggcagctctactccgagtggtcactccaggacccaggttcctccaaccttgttgcactatgactcttaccatcttgtcctcatctgcattgttatagttggttgctgtcactgtgtaattctggcctgggggaagagggaagagaggagacctagaacaaggatttctttttttaaagcaagtcaggtaaagcagaaataggacacatcacttttgctattatttcactggtgcgatatcagtctcatggccaaatgtggcttccaggaaggctggtaaatctagttctgagttgagtgaccatgtgtccaagaaaaagaaggtagactaaatctgatctgggagataagaagcaggcagccacagcatcttctctgatgggaatgtacatttcaggagatgtaccatgcactatgcataatgttctgagttttcgcaagccttgtctcgtttacttctacactgcactccacaaggtgtgtgtgtatgtatatatatatatatatatacatacacacaccacaaggtgtatatccacaaggtatatataacattatcctaattttataatctttatattttctgatgacgacagaaatagcagttactaccctttggatacttgctatgaggcaatgacattggccttttttcaggatgcaacgtcctctacacgattctcttcaatactctccatccccaggccacataggcctggttattttagtttcaattttataggtgaagcttagagatttgaacccagatccatctgctgtcaaagtttatactctttcctccatatggtaaagaagattttgtagtcacaaaagtcagacatggctgggtgcggtggctcatgcctgtaatcccagtactttgggaggctgaggcaggaggattgcttgagctcaggagtttgagacaggcctggacaacatagtgagacacccttctctacaaaaataaaaacaaaaatagccaggcatggtgttgcatggctatagtcctagattctcgggaggctgaggtgggaggatcacttgaacccaggagggtcaagtcagtagtgagctctgatcatgccactgcacttcagcctgggtgacagagtgagatgtgcatatttccaaactttgttatctgtcatataaaactggtgcattgaatccttcaaactcccagccatattaactcctctttccttctcaacattcccagatctcatttcttgtttttcaagactgggggctctaccatagctttcaagagcctagtgtaggattcaaaaccaacacgttggttctttgtcatcatttgtatcagtctgttctcatgctgcgaataaagatgtacctgagactgggtaatttataaaggaaagaggtttgatggactgacagttccacttggctggggaggcctcaaaatcatggtggaaggccacggaagagcaaaagcatgccttacatggcagcaggcaagagagggcatgtgcagaggaattcccctttataaatattgtcaaagaagcaatattcattgtccattgcaggcaatgtagaatgcctacattgcaatattctatactgcaggcaaaagcttccataaatattgagtgtgatggccataacttgaggcagtggagccaggtgtcctgggttcaagtctcagctccatttgttggataaacagccaaagctctctgagcctcagtttccctacttataaaataaaaccaatggtaacacctacctcattaggatgttgagagtattgaaggggatagcaaatgtaaattcctagtgaaggcagtagcatagaacacacacttaagaaaggtgagcaattactcagtttgccattgacaagagtggggaaatagagaggaagtccctgtctctactcagacttctgatatacccaaacagtctctttaatcaatccctgccttcttcacctgactttattctacctcccttcccccgagctaggtctgctaaagagtatccaggtctctgcaaattctcagacaggaaaatggatcctagttcgcctgtctgcgacataaaagcacttaacctgagctccagcccttcaatccctgtaaagaacagatgactcagtcttcggtgatacagactgaatgaccaggagatgtaatatcctgcccatttctcatatttcagggactgtcattggaactggaatatcatcagtgctttccttctttcatcacgtgcatattattgcacgcctgctgtataccaggcactgggctggacgttgaggatacagcagtgagcagaacagacacaacctctgccctaagtggagctttatattctggttaagggagacagagcatacacaagtaaccaaaaaagataactttatatagtaatatgagctatgaacatattaaaatagggataggtcatcagagccattggtggaggtgtcttctttgggtattaggagggtttttcaggaggtagcctttggtcacaggtccagatgacaagtagtatttaggcagaggaaacagcagggatgatgtccaaaggtcctgagatggtgacaagcttggcgtgttcaggaacagaaaggaatctcatgtatagtggaatagtacccccctaaatccttgtccattcagaacctcaggctgggaatgcacatggaaatagagtctttgcagaggtcattgagttgaggatatattgaattaatgtgggccctaatcctgtggctgatatccttataagaagggagaaatttggacacataaacacacgcacacacacatacacacacatggaaaatggccacgtgaagtccaaggcagagattggaatgatgtagcttacaaggcaagagatgccaaggattgccagcaaccaccagaaattcgaagaggcaagaatggatcctctagcagagccttcagatggagcatggcccggccaacttctggcctttggaactgcaagagaatgtatttctgttgttttaagccatcaagtttgtggtactttgtgatggcagctttaacaaacgaacacacactgtgatgtgttcacaataggtatggagcagaggagggtgcataagtagctagagtccacgtcaaacagacctcagggaccactgcaaagaatttggattttgttcttaagtgtaatgagaagattaattgctgtcttttatcatacccttgagcgaaaggcagaaaccgatgaggaaatgtgaaagctttggttggggcattgcttaccaggtgaaatccatcacctgtgacccaggaatattaccaagaaagaatgagtggtaggaacccctccctaagatatctttgcctcaaggaaaggaggtaggtgggaggctgcctgctgagaccctcagatgtgcagcttgttttgggaactggttattaccttgacgttctccctttccacggaagccaggctccatcccgccccgcacctgtacaagtgtctgctgctaattaagagagagacagatggaggaaggtatagtttaattttacagccccagtttcttcaaggcaattagggtcattagaaggaaagcaccttttcctttcttcttcttcttttgtaaatgaagaaaagtcaaataggagagggccagtgttgttgaaaggctcacacatctgtttcctggtcagtttgtcagccatctgcccacgaggtaccggggctgattaggttaatgcatttattaatggggcttacaagactgttcaatgaatctgttattcttttgcaagtagctttttaatatactaagacagggactacactgcacaaagccaagagtggctagataagcatttctttcccctcacctggctccaaaccagaggggaacagaaacattatgaaaacaggttttcatgaaaactgcacttccaggtaatggaaatgattcatccatctaacctctaaccacctccttgttgttgaaataatcttgaaaatatctctttggaggatagtttcatgcaccaggcaccagttcagtgcctacactgtgcttctctaagagaccacctgagtcctagggtgggagaatggttagttaaatgaataggcatgaatgatataatcttgcctataggacattagatggcctgaggatcccttgccttcttcatctataactcagatatcctttcaggttcttgaagctactcggctccttctcacctcaaagcttttgcaaatgctgtcatgtatcagttatcaactgctgcataacaaatgactccaaatcttagttgctgagcatagcaaccatttatcgagatcatgattctgggtcaacggagaagttcttgtttgggctggattggctcctctcagttggattttcttggtatctgggtctgctgttaggtggctgatggtctaagatggcctcactgaacatactgcagttagcagttggttagttgtgttgaacaggggtaactggtctatgggtttctcatcctccaggagtctaggggatcccttcttcacatggaggcagatttcaagagccttagagtagaagttgctagaatctactggtccaagctcaccataatgccaggacatattcaaggcatggggaaatagattccacttcttgatggtaagagctgcaaagtattttggtcattcttggaatatgccacatattccctcacgtgggttgctctttctgttactcttcaccttctgatctcagcttaaagagttctttctcaagaggcaggatgaatgcctgcctctctagtagaatgtttattccaggatggcaggaaccatgtctgcttctgtttctgattgtctttcgtatttcaagtgtccagcatatggtgggtacctgtttgatgaatgactaaatgattgaacaaacagctcgaagactgcagcatggagaatggattacaggaggtgaaacaaggcaaggaggccagtttggttactgaagtagaacaatgttcaaagggggtaggagaaagggaataggttaaggaaatatttgttagatatagctggaaggacttgttggtttgacagttgtgctgcaagagaagaggagaatgaagtcaaccattgctcccaaatttctggcataagtggctaaggagtgagtggtcccacgtgagatgtaaggaaaaggctgaagaacagatctgagtaatgttgctgggttcagggatgacaaccttgggccagagatgctattgaatctgtccgggaggtaactggatatataaattttgaagtctaaaggggaatcttagattatttttctgttgaagtttcatggcactggaaatcttgaactttcctctaaaaggcaggaaaataggttcaaatcccagctgtaatgttagcttgtgctaccttaaacaataaagcttccctgaccaccaactccctcctgatcagatcaaggcccctttgtgtgccctttcatggagtaaactaggcactcaacaaacatggtgggtggaagaaggaaagaagggagacagaaaagaaggcagcttggtttggatgaatgcctgctttgtgcctagtaagttgcctaccatagagtaagtgttcaaacaatgtctgtcaaatttaatccagggcttctttcttaaggcagggaataggtaaaatataggtattgagcatttactacattccaggaattgtgctgtgtagcaggtgtatctcatgcaattcattgctcacattaaatccaagagtggttaatattatccccatttcacacctaaggaaacaggcataaatggttaagtggtgttcccaaggtctcataaactcagatctgtctcattccagagcctgcagactttctttttcactccactcttgccccaagtaccaaacactttctgtgctcagggagtacccaataccagattcaccaagcaaccagctcagagttaggttaggaggatggtgtggattctccatgtgggactcactgtttcctcttaatgggattttccccccatctgcacggatatggacagacttgaatgcctctgtatctacttttctttagaactttctgaggggacatcatgtattgaagctgctgggatgcttaactcataatttattttgtctgcttctcagaaacaggaaccattgaatgcatcccttgctcagagcagacctcagactggtctgatgtctggaaagaggaacatgggaaagaatgatgctggatcattataagacatttaatgagggcgagtgagatttttcagtgaaagattactgggaggaaagtgagaaagatagcttccacccctattcttgccctatattctctatgttctcactgtattttgctcatatattttttttaatttttaagttcaggagtacaagtgcaggtttgttacataggtaaacttgtgtcatgggggtttgtcgtacagattatttcatcccccaggtattaaacctagtacttattatttttcctgatcctctccctcttccctctctcatcattcatcaaatatttactgaggccaggtgtggtggctcacacctgtaatcctagcccttcgggaggccaaggtgggtggatcacttcaggtcaggactttgaggccagcctggccaacatggaaaaacgcttctctactgaaaataccaaaatcagccaggagtggtgtcacatacctggaatcctagctacttgggaggctgagacaggagaatcacttcagcccaggaggcaaaggctgtagtgagctaagactgtgccaccgcactccagcctgggtgacagagcgagacactgtctcaaaaaaaatttgactgagtccttaatatctgccaggaactaggctggacattgcttatataatgctggccaaaagtcatacctcatcttggaacgctagtgagtgagacggatgataatgaatgaactgcacaaacaagtgtaaaatgacagtcatgataaatgccacgggaggagcttattatggagagatctgactttatcggactttctagaagggagagggacctcaggggagaggcagctgggcataataggagtgaagtgatacttccctttagttctctaacaaaaaacacccctatgtgctggaactgtgaaaacgacagaggctatccctgtggttctcaaccctggctgcatattagaatcacctgagggacttagaaaatatatgtctgggccacaatctctgaaattctgatcaaatggttttgggaaggggtccaggtgtctgaacacttttaaagctcccccatgtgatttccatgtactgccaggactgagaaccactgagccacccagatggaaggatatttctgctctcaaagaactcgtggtctagtggggaaacagatgtgaacacagaaatttataaaacagcgtagtcagtgttatgatggagagagcaggggtggctgagaaagtctgagggaatgagggaggcaatatctcagctaagtcttgcaagatgagtaacagtaaacctggtgctaatgaaggggatagactctgcagctcagacacctggttcttagaccagataggggacctcattataagtactgctatgactggttagctccccttcatagcacttaccatagttatacatttatgtaatttgggggattatttgaccaccatctccctcctgatcagatcaaggcccctttgtgtgccctttcagggagcaaactaggccctcaacaaacacggttggtggaagaaggaaagagaggagacagaaaagaaggcaggttggtttggatgaatgcctgcctccctgctagaatgtccaccccagcagggcaggaaccatgtctgtttctgattcttcttcatatttcaagtgtccagtacatggtgggtacctgtttgatgaatgactaaatgaatgaacaaacagctcaaagactgcaacatggagaaaggattggaggaggtgaaacaaggcaaggaggccagtttggttactgaaggagaacaatgttcaaagggggtaggagaaagggaataggttaaataaatatttattaggtatggctggaaggacttgttggtttgacagttgtgctgcaagagaagaggataatggagtcaaccattgctcccaagtttctggcttaagtggctaaagggtgggtggtcccatgtgagagataaggaagaggctgaagaacagatctgagtaatgttgctgggttcaggcatggccacctttgttacgggaaaggagtcccgacctagaccccaagagaggtttcttggatctcatgcaagaaagaattcagggcgagtccatagagtaaagtgaaattaagtttaataagaagtagaggaataaaagaatggttactccatagacagagcagccctgagggctgctggttactcatttttatggttatttcttgatgatatgctaaagaaggggtggattatttatgcctcgcctttttcgaccatatagggtaacttcctgacattgccatggcatttgtaaactgtcatggcgctggtgggagtgtagcagtgaggatgaccagaggttactctcatggccattttggttttggtgggttttggtcagcttctttactgcaacctgttttttcagcaaagcctttatgacttgtgccaggcttctgtctcatcctgtgactaagaatgccttaaccatctgggaatgcagcccagtaggtgtcaacctcattttacccagctgctattcaagatggggttgctctggttcacatgcctctgacagttgtcctgcaagagaagaggagcatgaagtcaaccattgctcccaagtttctggcttaagtggctaagggatgggtggttcccatgtgagagataagaaagaggctgaagaacagatctgagtaatgttgctgggttcaggcatggccaccttgggccagagatgctgttgaatccaggaggtaatgacatataaattttgatgtcgaagggggaaactttgagtattcttctattgaagtttcatggcactggaaatctagagctttcctccaaaaggcaggaagatgggttctagtcccagctctaatattaacttgtgctaccttaaacaattcatgacatttcaggaatgtgtgatcctcacagccttagcagattccaagattccttttggctttgacattccataccttcaggtagccctagaatttaaagaggaagtttctcttgaaaggctttatcagtcggagctatttgcattacaaggaatataaactcaacttaaactgtatcatacatagcaagttaatatgtggcttcctgggttgtttccttgggcagtagtccgagtggaggccacgctagccaggaaagagtgcggtgatcaatgaatgatgtctagcatagacacagcatcagaaacagggacatatttttgtttcagtcctgaaaccaagggtttccgtctgtggcctttcaaataatgttgattgaatgtaggttctactctggctcagccattagctctgggtaaccttagtttaatcattttatatgccagagcttgacagtttccttatttgtcaagcgggagaaatagtccccatcttttccaccttcattgttgaaaggatctaatgagaaaagaagcatagagccctgtaaggaggagaatcagatattgaagatatgaaggagaatcagaaacagacatggttcctgccctgctggggtggacattctagtagggaggcaggcattctttaacctttatgtaagttcacatgtgtgacactgtgagatcccaacgtgtggataaaagagcaaatacttctggtcccctgagagatgaaagttcaaaagtttattgctaatgaattaattttaaaagtgtagataatcttataataaaagaattcagaaattaaaataaaataaaaggagatttcataaaattgtcaaatgaaaaacaaataagaaaagaaagtgtcagcaaaccaccatggcacatgtatacctatgtaacctgcacgttctgcacatgtatcccagaacttaaagtataataaaaaaattaaaagaaaagaaaagaaagtgttgatgaaaaaggtcaaactctgtcaaatacttgaagagatttattctgagccaaataggagtgaccatggcccatgacacagccctcaggagtcctgagaacatgtgcccagggtggctggtctgcagcttggttttatacattttagggaggtatgagacatcaatcaaatacatttgagaaatacataagtttggtccagaaaaatgggacaattcgaaggggatggtgagtggggagcttcaaggctataggtaaatgtaaacatttcctggttgacaattggttgagtctaaagacctgggatcaatagaaagggaatgttcaggtgaagataaaagattgtggagaccaaggttcttttgaagtcttatagtggcagcccttagagacaatagaagacaaatgtttcctatttagacttttaaaaggtgctagactctcagttaatctctttacgattgggagggcctggaagaaaaaatctagctatgttaatagagcttatttacacatgtaggttttaccccacaaaaaaactttttttttgcagggccatttcaaagaacgacaaaaaaacatgttttggggtaaaatattttgactttcttctttgtcatgtaatgttgtgtcagagtcagataggaaagtaagtcacgatatatagcgttaaataaaacccatctgatgagaatttatggtttgtaggatatgactcccagaccccttagatagaaatctgggcaagataagaaaaaatcagagcttagtcctcaaaagaaagaacgagaaagagaagtaaaaatgaaggaagagagggagggaggaagagagagaggaagaaggaaggaaggaaggaaggaatccttcaatgctggagagagtgtagttaaattgagtggaaattggtaaaactcttttgtagaatagttggcaatatgtatcaagagccttaacaatgtttatactctttggccaaataattctactttttataatccaaatcaaaggtcagcaaactttttaaagaaggactgggtagtaaatatctcaggctcttcaggtctcacggtttctgtcagctgagtttcaaccagcactcaattctaccacagcagaacaaaagcagctatggataatatataaatgaatgggcatggttttgtgtccaataaaaccttgtttacaaaatcaggatgtggccagatttggccccgtgggctatagtttgccaatccctgatgtaaattaagaaaacaggcctggtgcggtagctcacacctgtaatcccaagcactttgggaggccaaggtgggaggattgcttgagccccggagttcaagaccagcctgggcaacatggtgaaacctcatttctacaaacaaaaaaatacaaaaattagcctagtgtggtgatgcttgcctgtggtcccagctactcaggagaatcatctgaacctaggaggtagaggctgcagtgagctatgattgtgccactgcactccagcctgggcagcagagtaagatcctgtctgaaaaaataataataaataaataaataagaaaacatttttagaattatgctaaattcaaaattctaaatataaagagaggtttaagtgaaaagttgctattacatacaactgtatttgtaatagcaaaatattggcacaattagaacactcattaataggggaattaattaattttgatagttccactcaatgaaatactaggtacacatgaaaatcctgtttattaataatttataacaacatgaagaaatgcttgatagaacattacttgagaaatagaaacaaacttatttataatgacgatgataatggtggtagataatatctaagcactttacacagatcatatcatttaactctccaaacagacctatgaagtatacttttttattgtaatggctttccttatggagaagctgatgctgacaaatgttaagtaatttagtcaaggttaagctgctggcaggtgtcacagttgaaatgtgaatacaggtctggtttaactgctaaaagcaaaaacaaaagcaaacaaaccagcggagaaaaatcccaaattaaactctgtttattaaaaataccagaagaaaatacacccaaaagttgttatcggctgtcttgattggtaggtcatagataggaagatcacttaacatgttcactcttttctctaatgaaaatgtatcattttaataaaaaagaaacaacacgcgaatttcataggcaaaccaacgatggcagaatggtaggtgggactgtggggggagaagtgtttatttcggaggtctagaggttcccttggggatgcctttaatcctcttggtcctgctctttgtttgtgaaaagggcatggtgctgcccttccctctgtcttgttctaggtggagtttctagtgtgtcttgtttggactgttggcccatttttatgctgttcttgggttgacatgccagtctctaactctctctctctctctctctctctctctcttctctttcttccccttcttcatccacccgttccgatgtgtagctgacaaggtcaatgacgacttctacaccaagcgacggcacctggctgagctggctgccaaggggaacttacctctgcaccccgtaagagtggaggacgagccccgggccttcagccctgagcacggtcctgccaagcagaatggacagaagtcccgcaccaacaagatgcccccacatcccctggcctacacctctaccaccaactttaagggctgggaccccaacgagcagtccctccggcggcaggcttacagcaacaagggcaagcttggcacggccgagacaggctccagcgaccccttgggaactcgcccccagcactacccacccccacagccatacttcatcaccaacagcaaaacagaagtgactgtctgagctttcaccacagggagcaccctggagaccacactcaactgagagaggcaaaaaacaaccccgcccacaccctccccatcctcccctaatacatgcgtccacacactcactctcaacaagaaccaactctaaacctactggggacacagagtcgcgcttttcctaggtcatgcctgtaacgtgtcggcgggcagctgagaaagaccgaagcgtggacattcagcaatacagcaaaggggaaaatgaggcacactctttccacttcaggcccaagatggccaactcacatgcccaaaccgtggggctgagttttcttttcctcctaacttgaaactgaaatccatggtgacaaaatataaaagtagcacaatttagagaaattgtccatttgagcacatacactacttgccacgtgctgtctgtttctaggttcgaaagccagggtggaaatgggggtagagaatgagggaggacacaagagaagagtgtattctggaagaggagttgttctgggaggaatttgcccacattagaagcatttttctaattccaagaagtggtgacgtggacgtaaaattttgacgagcatgaaacagtaactggaccccaaccattctatttatagtacttttcatatcatccatgttgaaagcaaaaaacaacacaccctcaaactcacagaaagtaaatagaccctgaacccaccgacaatgatgggaaggaaaaaacaaaaaacaaaaaacattttagagaactcccataaggaccatgaccgtggaaatgggagggatgggcttttacggagagggtccggagagtatcaaataactttttaaaaagaggattaaaatgtaagcccactacaaaacagataaaaacggcaaattaggtgttttttttttttcaaaaatcttgaagacttgttgacattaacaacaacaaatccacagttggaaaagtccacaggagatcagatgaggatccagaagcctctgatttctgggttttgcctccaagacctgaaacagccacagaaacaagtcctctataaactgtatgtccctgacatccctttcccttcagcgcgttgccgccgccgctgccaaacttcaactgctttggactgaaaatgtcataagcgtgggtggtgccttcaatgtgttactgttgtttaatgacagtcttgtttcccaagtgcaacctgtgttcttttagccttccttcctcttctttttctgcagtagtagaagatgtttccatccttcctttgtaggtgagcccaccccataacaccctctgaggggctgctacaatgtcaggggtacccaagaacgaagacctccctactctctacactatcaaaattagtccttccattttctagccctctcaaacctgtcagatgtttcttggtcccgtaattcccatggtccctccaaattacctccccacatacttcatgtgttcatctcccatccagaatgtcctgaggttgtttttctggttggttctcataatccatagtccttggggtcccagcaaagtcagttttcctacaagttgtgtttgttttgtggaagcccaaagaagtggattgagagagaagagatttttatctaaggtggaaggtttttcaactagcccctaaaggtctttggtagttaattaacattcaacagacccacagcaactctggtgtcagaagctataaatggtctggccaaacaagactcagagtattttctgaaatcctgagctgcaaggttctgcctcacctgtctctccactctgacatcacgaaatcagcaaaaccagatatttattctcctcactcccagcagatacgaggacaccaacaatgcagttgatccctctgggcctgagtctcccatctgaaacatggggaattggggtaggtcaagctttttgaaactgcaaaacctctacctgtttttaaaaatgagatcttttgaccaggcacagtggctcacacctaaaatcccagcactttgggaggctgaagcaggtggatcatctgaggtcaggagtttgagatcagcctggtcaacatggtgaaaccccgtctctactaaaaatacaaacattagctgggcatggtggtgggtgcctgtaatcccaactactcgagaggctgaggcaggagaatcgcttaaacttgggaggttgcagtgagctgagaccacaccactgccctctagcctgggtgacggagtgagactatctcaaaaaaaaaaaaaaaaagaaaaaaaaagagatctttcaaagaacgcataataggagatctccatgtataaaaaggtaccatgctgtacaaagctggggtcagagatttagtgcccaccttctcagcctccttgggaagaccccagagcttcccagagtcaagtaaataccactgggcatggtcagagtttccttgacgttaatgagctatgtacctgcaacacactttggcatctctgtatatcaccttcacaatatttgtatctaaattgattcattttaatgcattttgtttttaaaatgaaaacttcctgtcttcatcacaaatttaaaaaaaatcatcagttgccataaatagaaagcaaacataaaaataagtacaaaggaaacaagcagcgatgattaaattccagctggagtctgttgtctgtgagtctgaactaaagcctggggttctttctttctctctccatctctctgtttctgtttctctctctctcttaaaatgatatcatcaggtattaaataattgttaaaaataccagcacccaatgaagactttctctttgtactaataagatggaccaaaaagtaaatgaaaggggaatcatttcctatgcaagtcagtgttgaacaatgctgtagctatgtactgcctatgatcattgtgcatacactaggggtgcatagcccacacttcagaaaaccctgggttgacttatctgtgaggctctttccagctcaaagtttccataattcttatctcccttttacctcgtggttgctctttgcccccagtccacttcgtcccacccttatctcaactctgattaagagtctttcttggcctctaaatctgtagtattgtattccttctgcatgctccttctcctctgaataaacttcatcaattgaactgggctccttggggtctgcagttgtaattttggcagcaaaggtgcagactggtcattaagatgtagccacaatgatggcccaagaaggacacgtactttccaagtagtcctgtctaggatggaaagctcaggaagtgcttcatagtttattatcttccagttggttttgggagatgaactgaagagggaagtttggatagggaaggtctttttattcttttttttttaatgtatccatggagtatttattattattattattattattattattattattatactttaagttttagggtacatgtgcacaatgtgcaggttagttacatatgtatacacgtgtcatgctggtgtgctgcacccattaactcgtcatttagcattagctatatctcctaatgctatccctcccccctccccccaccccacaacagtccccagagtgtgatgttccccttcttgtgtccatgtgttctcattgttcaattcccatctatgagtgagaacatgcagtgtttggtttttttgtccttgcgatagtttactgagaatgatgatttccaatttcatccatgtccctacaaaggacatgaactcatcattttttatggctgcatagtattccatggtgtatatgtgccacattttcttaatccagtctatccttgttggacttttgggttggttccaagtctttgctattgtgaatagtgccgcaataaacatacgtgtgcatgtgtctttatagcagcatgatttatagtcctttgggtatatacccagtaatgggatggctgggtcaaatggtatttctagttctagatccctgaggaatcgccacactgacttccacaatggttgaactagtttacagtcccaccagcagtgtaaaagtgttcctatttctccacatcctctccagcacctgttgtttcctgactttttaatgattgccattctaactggcgtgagatggtatctcattgtggttttgatttgcatttctctgatggccagtgatgatgagcattttttcatgtgtcttttgactgcataaatgtcttttgagaagtgtctgttcatatccttcgcccactttttgatggggttgtttgtttttttcttgtaaatttgtttgagttcattgtagattctggatattagccctttgtcagatgagtaggttgcgaaaattttctcccattttgtaggttgcctgttcactctgatggtagtttcttttgctgtgcagaagctctttagtttaattagatcccatttgtcaattttggcttcctcttgggagggtagacagacctcacaatatggaaagacgggacaacctatggaactatctgtgacttccatgtaccaagacaaggacgctatagctagggtagtgagacctagaagagagaaaccagaacaaagcagacaggctgtcctcttcctaattccatgccctgacatcagcccctattttttgcctttagctgtcccccagtttccaacccaatgggaccagagtctgacttccctttgccctttcacagtgtctcagcctccatctgccttgggctccgcctggcctccccatctaactcttcccagttttttgtgtaaatggagcatattttatgtgcgaatattttagtaaccgtatgttctgcaagtaaacctgtgttaatacttgtcaacaactgcagagtttatgatacgaataattcttcctacaatgaagaaaaaaacacatttgtttgttttctaagaatgtttatttgtaaacatatgtattcactatattaatatgaatttcttacctggcaataaaactgattatatgtgaggctgttgggattgtcatgtatctttctagaaccctgcatcctaatttgtgttttcaccagggaacaccaatattagcatagagaatgaggtctataatactcagaatatatgggaagttgtttccggcaaaggcaatttctagttaacagcaacatatacacattttccaggagactttgtgtttgaagcgtttttggtaagtttgtgtcacatctcctagttcacatccttttgcctttagaaatctattgttgctaggtttcctcatcataactaaatttattcttaatggtcaagaatcttgctgcgatttgaactttagttttgaacgctgatcagggtcatagaagacacaaatattgaaaggatggaagattcgattcttcccctatttattaaattttatttcctgtctggcctctggtagcatagagtttgaaattttcaggtagaaacctgtctgactatggttcctccagaaagaggctcggagattaggatgtgagaaatgaagagaatactgggagggggtgggaggttcaataaggaaggcaaagcagctaagaagagtatgatatcatgtcagctaccactatgcacggctggagtttcatgctgcagggaaactttgggagacagtgttgaacacacacacagaatcatcctgcccaagtaacgtgagcttgggtgtttacgtgcccatggccatcagacattgtttccaaattgctttcagggatgctaatgttcagacactcctaggctgtcatgtgcaaaggcagaaggactttcatggtgtcaagaatccctaggcagccgggcacggtggctcatgtctgtaattccagcactttgggaggccaaggcgggcagatcacctaaggtcaggaccagcctggccaacgtggattaaccccatctttattaaaaatacaaaattagctgggtgtggtggcgcatgcctgtaatcccagctactcaggaggctgaggcaggagaatcgctttaacttgggaggcggaggttgcggtgagccgagatcacaccattgcattccagcctgggcaacaagagccaaactccatctcaaaaaaagagaaaaagaaaaatccctaggcacagagatgcacctactggtgattataagccagtcactgtacaccaaagtcccaaagaccctaaggatgtgggcaggaactcacagtggctgcccaaagccagagatctggggtccctggggaatgaaacttccactctctggatgcttagagacattgtcaatgtcaagcaaaggggagatttgcagtcagggtcaggatctttactctgggatttggagacctttcattggccacagggtcacttagcatcacccagagcagatcccctgggctgtctttggggcacagttctggttatcagagaagtctggaacacacaggatgctctttcagcacttggaaacttggtggctggagtcactcacatcagagccccaagaatgtagtcatagaacagagaattacacctctgtgaggagagccacactattcctctagtgagccacctggtggattataactcataaacaacaacaacaataatcatagcaagcttatttgcagagccacacactgttaaagaccttctatgcattgccacatttggttctcactgcaaaaggtgggtactattatgctttggagatgctgttcagagatttgtctaaaatttgagtaatgctcctaaagcaattcaactagtaagtggtagaactgggatttgaactccagagctcatgctttaatggctctgtcaatagttctcacctggattcgcatgtgaatcagtggggcagcttgataaaaatgctgattcccaagctccctcaaagagcttcagataaggtagatccgaggagatggggcccagggtccaatgtttgtaacaagctccctgtcattgcactagagtggcccctggaccctatgatgagaagccttgcacagtgccacattacatcatcatccaacatctgtgggatcatcccaaggactatgagatgcagaagaaattggagtggacctgtgtgcttctagagacaggaactctcatcatccggcttcatgtctgatattgaaaagttgtgtcctataatgaagagaagactgactccaggagacttggctggtggtatttattgattccaatgccaatttgccacgtgccttgaaactatcctttcctgcaactccatgtcttcattttccttcagaaggaggaggttgcagttgataatcttcaaccctgctctctgactggactgagtattcttcttcctgatcaccacgaaatgggtataatcaatggaattgagtctcttaccactttcaaaggtttgctcctggatgactgggattttagtgtgtatattaataacattatagtaacaaattctgaggattgagcacttgccaggtactcggtgtagacccagaaaatctgagacaagtctgttaatttagaaatattattttgccggccaggcacggtggctcatgcctgtaatcccagcactttgggaggccgagaagggcagatcacgaggtcaggagttcgagaccagcctggccaacatggtgaaaccccatctctactgaaaatacaaaaattagcctggtgtggtggcatgctcctgtagtcccagctactcagcaggctgaggcagggagaatggtgtgaacctgggaggcagagtttgcagtgagccgagatcgcgccactgcactccaaccctgggtgacagtgcgagactctgtctcaaaaaaaaaaaaagaaagaaagtttattttgctaaggtcgaggacatgtgtctgtgacacagcctcaggaagtcctgatgacatgtgcccagggtggttggggtgtaccttggttttatacattttagggagacatgagacatcaatcaagtacatttaagaaatatattggtttggtccagaaaggcaggacaactcaaagtgggggggcttccaggctataggtaaatttaaacattttctggttgacaattggttgagtttgtctaaagacctgggatcaatagaaaggaatgtttgggttgatgcaagaggtagtggagtccaaagttttatcatgaagatgaagcttttacctagcaggcttcagagagaacaggctctaaaatgtttcttatcagacttaaagcctgtgttgatgttaatgttggacaggtataatgaggcatgtccgacccccacttctcccttcatggcctgaaccagtgtttcaggggccttagaattttatttttggtttacagcagcgttttttttttttttttttttttgagatggagtcttgctctgtcaccaggctgcagtgcagtggcgcaatcttagttcactgcaacctctgcctcccaggttcatgtgattctcctgcctcagcctccctagtagctgggactacaggcacgcaccaccacacctggctaattttttgtcttttagtagagatggggtttcaccatgttggccaggatggcctcgatttcctgaccttgtgatccacccgctttggcctcccaaagtgctgggattacaggcctgagccaccatggctttctgattctctaacagccatgggctactatgaatattcttaatgttcttaggccatggatcctttcaattatctggtgaatgcctatggattcccttttcagaataatgactttaaatgcataaaataaaatacatagaattacaaaaaaaacccattatctcgatgtatactcatgaaaatatttttagaaactcacatttgtgatatggtaatacagttggcccttgaacaacactgctttgaactgcaggggtccacttatgtgtgaattttcttccacctctgccacccctgagacagcaagaccaagccctcaccttcctcagcctactcaaagtgaagatgacaaggatgaagacctctatgatgatccacttccacttaataaatagtaaatatgttttctcttccttgtgattttttaaataagattttcttttttctagcttactttatcataagcacacagtgttatatatttgtatacatacatacataaaatacacatagcatactaaatatgtgttaatcaattgtttattttatcagtaaggcttctggtcaaagtggactattagtagtttagtactgagggagtcaaaagctgtatgaggtttccgactacatggggtttgtcgacctctaacgcctgcattgttctagggtcagctgtatatgtgcttttcaactaatgcaataaataacatgaggtttcaaagtattgatgagcacaaacaattctttgagctatctgctacatttgcgatgtgatacgacaatatctgtgattctactgttgacaaagtcccaggtcggtgctaatactataggtggttctttgcctacatttatttacttacttttgagacaggatctcactctgttgcccaggctggagtgcagtggagcaatcacagctcactgcatctttgacctctggggctctagcagtcctcccacctcagcctcccgagtagctgggactacaggtacgtgccaccatgcccagctaattttctgtattttttgtagagatgggcattcaccatgttgtacaggttggttttgaactcctgggctcaagcaatctgcccacctcagcctcccaaagtgctgggattacaggcatgagcctctgcaccctgccttattgcccacatttataattgagggacatgctaaatttcaactagaggccagtgaaagtaaagacatgatatattttctcccacctactttcataaacccactgaattctacccacaaatccctctgcaggtgtgtgggtcccaggtgaagcactgtgtactagtgagacttagagctacttacctattctcttcatgcttctatttttttaaaatagggataacaatagtatctctatcattggctgttatgagagataaaataatagataaaaagacagtagcttaatgcttaacacctagtaaacatttcagcattagcttttgttatgagaattattctttcagatgattcctataacctcacaaaattgtgttttatttttcgccactcatagaagaagaaacaggctcaaagaggtaaaaattgcacaaagtaacccaggaagtcagtggcagagctgattgaaacctggttctctctgattcaaccttaagctctggcctatcgtgtgtgctgtgtcattttttaaaactgatagtattaaatgtcctcacttctccctggaatgaggctagaccgactttggagtagatcaccatggatgtccccatttcttcacccctcccagaggagaaagacaaatgtccaaggttcaggaagctcttgtctggcgcctgtttatttaagggcttaaataaatagccctttattaattaactggagacagttaataccaatgtcctcccttcaacacaagctctctccagcccagtacttgcaagatcccaattacaaacctcactgtcccagaaattgtcagattctagttttttatttaaaaaaaatccatcctgttaggaatatattcaccacataaaaccaaaataagtctgatatggcttggctgcttccccacccaaatcttatcttgaattgtagctcccgtaattcccacgtgttgtgggagggacctggggggaggtaattgaatcatgggggtggttttccccatactgttttcatggaagtgaataagtctcacaagatctgatggttttataagaggaaaccccttttgcttggctccaattcttctccatgcttccccatgtaagatgtgcctttcaccttctgccatgattatgaggcctcccgagccacgtggaactgtaagtccattaaacctgtttttctttataaatttcctagtctcaggtatatctttatcagcagcgtgagatcagactaaaacagtctttctcatacattcagtctcagccttgaaagataataatcatcgtaatgctaatagcaacaacttctttgattaccaattattgaacattttttgtgtatcaggcactgggttaggcactgtaaaagcttcattcttctcttcttgctggggctctgagcctcagtcagcatgagtctctaaatggttttgtgaagcagtaacttcctttaccaccatttccaccaccaactggacgttatgtgagttaggaataatcttctattattatcagtgtgttaagcactgagatttcagggtttatctgttagagtagctagaatttccttaacaaatacaaaagataaagcacttagaactgtatctgactatttaaaaaaaaacaataaatgttatccgttgccatcatcatcattatcatcattgtagcactctgttttcacactgctataaagaactaccctagactggataatttgttatgaaagatatatagtaaatatatagtatttatattttaaatataataatataataaaaataataatttgttattaagtgactcacagttccacgtggctgggaggcctcaggaaactaacaatcatggcggaaggggaaggggaagcaaggaccttcttcacatggtggcaggagacagagagtgagcaaagaggaaatgccacacttgtaaaccatcagatctcttgagaactcactcactatcatgagaacagcatgggggaactgcccccatgatctagtcacctcccaccagtttccttccatgaagggattacaatgagagattaaatttgggtggggacacagagtgaaaccatatcaatcatcttaattaaacttctactctatgctaggacctttacatacctgatctttaatcctctcagtaaccttgaaagggttcataactccattttaaagataagggaactgagaggttaaatgtcttactcaaggtcacagagcaagtgctggagcgagaatctaaacctggagttttctggttccacaatttctagcaccccacttaaccctctcaaagttcctggtactatctggatccagttactgtggttaaataaataaataaataaataaaaatacctttgtggaagaaaaatgtcttcactgtcagcttggcatctcacttattttcttgtcagattccaaatcctaactcgtgctgtgttgtacagttcaaagaaagcatttcccatcaagaaatgtcatggttgctagaaataattttgtcacatcctcttgaatttttcctttttgcaagttcagaggtttcagttagattcacatcttatgatgcctctttttaaaacattataaaagggcaactcatttttaaaaatctcaacatccaaatagaacacttcattgttttcatcttaaaaggtaaaaaatgggaagactctaaagaggcaatttacaatgtgcgggtgccttattttctggtaatttgaagctgtttttgatgctgtaatttgtttttgaattttgctgtccatgtatcaaaggcagttgagctgaatgtactggaattctacaagttaggtgtctgttgaattcccagatccaggatgccaaaagtcagcaccatgcgggtcttaaagcctttctcttgggtcttattagttgccatgagaattttcctcatgggggtttgattctttttcacgtggagtcaacattagacttttggacaaaatttagagaacactgctgagtgcttggttctgctcaaaaaacctcattttgtaattcattcaacaaatacagagcatctacgatgtgccagccatggtgccgggccttgagggtgcaagaatccctttactgtctcccttctccttcccccttctccaaaaaataaaaattaagaaggtagaagatgaacaatagaaagcaagcaccataaagaaataaagagaggcactgcatgcagagagaaaccttggtgtcagataaccttggatttgagtcttctctataacttctagttatgtgaccttggggaagctactgagattttcagagcctagtttttctcatctgtagagcaagcccagtcataccaaccttgtcgtgttgtttgagcagttgaggtaagatatgtaaaccacttactcatggtggatgttcaacaaacttgggcttttattaatcggaagcatttacttatcgactcccacccattaggaaccaggctaatgtggtaccttggtttttccattttgtttttgttggggtccccagaaagcgatcctgagataggaattcatatgcaaggaaggaattttggaagaaactggtaaggggatggcagaagttacgtagaagaaggaccaaaacaaggatctacttttaggcaacgccacagagagggtagaccttatgtgcattactctagaattggcatcaaccccaagcaagggagcagggctttcattcttatgtgcctatgagtcgagtcattcaccaaagagatggaaacttctagctactctggctcattgcatgttgagggaaaatttctccaagagtctcaggtgctggtggttggaaacaaatactacagaatctggaaaagaggtgcatggaaacaagaaaaaggatgtgaggacatctaggtgaagcaccatgttggttatacttcacttttctgacttctcagagacattagtcctggtccagctggtcccagtaaggaagatgagttttccttggttcataaaagcaggacgtttggagaatttacctgccaaaaatatgaagaatggctttggggtcagcctcgttgaagataaaatctcagcctaactttttatagcccatgtcattttgggcaatcaatttagcctccttgacctagattttcttacgtttaaaataggaataataatgcgctttctgtagatttgttgtaggttgagatgactttatattccctgacttatttgacaaagatatgctgagcatctgctatatgtgaaacagggataagcattggtacactgagatgaatcaggcacaggtcctgccttccaagaccttggcatctaatgggggaggcagacacataaattacagactctgttttcttccttatacattttttctctctttctctgtttccttctctgtgtctgttttttactcagttgcatcttctcttctttttcctcccctcttccttctccttcacttgatctccacctttcttttattattattttacttcttagaaacaaggtctcactctgtcacccaagctagagtgcagtggcatgtgggctcacagcagcctcaacctgtgagactcaagcgatcccccagccttagcctccaagaaactgggactacaggcacacaccaccctgcccagctaaatttttaaatttttttgtagagccagggttttgctatgttgcccagactggtcttgaactcctaggctcaagcaatgcttccgcctcggtctgctgagtagctgggactgcaggtgtgtgccaccacacctggccacatctctgcatttctatcttgcattctctgaccctcaccacttccatacctagtctttatattaactggaggatatctaatctgctaccctttcaagtccctggctcctgctgctgttttccaaagcttcttctgcaaattgcaaagcacataaagttctggggaattcaactggacccagaccctcaggtgtgacagaaggagacttggagataggagaaaaccatctacagctttacttaaagcttaggggtggaggagtgggggcaggaggtacaattagcagtcctgagtgggcagtcctgaggagtggcaaatagaatttatgattaattgcattggggggagagggtcagaggtgattttccctgctatttggcacatgggtagactcctaagagcattaggataggagccagaaattcttcattttaattctagctctgaaactagctgtattatcttggacattgattcccttatccatatgatatagaggttgcattcagtgatttttttaggactcctctgacgctcttggtcaggaactctgccttcataaatttcttatcaccccaaccccattgtgtcttactctgggaatggcacccaccaggtgcttatatatataacaacaatacacttattttctgtattccaggattctggggatgattagctttgggtttgagaaagatctatatttggggccctggaagcagactctgttggctggaacccattcagccattttactgtgaagtccatggcagctgctgcagatggtgaggcaaaccctaatggcttgtataatgtggtacttctcagacttgaccaccatgattcagatgctctgtgggctcaggaatttgcattttaagaaacactttggggattctgatgcaagtagttagtggactactgttgagaatcaattctagaaacctgagcttagtgctgctaccaatactctatgtgacccttacctagtagtgtaaggttttgaacacgtttcttcacctgcacgatagggttcttcacccccaccccgtcttcctgcaggatttctgtgaggaacagataaaacagcagatggaaaagctctgagaggctccacaagaatcaaagatggcggcctttgtgtgtggagatgcagcatccccaagcttcctcctctccatactcagaggaaaagagactgctggcagataatattccaggggacacttcagcccctcaccccaactcctgtatttgatatttcttgatccccgcttcacctgcttttgactaactttttttactccagtcattgccatgacaaccagctatgcaggtgtacccagttagcacctggcctaggtgtgctttaaagctcttgctttctgactcagtgccttgtgtcctcagcatgtgcaaacctggaagtgtgagagggttaacacaccacggcccaaactttgactaatggttgcggggagaggggtattggagattagtggtgcatgttcccctctccatctcttaggtagacaattctaagtgatttcttccagctcctcagagggtcctagtgggttggaacccacttgcccatatggtggttaccaggtccataaagtaccttgaggttggcttttcatccttcctgtttcattcttccaagcccctcctccttttctttaggatactttccaaaataaatacctgcacacagtaccttgctcaagttctggtttagggggcaaaccaggctgacacaaagagggctctgttgatgaaccagcctggatctccagtagtaattccaggtctaggatggtcatccaacaattgactatttacttagtagcagagtgagggcaggtaacaggaaatgtaacctgtccacttcctacttgaccagcgagaactgagttcaaatcccagccttgtgccctagggccaggtaccatgtaggtaaagaattctgcaacaatgcatagtacacagcaagttcccttaagacagatcacaacgttctttcttcagttccctccttttcactccatgtaaagtcaaaatccttaaatcaaagtccttaaaacaagcccaaaagaccttccatgatctggcctccaaatgcctctctgccttcctgttgtactactcaccccttcactcactctgctccagcccccactggcctccttgctgttcctcaaatgccccaagaatgtgctcaccttgagcgctttgtccatcaactgggacaatgtcgtatccctcctccaggggacatttggcaataactggacacatttttggttgtcataacttgggagataggttgctactggcatgtagtgcatagaggccaaggatgctgctaaatatcctacaaggcacaggacagctctcctgcttcaaagacagaaaattctctgttcccaaatgtcagaagtgctgagggtgagaaacccccaggacccttcttcatgctgcagtcttcctcccctggctcaccccacatctgttgggtctttgattatatttcaccttctcagtgaggcctgatgccctgttgatactgaagcttgcgctgctcatgtctcctggcctgtcttaaccttctctattattttcttattgcattcagccatttctaccatattatataattgatctacttatgtttactcttattgtctgtctcttctcactgggatggaagctccatgggggtagaaatctttgagtgctcccatatgccctccacctaccacggtacctggaacataggcattcaataaatatttgttgaatgaattaatgaatgaatgaaaggaaatacagttgacccttgaacaacatgggtttgaactgtgtaggtccatttatacttgcattttcttctgcctgtaccacccctgaaatagcaagaccaactcctcttctcactcctcttctttagcctcctcaaaatgaagacgatgaggatgaagaccttcatgatgatccacttccacttaataaataggaaatatattttcccttcctcgtgattttcttaataataacattttattttctctagcttactttattataagaatacagtatgtaatacatataacatgcaaaatgtgtgttacttgactgttttattattagtaggatttctggtcaataataggctactactagttaaattttggaatagtcgaaagttatatgcagatttttgactgtgtgggggtaggagttgttcaagagtcaactgtatcgtgaggctgaggtttgaggtgcatctcttctactatcatgtcaacgtcatcagtgcttatgggaacacctgtccaaaggtacaagggagatggcagtgtgtgttagtctgttctccactgctaataaagacataccgaaggctgggtaatttatataagaagaggtttaatggacttacagttccacgtggctggggaggcctcacaatcatggtagaaggtaaaaaagaagcaaagtcgaatcttgcattgtggcaggcaagagagcttgtgcaggggaactcccatttataaaaccatcagatctcgtgagacttattcactatggcaaaaacagtatggaggaaaccaccccatgattcaattatctcccacaagatccctcccacaacacatgagaattatgggagctaaaattcaagatgagatttgggtggggacacagccaaaccatatcagaaatatatccacttgggcattaattatccatggacaggagtattatgaaacgtccccataaggtcaaaaggtgacacatttcatccaatttattttaacattcaccaagattaggaagagaaaaataagacattactgaaggttactttttttttcactttttaaaaatccttccacttcctgttttcttcagggagactgaaaaatgtcttctcaaacatttctcattatcagaacttaacaaaaattctaattagggctactgcacacttcagtggtagttttcaaaatggagctctggcttcatctttgtcaggctgccaatcttttctatccttgccaaagatgccctctataataataatactaataattaccatttattgaaagtctactatgtgccaggcaatttgcatacattagcagttgtcttcacacaaatcatatgaggtgggaactattaaccctaattttagatgaagtgatttgcccaaagccaagcagctagaaattggcagaactgggattcagactcaagtctatcatctggtccaaaactttccatgtccagccttcacagatttaggggagagagaagataagacaacaggaccacttgtcactgcttccagcatgaccatcagttccaaccggagggtttgttacgagttattatgtcaccagccttggttgctaggtctctctgggaacagagtttagggaatcccaggagactctgagacacccaattagaaaggcaataatagcagacttgagaatagactgattgcttattcattattcttgttatttctggacttttccatccatcgtacagcgggctgtcagcaattaccatgacgttctttccagaaaggggcctcttggccccactaatcacctcccccagaaccaaatagagtctttcaggtggcaaattcttcagaagcaacatcaaaatgctcctgtctttggggcttcccagtgaatcctcagcggacaccttggggcaaagtgaaagcactggacttcaacaaatgaagaaacagtcccttccgggcttgttaagtgccaggagccttgttgagcaggtgttgcccagaggcgacgtggtcttgtaatggatcagtagattaataccaagtagcagaggatcaggcctgaacctgaacttgagctgtttgagcagcaggaaagtatctgttcccctcacctcccaggaggagcttctttaattttttttccttctttctatatcatcctctttttcttctttgctcctctatctaataacactgcagacttggatacctggctttagcaggtggaggacatcactgatgcctgttacgtcccctaacctctcactgctttctcacacttcctcttctctctcttgctatggttctactttgactatatctttctccttcatgctccttttcctctctgttcctcttcctctccctcaattcttcccctttctgtctctctctctccctctctcattctctttctgtctaggcatctttcttcctttttgtttcatgcatttctcatcctctgagatctgcctttctctgaaacacattctctctgtttgaccttatgtctcttctctcttgccctctatctttgggactctgtgtctctttatgtgtgtgtctttctctttcatatacatacaaaggattcattctatctttaggtcagttcacattaaaccatcactgccatctttcactcctacttctgttgtctaaaaaaagtaccattcaagttcagaaggcagaagtgaaatccagatctggctgattccaaagcttgtgatgttaggagctgcctcaatttccttcttccttaccttccacatctaaatctatttccagtccctgcaaatttcatgctctaaatatttcttgaacattaattctacctcccaatccttactactaatttattcattcaacatattattatatgagcacctgctatatgtggtaggtctagggagaagtgaaagaaaagacttaagaagacatgactccagtctatggggaagagagatgatcactatctttcctcaagtttgcatcatttcatgcccagattaatagaacaaatttttctcagctcactctccatactgcagccagaatacttaaatttatgcttaaatccttaacatttcttccctgtagaataaagaggtgtcatataacaaccttcctcacctgtcctgcaacctcaccagactcatattttactatttttgacctttttatgttctaggacagttaggctattggaagttcccccatacattcaccatgctgtttctaccacctggcctgcctgtttcctctgccagaataacttttctcctacatctgcttaatcctaataatcctttaagacgcagatcagattctttcctgccttcccagcctcgattaggtgcttcttctcatggcctgtaaatatccattattgaaattacagcatattgtatatgtgtatgtatttatttatttattttgagatggagtttcactgttgttgcccaggctggagtgcaatggtgccacctcggctcaccgcaacctctgcctcccaggttcaagtgattctcctgcctccgcctctcaagtagctgggattacaggcacgggccaccatgccccactaattttgtatttttagtagagatgttgttttccgtgttggtcaggctggtctcgaactcccaacctcaggtgatccgcccacctcggcctactaaagtgctgggattacaggcgtgagccactgcacctggccgtatattgtttgataatcaggtgctgaggtgtctttctccctactagactgggggctctttaaagattagtttgtctctgaattcccattgcctagaactgagtgtaaagtcaggcaattgataactcacacttgaatgagtgaacaaatgaatgagtgaggaaatgaatgaatatttcttttactacacggtgttgccttttgagtatttataataagggttattgaggacaagaatagtttatgatttgaaagttctagggactgaaaacgttcctttggtgaggaatgtcttagacccctttaagcagctgttgaaatcagtgaaccttcccccagaaacatacacatacacacaatatgtttgatatacttgcagggaacttataggctctctgatgttcatctatgccaacctctggtgcccttgaacccagtgttaagaactccaactttagaaattatgtcagggtacaaacgaccatccagagactctctgcccatttacgaagttttgtaggagcagagatgagagtagaatttgtgttttctgccttttttcccttacattctttctcagccaaagagtttggccattggtaaggaaccatcccaggacaagcttttctttctagcactgttgctactaaatgagatacttcattagaaccctggagagtgacttggagatgctgcgtagggtaattgaatgcaattaagctgatcaagttgtgcctggcttacttcttattcattacgtgacaagttatttaacctctgggactctcctttctgatcactaagattggtctaacaataacaagcccataaggcattaagtagctaacattcaagggtggggactgggacaatatcgggtatactgtctacgctcattcatacaccatcatcatcatcaccaccatcatcagctctcttggcctatgtgaggctttaccttttcaataacatcatcttattttgatcacccccttttgtaaagtacgggaatgttggcagatatttcctccaggtgtccacttctgccagtttaaataccgtggttctaagaaatactccacatgtctttgcaggtgttgccatggctatatgagtgtccaccagggatcatacatttatgtaaaagcccttaacatgacttttagagtgtgaaagctccctctcttcttaatattttaggctcccttctgtgctacttagaagctgatgaaatctgaaatctgctcattatgtgctttttggaggaaaacccaatttaaatactttattttttttggtgacataaacctgtgctttccatgttctttgtaaagaatgctgagattttgcaagcatccttcgctaaataaaaacatcatgaccagacttctcagtatgccctgtgtggatggatagtttagcaagtggacaataattgtgcattttcttaatttcaagtggctgaaatttagctagaaaatcttagcatctgtaaggccgtgtaattgtattcttgacaccatttagccatctgccatctactctctaatcttagtttccctcccctacaactccatttggacacagtaaaggtttgattaccttgaatagtcagagtaaagcagattctgaataaataaattttctggttcattagggagtcatactggtataaaaaattcttagacagatctatgtttgggtatggtcacagccatttgttaactgtgtgtcctttaacttaacttttcagggtcttcattactccagccaaaaaaatagtaatgaaaatggaaacacttcaaggtttctttgaagactagaaataagttggtgaaggatatggcatataacaggtgaacagtaagagttggttctcttctcttctacttagtcattaattcatttcacaatatgttgaataattacaaggcccccagcacattcctaggaaatagggatgcaatggtgtattaattacttttcatgctgctgataaagtcatacccgaaactgggaacaaaaagaggcttagtttgatttacagattctgaggctggaggcgaggcctcagaatcatggtgggaggcaaaagccacttcttacatggtggtagcaagagaaaaaatgaggaagaagcaaaagcagaagcccctgataaacccatcagatttcatgagacttattcactagaaagagaatagcatgggaaaaactggctcccatgattcaattacctccctctgggtccttcccacaatacatgggaattctaggagatacgattcaagttaagatttgggtggggacacagccaaaccatatcattccacccctggcccctcccaatctcatgtcttcacatttcaaaaccaatcatgccttcccaacagttccccaacgtcttaattcatttcagcattaacctaaaagtccacagtccaaagtcatctgagacaaggcaagtcccttctgcctatgagcctgtaaaatcgaaagcaagctagttacttcctagatacaatgggggtacaggtatttggtaaatacagccattccaaatgggagaaattggccaaaacaaaggggttacagggcccatgcaagttcgaaatccagtggggcagtcaaattttaaagctctaaaacgatctcctttgactccaggtctcacatccagttcatgctgatgcaagaggtaggttcccatggtcttgggcagctttgcccctgtggctctgcagggtcctgcctccctcctggctgctttcacaggctgatgttgagtgtctgtggctttttgaggcacatagtgcaaggtgtcagtggatctactattctgtacactggaagatggtggcccttttctcacagctccactaggcagcccccaagtagggactctgtgtgggggctccaacctcacattttcctcctgcactgccctagcagaggttctccatgagggccctgcccctgcagcaaacttttacctatgcatccaagagtttccacacatcttctgaaatctaggccaaggttcccaaacctcagtttttgacttctgtgtatccacatgctcagtaccacatagaagctgccaaggcttgaggcttccaccctctgaagccacggtccaagccgtatgttggccccattcagccatggctggaaaggctgggacacagggaatcaagtccctaggctgcacacagcatgggcaccctgggcccagcccatgaaaccattatttcctcccaggcctctgggcctgtgatagaagaagctgccatgaaggtctctgacatggctggagacattttccccatggtcttgggaattaacattagtctccatgctacttatgcaaatttctacagccagcttgcatttctccccagaaaatggatttttcttttctttctttctttttttttttttttttttttttttttgagacagggtcttgctctgtcacccaggctggagtgcagtggcgtgatctcggctcactgcaagctccacctcctgggttcatgccattctcctgcctcagcctgccgagtagcttagactacaggcacccaccaccatgcccagctgattttttgtatttttagtagagatggggtttcaccgtgttggccaggatggtcttgatctcctgaccttgtgatctgcctgccttggcttcccaaagtgctgggattacaggcatgagccaccgcgcctggccgggtttttcttttctattgcatagtcaggctgcaaattttccaaacttttaagctctgcttcccttataaagctgaatgcctttaacagtacccaagtcatctcttgaatgctttgctgcttagaaatttcttccctgagatacccaaaattatctttttcaagttcaaaattccacaagtctctagtgcaggggcaaaatgtcaccagtctttgctaaaacataacaaatgtcacctttactccagttcccaagaagttcatcatctccatctgagaccacctcagcctggaccttattgtccatattgatgtcagtattctgggcaaagccattcaatgagtctctaggaagttccaaactctcccacattttcctgtcttcttctgagccctccaaactgttccaacttctgcctgttactccgttccaaagtcgcttccacatttttgggtatcttttcagcagcgcccccctttactggtaccaatttactgtattacttcattttcatgctgctgataaggacatacctgaaactgggaacaaaaaaaggtttaattggacttacagtcccacatggctggggaggcctcagaatcatggcaggaggcgaaaggcacttcttacatggtggcagcaagagaaaaaatgaggaagaagcaaaagcagaagctcctgataaacccatcagatctcgtgaaacttattcactatcacaagaatagcaagggaagaactcgcccccatgattcaattacctctgcctgggtccctcccacaacacttgggaattctgggagatgcaattcaagttgagatttgggcggggacacaaaccgtatcaaatggtaaacaagaccatcttgcctatgcccatgaggactctagatgtgaaatatgacatactctgtgattgggaatttagggtattttaggagtccatgggagaagactctagtccgtccagtcaagatctgtaggtttatagatgataatgataatgatcctgatagcggtggtggttgtagtggtggtgatggtgatgatggatatcatgattttgatgctgttgatgatgatgttgacagcactcacattttgtgccagacactgacattaagtgtcttgagcaaggccacaaagctggtaagtatcagggtccaatgcaaactgaggttcttcctaattccacagcacccccaccagctctttccaagctgatgaaacaccagaatttattctgaagttgactaggaataaaatttggggcatccaaatccttgcagtgcgattaaattcactttaccctttcttataatccagacccactgtttacaaaattttataacttcaggtaggaagaagctggtagattaatggtggcacttgtctaccaaatgccatgtgctgagggtacatcatcataaacactttctgtgacctgaaatggatatgggctggtgatcatggtttcatgagcccaagaggactgtgacaaagaaaactgagataggagttaatgagactcaaacccatctgtagccagaattagatatgagtatcctcaggagtcgaaacatctcttgccttaagttctgtggctgaggatatcagtaggcaagattctgctggcaggtgtatcctgcaggtgtgtcactgtgcagccttcatatcaataatatgacaacagcttcaaaagtaatagatagataacatagacattaattaaatcagtcagactcagaaaattgagataagacccagcagttctctttgaggttcagactgagaggaaaccaacatctccactatcctcaaatgcccccaaacaatttggcaaaacaacaggttgtcaatcctccaaagaaaacaaaataaaacatacaaaaccagtcctgatatgctcagtttctgaaaagaatgggattgataccagccagaaactgatgagaggcagctgagcacctgtgcagtgcagctaggctgtcttagctttcatgcaacatccttaacactctaaattctagatcctggcatccacagctctcttataagcttctagtctcatttctcagttccctccttcctcaattgcactagtagccttttagctttcgctgcactctgtctatatcagaaggcttatcaggttgtatcacacttgttgacctgctgctttgcccaatagcctggaggatcttttaagacagaaactctactttatttactttttcaacttgacccatagaaggatcaatagagaacttccatattctggcccggtgagtaagttctcaaaaaaattgttattgtggaaggaaggaaggaaggaaggaaggaaggaaggaaggaagggagggaggaaggaaggaaggaaggaaggaaggaaggaaagaaggaagaggcagggagggagggaaggaagaaaacagatgttagctactcccttgtgtaatggaacactccagcatgaagtatggtttttggggtgagctacattcactgtgcttacccagttgagagatataaagctaatttttgctcattcaggtttaagttacagggagagcattaactatctactctcttccttctaaatcactctccccagggcacctatgccttgcattcccacttcatacatagacatgagggtctcttttttattccccatctcaatctagacaataagaagcctctgtttacttgccttaaattttcttgcaacgtaactattcattcctgtggatttataatttgtctcatgtcttaaaccccattcccagagccttcactccacctcactcagaccatcccaactacactacatttctcatggacatttctcatctctgtttcccctggggtgggaattcggcaaggacttttaacttgatgagtccgtggtcatgggatttgtggatacctcccaataactctattgtcagtgatatggtttgggtctgtgtccccacccaaatctcatgttcaattgtaatcccatgttggaggtggggcctggtgggaggagactggatcacggggcggagttctcatgaatggtttagcaccattcccttggtgctgttcttgtgatggtgagtgagtactcacaagatctggtgattgaaaagtatatagcacctctccccaaattcctcttgcattggccatgtaagacatccctgctacctctttgccttctgccatgattgtaagcttcttgagacctccccagaagctgaacagatgaccaacactatgcttcctgtacagcctgcagaattgtgagccaattaaacttattttcttataaattatccagtctctggcatttctttatagcaacccaagaacagactaatacagtcagggacatataattcctacatgactgtgtataaaatcttgtgtgggattctgccaataccaatttcctgggttttattgtgtagtatagttatgtaagatgccacctttgggagaagctgaatgataggtacatgagacctgtctgtactattttagaaacttcttgtgattctataaataattcaaaataaaatgtctttcaaaatcttgtgaggcaaccagatatgtaaaatagaaaaaaaaaatcttccttatatacctgtttctttttcaaaaaggagagtcagatctttcctttatttattaaagtggaattttatccgcaaggttatgtaaacactgatatgactacttaagcaactctgggctcatacctccttccccaacatagtatgtcttgctttatgggtggctgtcatcacctgtgtctgcttctacaactcaataggggagttagggagggagacattgttttaaatctttttttttttttttttttcctgagactgagtcttgctcttttgtccaggttggagttcagtggcatgatcttggctctctgcaacctccaccttccaggttacagtgttttttgtgcctcagcctcccaaatagctgggattacaggtggacgccaccatgcctaaaatttttgtatttttagtagagacagcatttcaccatgttggccagtctggtctcgaactcctgacctcaagtgattcgcccccctcggcttcccaaagtgctaggattacaggcttgagccaccgtgctggcctgttttaaatcttgagagtggaggaaaccaggggcggagtttcttttggttgtctgacctcaggatgaagcatccggtgtacagttaaacattttgcgcttcaaaggttaacttcttgctagtagttctcctattcttcattattctaaacagaatgtctctcttgcttctagtcttgagttgatttttagattttctttctaatatcttaggtttaagttagtagtgagctctggtttaggagtaataataaaagtagagtgaaaaaacaaaacagcactgagcacagaaccctcatcttggggaaagaattcaccccaatataagagaattaaatctttgtcttcccaaagagagaaatcaataaataatgtcaagaaagtaataattccctctcctttctcttcttctccctttccagtctcctccctttcccctcgcctttctcctcccctccctcgctcctccttttctcgtcttctcttcccttcccctgtttttcccctcctcttttcctcctcttcccttccctcctctcctcttcctgtccctctgctcccctctcctccccatccctcccttccacccccttcccctcctcatccctcccttcttttcccctctcctcccttcccctcccctcccttcctgttcccctccccttcccttccccttccctttcttcctgttcccttccctcccctcctcttcccactccctcccctccctttccctccacttctgttcccttcttttccctcccctcccttccctttcttccccttcccttgccttccattcccctttcctttcttcttctttccttccctcccctctgccctcctcttccatctctttcccctcccctttcatctccttcccctccacttccatccccttcccttccttccctcccttcctctcctctcctctttctctcctcccccctcccctcctcttcccttcccttctctttctctcccttcccttctctttccttcccttcctttccctttccttcattcccttcccctcctcttcccttcccttcttttcctctcccttcccttccccgcccttccctccactcccctaccttcaccccctcctcttccctcccctctccttcccttcctttctctccttttctctcctcttctcttctctcctctcctctcattcattcaacaaatattcatcgagtgcagtgcatacaatcatcaaaccatgtgatatatgctgaggataatgaaaccaatgagacacttttccttctttctaaaagtggagagttttgtatgggagacagaaaccatctcttacaaggaaaagaggcaaaagataactggaaaaaaaaaacaagaatctctggagcattttgtttttaaaagaataatgtgccaacatcccaagtgttctgggtatcaatttacactgaaatcaatttcctaaactcaaattcatctttatctgtagggttggacactgagaatttctgttattaagatataagattaggaaagaaagattgaattttgctcatcagacaacagatataaagtggatgcatatcttgtttttgcattttcatgttcagtgggtgattcttaaaatatgtttttaaatatcaaagcaattgcatgcacatagttaaaagcataaatcagctttataaaggaaagcaggagtctcctttgccaatgtccccgcatctcttcttttgggcacattcccaaaggcaagggattttaatggttagctgtttcttccagaaagttagctttatgctgtatttctaaatatgcatgcattattatttctttattaccctttcctagatattatttattgatttccctctttggaaagataggaatttagttttcttatatgggaataaatgctttccccagtctaggactaagatgaaggctctctgtctctaagagcctggagtgcttctctggaatgactgcaggctgtttgttcccaccatgaggattgtccaggctagagggagctagctttgatgagggcaatgttggttcaagcatgcaagcagcattcccacaggtactggctgttgttgtgtttcccatttggaattgctcagggaggctcaggccccccagaatataggctggcattgtaaacgaagaagaaaaaaacacacaacttttaagatggaaaactcttgctggaagtccaaggatagctctggggaccctgctggaggagaaattgagtaggtagtggtgggtggaacagagagaaaaaaggacatctgcagaggcccttgcacatcaaggagggaaggatgaaaaacagttactcttaggaataagaccttcatatatgatgacaacaagcggtggggaaggcagggattatttagtacccactgctgggacaaatttggcaaaaattcatgttgattcttgcatcagattcaacactgaaaaaagaaaacctatgccttctagataaagccaacggcttaaaattgtaaataaaaataatcaccaggacaaaataaaattgaagatttatcaagttgctgaaaaagaggactttgggtggataaaatcacaaaataaaagatggatgtagttgattgtatttttaaaaatgtctttaactttaaaaatgtttaaaaagaagccaagtgggaccatattctaagatgacaaaccaagacttgctaattttaacatcaagagcctatagaattattacaaaaatcactaagatcctgaaagctaaattagataggaaaataaaaatcacaaggaggaatcaaaatggctttaaaaacatatgggaacatattcaaccttaatagtaatcaaagaaatgcaaattaaaatggcaatactattttcagctggcaaatgtataacatttccaaaaaatgagactacccaaactgatgggggtgtggtgaaattgatactgtcatgcactgctggaggtagtgtgagtttgtacagcccttttggaaagcaacttggcaatgtatatcaacagccttaaaaagatccgtgcttcttaattcaacaattctacctccaagacagcaatcgtaaatgcagccaaagtgttctgtattaaaaactctgtggtggtgttatttataatgttgaaaaggaggatgtaatctaaatgtttaacatgaggaggaaaggttaggtaaatgatacagtccagttgctggattattataagcaactagtagtgggtcagaccaacctgaatctattctctgctccatcttctctgtgtcccagggaatagtgcttacatttctgtaaaattgaactaataggatcctgcagggtggttgtgagaatttggccaggtatttgtacattgcctgagagggggttcttttcttgtttctcaggttttttttttttttttggctcagcacctggcactattctattggaatagacatttctgtgacgaataggatacttatggccaaaggattcctccaggaaaacattaacaggagaaaggggctcaaagggcttaaggccaggagagatgcagctggatgcaactgctacacaaattcatgggggcacttctaggacctcatcccttactaccccacccatcagctcctctcctgaaactctcaattctattgtgatcaaatcaatgtttttgtgatagacactgggggtaaaaatgggggccagggagatgtttggcatgctgagatgaataaaccatgccttatgttgaataaaaaattttctctagctcttgcctgtaatcccagcacttcaggaggccaaggcgagtatatcactggaggtcaggagtttgacaccagcctgaccaacatggtgaaaccctgactttccaaaatatacaaaaattagctggatgtggtggcacatgcctgtaatcccagctacttgggagttgaggcaggagaatcgcttgaacctgggaggcagaggttgcagtgggccaagatcgtgccattgcactccatcctgggtgacaaaagcaaaactcggtctcagaaaacaaacaaacaaacaaaaatgtccctttgagaaattcatgttgtacaagacttagcagcacataatgttccccatgtagaggaaatggggaacattacacttctccgtagtgttaatggtcttgttctcatcctcaatgtgagcgtattttccttttttagtgtagtgggcacaatttcttgtgatttttctttcctaatgagctgaaatgtcttcatattaatcctggagatcctttcattttaaaaaatcaacatgcatccagaataaaaagcaattcttggggaaaaccacaactagctttgtgacatatttagcaagtatttgctgagtacatattacgtgtccaattggacacatgataccagttatacccacttacctattaccagttatatgtacagctttatcatgtgtggcaaacagatgtagcagttaattcagggtctcagtcctcaacaagctgtgatcaaatggtggagacatccaggtaaaaaaaaataatgataacatgtagtcaagggagcttgcctgtgctgcatatgaagtaacatgtgcagaagacagaagggaggttctgttcaggaagagaagtcaaggaagggtttcaggaggtggtaaactttatctgatctttgagagagaataagcttgtcaatgtttgaaagcaaaacactgtagggcttttgtggcacctatgcatccttttagactatatagcatggttttgaaggcagagagccctggattaaaccccagttcggtcggtcaccagctgtgtacattggaaatgctactcaacctctctgagccttactttctgcatatgtaaaatggtcaaagcaatacttcccctatgggggacatacaggaataaatcctcctccatatttccagggatatccaggcttctggtgatcacaaacagaaaacacttccaagatggggctttctatgctcccactgccatctatcttcccctctatggtctcttaacagtgagccagtgagcctctgccaagcaggctcttctgctgttgattcagtggtaagcttggaaaagccacttcccttccctgtaccttggttttctcatctaacaaataaaggaggtaaacaaaaatagcgcctttcagctatatcattctgagagtgttctaggcagaggagacagtatatgctaaggtcctgggtgatatactagaggtggtatggataaagagaaagaatttaggaggcagtggctacagtaaggctgtagaggtaggtgggaatctgtgcctcagagaggtgatataacttgcccaaggccatctatcttataaataggggatctgggatttgattcaaggtctggagcagaatccatgctcttgcaatcaccacagatttggtgaaacttggcctctttaaagttccccactagcgaggctgacatttgccaaaagtgagtttttgttcaagggcattagaatgagacccagagagcctgacccaattataattactctacctgccacagaacatttaaaaccaaccacattgggaggaaatgtttgctgggctctgataagggcttacatggagcaatgccctgccttgctcaccggactccaacagaatccaactgtttacttggtggaaactgcagtttgtctttatttacatttcccctgatggtgagggtcagcaggctgcaacctggctgagacaaggagtaggactttggagcattgggctgatacattgcgcaaagcctgtagaattctacagacccaacaagagcaggagttgggggcgaggggcagttaaggacaccattgcaactctcctgggcacctccactggaattttgaaaggagatcttttgtacaaggcaaagcagacttggaaacagaatttaccctcctaatgacttgctcttaggagagtgaggaaggaaaagagaaaatgagggcgatagaatgagctttgcaagaatgtatttacaattaaattgcattttaaaggaaatgtggaaatccttgctctgcagagaagtgaagtggagagaagccaacaaattgtagtcaaaagtgtaccagctttagagacaagaagacttcggttgcaatgctggatctacaattattggttgtatgaccttgcccaattaacctagctgaagatcaatatctgaaaataaggataattatacacttacataaggaaatgattgtgcaggttgtaacacagctgtcactaaatatgatttttctgtcttattaatcaagatatatgtacaataaacaggaaatggggaggggtagagcaccttggagtcataaaagtagactctgattagaagtatagtggttagcatctgggaatcatttgataagtctccctttaagaagagataaattttgagccatggaaggtagcatctcctagagagggagttagctctatagcctgacttgggaagtagatcaagtggtaccatttccttgggttctgagagtttaggaaagtgtgcatactgaccactgacctcagaccctgagaagggatatggggaagactttggggttcagtgggtagcagggatatatcccaagtctgacacccaaatcaaatgctataatgtggagctcacatttgggcaactttgaccaagctcaatgcagaagcaatggaatccaagaaccacactggtgatccgggaactgtaacatcagtgtagagagaaggaacaaacattacctgttggactctgtagaacagttccctggtttgtagaatcacctggaaagctttggaaacaaataagtgtcctgagctccatccccaagcccattaaatcaacgtcatcatgtgtagccaggcttgagaaccacagatgtagaccaatttaaaaaagcactcaggttgttttcagcttaaggttattatgaccagtgctgttatgaatatccatccatgtgtaagtcagcgtgtacggtggtgaaggagttgacaaaacattctatatccctaccatgggatattcttccaccataaaaagaaactattgacacacacgacatcatgaatgaacctcaaatatattatgtaaagtgaaaaagaaaagaaaaacagacagagagaccaccaaattgcatgattctaggtatatgaaatgtctggaaaggtagaaacagaaagtagattagtggttgcctggagctggaggtgggcatagtgatgaactcaaaatgaggatgagggatcttatggggggggtgtgtgtgtgagaatgttctaggctgggtgtggtggctcacgcctgtaatcccagcactctgggaggctgaggcgggtggataacctgaggtcaggagttcgagaccagcctgaacaacatggtgaaacccctctactaaaaatacaaaaattagccgggcatggtagcaggcacctgtaatcccagctacttcggaagctgaggcaggagagtcacttaaacccaggaaggagagtttgcagtgagctgcgattgtgccacagcctgggcgataagagaaaaacttcatctcaaaattaaaaaaaaaaaaaaagagagagagaaaatgttctaaaactgatttatgacggtggttgcatcacttggtaatgttaccaaaaattatggaagcatacaattgaaatgggcacttttcataatatgtaaaatacagctcaataaatttttttataaaagcaataaagtaggaagaaacaatagtgatcgccgacagtttcaaagcagttgctgttcttttttgagtgtggaagttgtacaatgaccctacaatgacctttccacccctctgccacaggtagactccataaaacctcatttctttttttctgtttaaaaacaatttttttttaatagagatggagtctcgctatgttacccaggctggtcttgaactcctggactcaagccatcctcccacctcgacctcagaaagtgttggtattacaagcgtgagccactgtacccagcctagaacctcagttcttttgagtaaaattgatgaagagacctaacagagggttatcagagtttgggccaatcttgtaggtgaaggactaaaaagatgacttggaaaaataaaataaatatcatcacatttatacactaaatttatagaacagctgataccagttatgtgaggattgagtgaaatatatgcatactggtagaatgccttggcagttggaagatgtacaacagttattaatccccttttcctccatctcgggaaaaacctgttatctttctctcttcttctttacaatctaccccatcccattgtttaccatcagaactatacctatattgaacagattttttttattctctgcaacgcttagactttactgattgactcactgatattttttctctctctctgtttttatttgtgatgttaaactctcagaacaactggggttattgctttctctctcatttcctgaacttgcaaagccacagaattggagcagtggcaatgatgtatccaagcctccagttgattcatcagaattggtacatttcaccccattccactggcttcacctgcaattagctgtgaacctccacatgggacaaagtttattgaagtattattaatattaaggacccagttttcaactgtgcattccccttacaccaatgcaaaaaaaagagattctacactcctggtaagacatctcaacgacatgtcctaatagacacatttcaaaatctcagatctgtgactgtggacaagttgcttaacccctgatatggtttggctgtattcccacccaaatctcatcttgagtttccatgtgttgtgggagggacctggtgggaggtaattgaatcatgggggctggtctttcctgtgctgttctcctgatagcgaataagtctcatgagatctgatggttttagaagagggaatatcccagcacaagctctctctctgcctgctgccatccatgtaagatttgacttgctcctccttgccttctgccatgattttgaggcctccccagtcacatggaactgtaagtccattaaacctctctttcttttgaaaattgcccagtattgggtatgtctttatcagtcagcagcttgagaacggactaatacaactcgctagaatcactctttgtctgttaaatgggaatgcctattgcacaggaaaattatgaaaattcaacaagagtagttttacaaagaggccacaggagcagacatagggcagggtttcagtgaatgttcattttctctcctaaacctcagaaacttaagaatctctaagattttcatgaattatcaaagtccatggttacccatgtatctggaatcggaaatcactttccaataggacagtctcccagggccatcagagagttggtaggaactgaaaataccactgttgaaagagaatctgggctcttccaaagtagttgtttttagaaaagaatcattcactgtgtgaccttgaaaaaaatcacttaacatcttcagttttctcacttagtcaaaagtaagatatttgtctagacaagtatccataacacatgccattggcttgcttacctcttacttgaaggctcgtaagatgaaagcataaaaatatgtgtttctgtccatcatttactgcaccactccagataaaaggggaagatggataggccatcatcttgagttgtctttattaatcaatgtttttaatttggtgttctggctctcagtctccttacatgaatcctttttgatgctctgggtaaatttccagttgctatatacaagattgttctgctttagcatcagcttttatggtgtgattccttatatatatatacttaggaaatgcactttatattgctaatacaactcttgaaaaaaattttctttcccttgctaatcagttgaaatgccttgaagaggtcacccactcctatagtttcggatgcaaatgcttataaatggtttaattttaagttttaattaattattccagcctctagcagctgtgcagtgaagtggttgttaattccccatggtagagataatgtgagcagacagaagggatccaaattactgctggctgaccctgaaagaaggagggaagagaaagctcctgattatgtcaagtggcccaaattccatgacatgccaactctgggtggaatcagagtgcttgaaaaagtcattcatgttgcctcgaagctggaaaagccacttagcaatgatagccatcctttggaggaaatccagtgaaatctaacgtgtttcgggcaggactcactaattccctgcagcagaaacacctcagccagtgctgagaattcaatcaattgtcctttcgtcaagcacaaattcccaagatccattggaagtgtggcccagagcgctaatgattgggtccactgtgagttggggccatggttatttgatccaggagacctgtcactcactatcaagtctaaattcctcactgatgacaaggtatgaggtcaaacctccttctattcagaagacatttgagtgcagctctaccgtctaccagctacgtgagattgggtaataaagacctcacagggctactgtgaagatcaagtgtggtaactgatgagttaggtgttcactctacattgtttctcttacataatgaggttatttatattaatattggttgtttttctttttagatcttttctatgcatattttaatgtaattgagattgcactgcatagacaattttgcctggatatagaaataaaagttcaacactatattctattagagcttcagactttgctttattgttttagtaattaagtctaaggtcaatatggttctgatttctttctatgtaaacatttttctcctttcttatcaatattttacaattttcttttaattttttgtgattataatatattatcaaatgtatgagttcgatgtagtaatattttaagaatatttggatgtatgttcatgagtacatttggtgtgtaattttgatttcagaatgtctttgtttagtttaaatagtggcattatgctggcctcataaaacatgggaggtatatatccctcttctctattttctgaaagagcttaccgttagtatgatttcttctgtgagtgttttatagaactcaccaataaaatcaccttggcttttcatcttgtttgtgaaaaaatttttaatagaaaatttaatttctttactaatattcctttattatccttttaatgtctctagaatctctgaaaataacctctctttccttcctgattctgttactttgtattctccctcttttttcttgattagttctaactaggtcttcatcaattctgttgaaatttttattttttatttttaaaaaaaattaatttaatttttccataatttattggggtacaggtggtatttggttacgtgagtaagttctttagtggtgatttgtgaaattttggtgcacccatcatgcgagcagtatacactggaccatatttgtagtcttttatccctcgccccctctgtctcttacccctaagtccccaaagtccattatcatccttatgcttttgcatccttatagcttaactcccacatatcagtgagatgtttggttttccattccttagttacttcacttagtttaatagtctccaatctcatccaggtcactgcaaatgctgttaatttattcctttttattgctgcatagtattccatcatatatatatatagcacagtttctttatccactcgttgactgacaggtatttgggctggtttcatgattttgctgttgtgaattgtgccactataaacatgcatgtacaagtatctttttcgtataatgacttcttttcctctgggtagatagccagtagtgggattgctggatcaaatggtaattctactttcagttctttaagtaatctccacactgttttccatagtgcctatactagtttatattcccaccagcaatgtagtagtgttccctgttcaccatatccatgccaacatctactgtttttttattttttgatgatggtcattcttgcaggagtaaggttgtatcacactgtggttttgatttgcatttccctgatcattagtgattttgaacattttttcatatgtttgttggccatttgtatatcttcttttgaaaactgtctattcatatccttagaccactttttgatgggattgtttgattttgtcttactgatttgtttgagttagttgtagattccggatattagttcttttcagatgtatagattgtgaagattttctcacactctgtgggttgtgtttactctactgactgttccttttaccatgcaaaagctcttcattttaattaggtcccagctatttatctttgtttttattgcatttgcttttgggttcatgatcataaaatccttgcctaagctaatgtctagaaggagttttccaatgttatcttctagaatttttatagtttcaggtattaggtttaagtccttaatccatcttgtgttgatttttgtgtaagatgagagatgaggatccagtttcattctcctacatgtggctagccaattatcccagcaccatttgttgaaaagggtgtcctttccccactttatgattctatttgctttgttgaagatcagttggctgtaagtaattgagtttatttctaggttctctattctgttccattggtctatgtgcatatttctataccagtaccatgctgtttaggtgactatggccttatggtgtattttgaaatcaggtagtgtgatgcctccaaattagttctttttgcttagtcttgctttggctatgcaggctcttttttggttctatataaattttagaattgtttttttttctagttctgtaaagaatgatggtggtattttgatgaggattgcattgaatttgtaggttgcatttggcagtatggtcattttcatgattttgattctacccattcatgagcatgggatgtgtttctatttgtttgtatcatctatgatttctttcagcagtgttttgtagttttccttgtagaggttttcggactccttgtttaggtatattcctaagttttttttttctttttttgcagctattgtaaaaggggttgagttcttgatttgattctccacttggtcgctgttggtttatagaagagctacagatttgtgtacattaatctcatatccagaaactttgctgaattaacatatcaggagctttctggaagagtccttagggttttcaaggtaaacgatcatatggtcagcaaacagtgacgatttaacgtcctctttactgatttggatgccctttttttctttcccttgtcttaatgttctggctaagatgtctactactatgttgaagaggagtggtgagagtgggcctccttgtcttgttcccattctcagagggaatgctttcatcttttcctcattcagtgttatgttggctgtgggtttgtcatagatggcttttattaccttaaggtatgtcctttgtatgccgatttttctgagagttttagtcataaagtgatgctggattttgtcgaatgctttttctgcatctattgagatgatcatgtgatttttgtttttagttctgtttacgtggtgtatcacatttattgacttgcgtatgttaaactatccctgcatccctagcatgaaatccacttgatcatggtggattatttttttgatatgttgttggattcagttagctagtattttgttaaggattttggcatctatattcatcagggatatcggtctgtagttttctcctttggttacgtcctttcctggttttggtattagggtgacgttggcttcatcaaatgaatttggtagggttccttctttctctgtcttgtggaatagtgtcaaaaggattgatacgcattcgtctttgaatgtctggcaggattctgctgtgaatccatctggtcccggagtttttttgttggtaatttttaaattaccatttcaatctcactgtttgttattggtctgttcagggtatctaattcttcctgatttaagctaggagggttgtatttttccaagaatttatccatctcttctaggttttctagtatatgcacataaaggtgttcatagtagctgcaaatgatcttttctatttcagtggtgtcagttgtgatatctcctgtttcatttcttagtgaggtaatttggattttttctcttcttttcttggttaatcttgctaatggtctatcaattttattcattttttcaaagaacaagatttttgtttcatttatcttttgtatttttttggtttcaatttcatttagttctgctctgatcctggtaatttcttctgctgggtttgggtttggtttgttcttgtttttctagtcccttgaggtgtgaccttagaatgtcactttgtgcactttcagtcttcctgatgtaggcacttagggctataaactttcctctttgcactgcctttgctgtatcccagagggtttgcattcagttcaacaaattttttaaatttccatctggatttcgtttttgacccattgctcattcaggaccaggttagttaatttccgtgtatttgcgtggttctgaaggttcctttttgagttgatttccagttttattctactgtggtctgagagagcgcttgacataatttctattttcttaaatttattgaggcttgttttatggcttatcatatggtctatattggaaaaatttccatgtgctgttgaatagaaaacttatcctgtggttgatggaggaaatgttctgtatatatctgttatgtccatttgttccaaggtatagtttaaatccattgtcgctttgttgacttcaaagtatttacaagaaaccttccagttattaatctcaaatttaattctattgtagtcataaactagtctctgttatttcaatcctctcaaatttattgagacttgtatggacctgcatatgatctacttttgtgaatgccttaattatttgaaaataatgaatattctacaactgatggatgtagaggtctataaacatcaaagatgtccaggcagtcgatagtatcattcaagtgacctacatctttatctaaaatatctgactatgattgtgaaatcacttctttctccctgtggtcatgtcagtatttggtccatttgttttggatgtctgttttcaggtgcatatgcatttatgattgttgtcttcctgaagaattatctgttttagtattatgtaatgtcactccagtaatgctctttgtattaattcaattttgttaggatgtataggtttttcaatacatacaaagtatctattgtccttattttggtaaattgtgtctttgaaggaattagtccatttcatctaagttatcaaatgtgtgagcatggagttgtttgttgtatacatttactctgctttaaatattcatgggatcagagtagtgatgctactttttcatttctgatattagtaatttgtatcttctctctctttctcttttttttttttttttttttttggttagcttggctagtggtttatatcaactttattgaaactttcaaaaagccagcatatggctttgttgattttctctattattcccttgatttctattccattaatttctgttctttcatcagaagaccagtgctctaacctctgagcttgagagcctcattatgcttttatattatttctttctatctaattgctttaggcttaaataactcttctttctctagtttctggaggtggacaattagtctattgattttagatatttattattttctgacttgttcatcgaatattatggatttccctctaaggactgctttcattgaatctcacaaattttgctaaattgtattttcattttcatttagttcaaaatattttaagaagtttttgagtcctctttgacttgcctattatttagaagtatattgtttatcatccacacatctcaagaatgttctagatatcttactgttatttatttcttatttaattatgttgtaacgagagtatatacctaataagatttcagttgtttagaatttattgagacttagatatctacatgcaatgaggttgtaccctttccttgtatcatacccaccctttaactcaaaatcaatcaagaatctaaatataagaattataactataaagctcttagaagaaaccataggagaaaagcctcatgacagcaaaagacatgtgacaagtagatgagttgaactacatcaaaataaaaaccactctgtgcaggaaagaatgcaacaagcagtgaaaaggaaacccaaagaaatgggagaatatattaggttgatgcaaaagtaattttgcagtctttgccactactttttaaattcttattttattttttatttttaaaattacttttaatatgccatgtagatactgtgcgagtcacattatttacattttctcattcaatataacttaattctcgtttttaaaaatatctatgagccagagatgaagatggagatgggaaagatgaagagactaatgctacacagagcgattgcacaacttacccaaagttatacagctagtaaatcacttttattattatggatgtttctttctacctctttaaaattctttgtcatgaaatctgatgttaacatggcttcctatagctcttatcaatatggtttcttattaatatgtttttctgctttcttgtgcttactgtttgcatagtatatcttttttcgattattttaatctcaatctttctgtatacttttatttcaaaatgtgcatcttcagatagtatgatgacttcttccttttaattttggtgtggtccatttacatttaatggaattactgaattgattgtatttaagtcaactatttttctggtttttttccattttcagtttttgttctcattcctctgtttttttttttctttcttttctttcttggggttatttaaatgtcttttagcaatttattatattttctcttaatttttcaatcatactttttctaagattttcagtgattgttctaggtatatcaatatatcttctttgtaaaccaattagagtttatatggaatcatattgtacttttttatatttcacaccaattaatgtacaatttttgctttctttttccatttttttcccttcatacctgggccacctcccaccttcctagtttctgctttatcctttatgttttattcataaatgtgatacttccaacagtataatttcattacccagcacccttatgatgctttatatacttgttttataattttacttctatatttgttttaaacttcattttacaatgttattatttttattcagtcagtgctaagagatgttaacttaaattttctcataatttaagaacattatgagaaaaagaaaacaatattttatattaaattacttatttaccatttacagtgctcatcactcttttgagtacattcaagtttctatctgatattatttctctttggcttgaagaatatccttctacatttcttctcatgcaggcatgctggtaatgtattcttccaggtatgatttatctaaaaatgcctacatctcacctttagttttgaaggctatttttgctgtatatagactttttgattgccaacttttattttttccttcagcatattcaagatttttttgttattgtttctggcctcccttgtttctgacaaaaagtcagtaatattttttacatttgttctcttgaattttatgtgtttttattttcctactttaaagattttttgtcttttgttttctacagtttaactacatagttcctgagtgtggttatatttatatttactgagtttcttgaactataacttactgttatatatttatcacacttttgtgaaatgtttagctattacttcttaaaaataaatattttttctgcttcagtattactcttttctcttttggagacttcaactacatgtatgtcagatcatttgatattgtcccacaggatcctaggactctgttacatttttttagctttttttgttttgttctttaggttgcataactttcaattacatgtctttaaagtcactgaatgtttcttttgctcacccagtgagtttctaaatttcacatattggacttttcgttactatacttctaagttctagccttttcatttgattttttcttgcattttctatttaactgctgagatttcctgtctgtccactcattaagattacattttcctttaggtttttttaaatatcatttgcgaatatgtataatcactgtttgaaaatctttgtctgcttagcgtcatgcttggaccagctcaggattggtttatattaatgactttatttttcttgactatggttcattttttcctgtttacttgtatggctagtgggttttaattgaatactggacatggtgaataatataaagactttgaattctagttttttgaagagtgttaattcttatcttagaaggcaattcaactactggttgatcactaggaactttgtgcaactttggctttacattttgcttgttcaaattttatttagaatgtatttatcaaatttttctaactcagctaacttccacctcctaactctgtctcccctgcagatcttatttgggttttcttttaggctttgttagggtaggccaaagcggtaggtcttactctagtgtattaatctgttctcacactgctaataaagacatacccaagactgcgtaattctaaaggaaagtggtttaattgactcacagttccaaatggctggggaggcctcacaatcgtagtggaaggcaagaagaagcaagtcacatcttacatggtggcagggaagagagaatgagagccaagcaaaaggggtttctccctataaaaccatcagatctcgtgagacttattcactaccatgagaatagtatgggggaaaccacccccatgattcagttatctcccaccagatccctcccacaacaggtgggagttatggaaactgcaattcaagttgagatttgggtggggacacagccaaaccatatcatctaggatgtgtctttattctaaaatgaggacattcttgtgtctttgctggatttcaggtatgttaatgatgtgttaacaagatctctccattctaggaccagaaccccaacatctctcggcactctttttccttcagcactcttgatctctagtgtctaagttccattttcaaccctaacttttgttgtcttctaaaccttgggacatctcaccttgagaatggacaagctagccctcagccatacacttacaagtgaccccctgcatggacttttagggcaacctctctgcacatcttccatccttttgatgccttcattaaacattactcatgaattcatttattaaacagattgcaagctgcttcattgcatatatttcaaactctgctctctgccttctcaacttagcagaactgctgtgctctgttgagactcctgttttctgcatcacactggagaaattttccccaagtatagagctatataatcacaggacttacctaggtgtttcctctttcatgaatcacaatctcgtgctgcctgttttccaccgtctgaaaaacctgttggcttccatattttgtctacttttatagttattcacagtgggaagtctagcccagtaccagttacccttccatggacaaaaacagaagcattaacattttcttttagtatcttgaattcagatagtatctttagagtatatttagatgtagtgcttgtatttcttatcattgcatttaaaatagtgcctgacacacaggtgatcaataaaaatgtgttgaataaatgtgatttacctgctgattacctggtcagctctttctttagctcagaaaaatttctttattatgcatttcattatttatttatttatttactgtaagacagagtcttgctctgtcacccaggctcgaatgcagcagtgcaatctcagctcactgcagcctccgcctcctgggttcaagctgttcttgtgcctcagtctcccaagtagctgggattacaggtacgtgccaccatgccgggctaattttttgtattttttgtagaggcgaggtttcaccatgttgcgcatgctggacttgaattcatgggctcaagtgatctgccagctttggcctcccaaacagctgggattacaggcgtgagccactgtgcccagtcttttttattctctttggaacatttgctaaacagatgttggatcttctggatgtatgttacctgtcttaactttcccctcaccccatgtttgatcttttttttcactagttataacagaattcctcagctgggtgtcccaggccggtttttggtattcatggatagccttttttttcttttacattccacccatctattaaattttagcttttaatttgacaatcatggctttaaaattttgtatttgagagtttgagagttcaggtgttttcatttccttagcagcctgctctttcttattgatgtgatggctcaataagttacttcatttattgttaactgtttccttacacatgatttgtttactgtactttgaaattctttttcatacagttagattcattccaatgtgtggtatttattggttgctattcacaataattgatgaaatttaaattgaacgatgttggcagctggggagtaattcttctgcccaaggcaaatttcatgttctcttggcaatgaatgcagatttagattataaatgccttaattcaggtgtagttttttttttttttttttttttttttataaaaggaggcagatgaggccgagtgagatttactttaacgtatgtgggtggaagattttcagttttgaatgtgatctccttgtcttgcctggaagctgtaagctatccaaggtatagccccacttctctaaccatagatcccgctttggggaccttctttgttagagtttctgggttggaaatctgtatataagacattatcctaagtgtaaatgtcagataaagccaaggcctggcttaactgctttatcttttaattacttatcctgctgacaacccacaaggtgcttgttctttaacccatctgttttcattgccaatctcttcaggctgattttctcttccatcagaggatactggtggttctcctcctatctttccaactctgtcaggggttgtttttaagtatgtgtatttatcttctaccattttagtcatgtgctttatgaaaggaaaataaatttgagaccccaaaaatcactaagctaaagggaaaagtcaagctgggaactgcttagggtattctattcaaagctcactgggataaatgcatatttgattgcctcctttgaaaaggctaatcagaaactcaagacaatgcaactgtttgtctctaatctgcctatgagctggaagccccctcccctcttgagttgtcttgcctttcttgcaatattcatcttacatctattgattgatgtgtcatatctccctaaaatgtataaaaccaagctaaccaagctatgccccaaccacgctgagcacatataggcaggaccccctgaggctgtgtcacaggcatgcatccttaactttggcaaaataaactttctaaattgactgagacctgtctcagatatttggggttcacagctttaaacccgaagtctccacttacaattttatatcctatttttcagtaccattgctgccaaagattttctttgtcattaaatttattcacaccagtgtaaaattacagtcaagagcccgcataaaacaggcatacagctctgagtgaaccaattgtctgggcaaaatataacagccagtttgtttgttccacagtgattagaaaaaaaattaaacctatattagggaaaaaaagtaacaagaagaaacacgtcatctgcaaaatatatcggagagctttgatgtgtgtttgtttatcactagaggataatcactgataaaagaaatctcatttgcagatcaaaagtatcctaggacagcagacatccatagatagattttcaagaaaaggaaatgaagttagcataagcccaaataaacttcttgacctgatacgtaaagccataaaaatgatgcttcttagtggtcttacacacagactcccagtaaatgagatgaagctgtggggaatttttttgtttttgtctttgtttttaattcttatttttttattaagaactaagctggatgaattatggccaccaggcaaatggagtgtgggtatatgattgtgtatttttgttaattttttttaactcattacctcttcgattcactcattaaacaaatattgattaagtatccacaacagacaccaaacactacttctaccattaaggaagtcccactagaagaaggaaaatgtaagtacgttatttaaaacactgtaacatggccctacaataagattaataacatgatctacgctatcacataagaacccaattaaatgtggaaggaaggtaaggcctacaggttcattgatggagaagagtgtggatggaagaggctttttaggagatgagaatgtgttcagttttggacttctgactttgaggcaccggtggaactattccgtggcagaaagataagttcatatgtcgcttatgtgcgaatctgagctgaagtttatatctgagtggctaacatgataatgataatactctcccagatggagaacaactaagctgaaaaaccagaaggactagaaggagttaatcaggtaaagatcactggcatggagtttttagatagaatagatgttgaaccattcagatgcatttgtgaacataatatgattcaaaagaattgtaagtcgatccacatggccaaaataaagagtgtgatggggagaaagcaaggaatattgctggaagggatagtgggagtcagaccctgcagggtcttttatttgtgctggcttttgtccagaggaatagcatcatcaggttttggatgtagagcatagactggatcacaaaaagaagaactggaattgcagggaccacctaagtgagtgttgtagaaattcagctgaacaatgatagtcactttcactaagatgttcttggcaaaaatgaagataaatggaggcctcctagaactacttagtgggtataataaatagaatctggcgagtgttttcacctgagagtaagggagaaggatgcattctgttgaagccccttcgctaatgggtgaatacaggtccattcacagagaagagtgtggatggacgaggagctttgggaggtgacagtgagttcacttttggacttctgagggaactattccatagcagcaggttatgttcttatgtacctcatgtgggaatctgagctgaagattatagctgggtggccaaggtgataatgacaattgaaaatatgggactaggttaaaaaaagaaaaacaacctatgaaagagcatacagagacaaatatcagagagataagagaaaaatgggaccatgttggctattggtcagcttagtctgccataacaaaattccatagactgggtggcttaaacaataagaattaattttctcacgttgctgggaagaggcagttcaagatcagagtgcttgcatggtcaggttctggtgaaggccttcttcctggctcacagaggacggccttctcattgtgttttcacatgggagacttgagaagaagatagggattgggggagagagagagaaaaagggagagaggaagggagagagagagacaaagagagacagagagagagatcaagatctgttttcggccaggtggggtggctcactcctataatcccagcattttgggaggctgaggcaggtggatcatgaggtcaggagatctagaccatcctggtcaacatgacaaaacgctgtctctactaaaaatagaaaaattagctgtgtgtggtcacatgcgcctgtaatcccagctgcctgggagggtgaggcagaatagcttgaacccaggaggcagagattgcagtgagccgagatcacaccactgcactccagcttggtgacagagcaagactctgtcttaaaacaaaaacaaaaacaaaaacaacctgttatctttttctcttcttataagtccacaatcctgttggactagggaactcatttaatctttaatcctaattacttccttaaagaccccatctccaatatagttacatgaaagtgagggagtgaaggcttcaatatatgaatgagtgaggcttcaatatatgaatgaggttggtgcacaattctgtccacagcagttggtatcacctaagccaatgaaaacctgtcttcaggagagagtgagtggtaaatagggttagaggctgcggatgagttaaggaagaggaagactgaaatgtgtgcattggcattggaatgtccgcaaaggaattagagtagagcactttctctttcctagcccaccctcctctcctctttcttctggcattgtgttgtcctgtctcttgtctatcatattcccatgttttccctctggctaaaaaggtgggcagatgacattgccctgccatttaaagtttcttaagggtgggcaagtgacctaaactgagtccatctgagtcctgtctggcactcagttttggttggtgggggggcgggagggttgtggcagggttggggggtgctgatgggaaagttgattgcttgttctttgggtcagggttctagaaagaagtaaccagggaattactttcagttgtgggacaaaagtccttgtgcagaaagaaaagataaataagcaaaaagcaaacaaacaaacagaaaacaaaaaaaaaccccaagaggatcagacaatatattagcagtgaaagtgatgaaggagggtaggaaagaaggaaggagaaaaattgggtagggagagacagagtgagagtcagagcaagagctagagagagagagaaagagagagagagagagattgagagagactggagagttggtttgttggctgattaatttctgggagcattgagtttcagaatgaatctgcaagccccaaactctcatgtctttttctttgatcactgtaagcaactctaactttcttttcagacacatgatccccaaattctcttttgcctaagctagtttgaattgtgtttatactttctaataatatttgaataatcctgactaacactgacatcactaggtatggtgattaaagaaagaatgctgtaatttgagaatatagggttaaaagtagataaaataagtctagttgttttataagagagatgcatttattcaacaaatatttactattctatgccctggagattcagcattgaacataggtggtatggtatgtgcatagttgagtgtgaataaatctctttgataacaaattccatggaatgtaaaaatttagagcccatttgtagtatgatctaatctttatttctatggtattgtacatgtagcaataatgttgaatttttgtttaacactatgaaagggcaaacattttcatttatggaagatagccaaaatagagcttctcccttaagtactatgttggttttgggaatgaagatgcaaacagagtcacactttcctgaattggatcttcttgttatttttccccatggtgggcattcacccatgcttttagccaagatgagcacaccgagaatgagatggcacaccattgttaagacctaggaggatggaagctgatttcaaaacagaccttctgcactagggagcgtggtatcttgttttgctgccaattaagtagtgatgagtttgtcgtgtttcctgttatccaggatgattaatctgagccctgaatccaactaaaccattaaggaaaattcacagcaagataagctgggagtgacaatgttaccctttacaagaaggggagatgacagaatgaaacacaaccccctgcctccctctctctggtttccagcctgtggtggtaaaatccttgggctcctactgtgataaagagcttgggaaggcatgagctagagtcacacaatcagagactcttagaactgaaaggggccttgggactttgcttctccaacctgctcatcacacagatgaaggaatggaggatcagagcgttcattttactcgcttataaacacacagcaagttgttgactgggccgggactagagccccatcatttagcacttattgtggtctctttcccattgtatcatagagttctgagctcacagcagctgtcttcttttgcggaagagagttgcagtactgaacacactatttaaggacctgagatctaatctctagactagcctctggcaccaacttgctataggaactgcagttgactggctgctgtgtggggtactttgcttatttctgtatgacttttcattcttcactgggctggatctgttaccttatgtggtggtctcagagaagcatttcaagagagtgaaggcagacaccgcaagaccctttgaaatttagactccaaaacttgcacaatatcacttccaccattttttattgatcaaagccagttactgagccaacccaaaccccaggtgaagggaaacaaacccaagctcttgataagactagtgacaaagttacattgctaagggtcctatgaaatatacctaatttttgcagtaatctttgcaaaccacatcttccatatttggcagtcttgaaatgtacagttaccccacagaaacagcaaaataacccactaacttcattacccacacactttatgtattgcctctttttcatgtttcccatgaagtgctcccaattttgtttttgtttttgtgtaagggaggaatcttaagagagaaataagcatgtgtatgtagagcatgtgatcacatatatgcatgcgtgtatgttctagttcatgttttaagttgatatttgagttacttatttcccagaaaagatgtctcatgacaccagagaatatgtaacatcaaaagaaaaagcccaaattcaaaatagatgtaaagctaatttaaaaatagaagagtagagcaataagatggagccagaaataaggcttaaaaaagcatactcttatatcattaacacttgtggtaggcaaactgcagccttgactctgaactgtgtaggagcctttatgaagatcacaacacatgactactgctaagagatagggagaaaacagtgtttttttaccttttggtcacagggcctcctgtcaagattgtattccctttctttggatttcatagcctacttatatctgagtctatatatttttcctcttttttttgtagcttgagtaggattcctcatgatcaatgtcttctgcttgaaaatgtaatcttaaggaaaagcagagaccaagtgtggagacatcatggcccccttgggtctgtccatggtgctgaactaggaaaagccaaagatgacccaagacccttgtttctaagagcgtctttgctgtgactgacaagagtcgattacaattcaaactacgtgtgtgcttgtcttgactattgcttttaaaccaggccactcctaacatagtgtttttaaaattatgcagttggaatcctgaaacagaggagttggatattcctgtccagattaccaagaaaggcttgggtttctctctttattcctacctcacctcttgaaataaccttgcgtttatgtttttctgatccttttacttagacaatggacctagctgtgtgctcattccaaatctagtgacagattttctaagcatttttgtttttcatcttttcaattatttcttaaatatccagtgtgtactgatttctctctctcttcttagtagcctccatcatgtaatcaagcccaagtccctgaaatccagtcctcatccaagagctggtcatcttgttcctatcaaatacaatcaacctctcagatgagaggaagtaatacaaaaaagaagtcttatcttcaatacaatacaagggcagggaatggataaaggactctgaggctgtcttgtatattgtaccctgagaggttatctagaaagtaatcttttaaaacactttttgaaaaaaaatttgtcaaggaccaacagttctaagacatccagttgaatgagggcactgcttccttgatcccagaagtcatcttttggaaataaagtaaatatatttgcttgctttagcagaaaaaccagtattgatccccattctaaagagaatggagagagcagatggctgctctccatcaaatgaggatcttttttcaagaacaagatgaagcaaacaaaacccaggtttcccccctgcaaactgctgtttctcttggctactgtatttactggagcaatcaatgagacaaacagattctaaatagccttcacatattacccaggattaaaatgagtacccagctgtggtagacaaattcagaacaagttatttcagataacagtcctgtgattgttttgaaacaatttatttgtttatctgacccacaacacacgcacgcgcgcaaacacacacacacacccttacttttcccttgaaaaaatgagaagaccacgttggttttttaagtgttttgaactccatgttctttgctccctatggctagtcaaccattaagtcatgtttgttgtaccatctgcaaagctcttaaataatgcagtggcagaatcgtgcagtggttgagagcccagactcaaaacgtagacatcctgggtttgaatctaccacttgcaagccaggccaccttaggcaagttgctcagcctaacttgtaaaatggaggaagtagtagaacctatttcataaggttgtttattaaatatatataatgtactagtacagttcctgacacaaaacaagcacctgataagtgttattattggcaatgtttttgttattcaatctcctcacttatttccttttacagtctaagttgaagccaacattatattccacctggacacctccagtagtttcataatgtttttccatggctctgccttaattcttatttgcatcctttccattctgtcattgcacagccagaatgaacactcaaagcaaaacaaaacaaaaactctagtggttgtatgtgtgtctaaggatgtagaaatggcaaaaattatgagagaataagccataggaacttagaagattcatgaggggcattgggttttgtcttgctgtgtgttgtggttttgttcttggttgtgcgaagggttggggtacccagctgacactggcttatccaacactccaacccttgaatttttgaccccatcatgtaagtaagcaagctacacaagcaagccacacaattattgcagagcttctggtcatttctaacacagatggcattgtcacatatcctagaaacatatgcaatatcctgcttggtcattggattatgctaaggggtttcattggccagtttatcacctagggtttgctgtgtaataatctaccccaaaactcagtggcttaagataacatctattattatatatcacatgaccatggattccctgaggattggctgccccaggatgggttcagcacatctctgctgggtttgttaatacgtctgcaaatcagctggaactgtatgttaaagttagttaggccaccatagctgaagaagccctgcttcgtgtatcattcctcttcttcctggaccagcatatagcctgggcttttccttctcaatagtgatgcagaaagtgcaagactcttagtggaaacacatgaagcctcttaaggcttcaactcaaaaccagtgcatcaattctgcttcattccatgacccaaatcaagtcacatggccacatcaggggaaagaaataacattccacttgttatgtgcatagacttcccggtgccaggatatttgcagctgtgagatctccaaggtgttacccaaggcactgttatccttatgggtttacaaatggcccacattggcaaatactgtatcttcattggagagcaggggtctcaaactcaaatacttacagagttcaggcagcaaatacaatgagcgaattgagttgagtgggaagcataattaaatggaagcttaattaaaagattgtgtcctatctagagtgagggaggatgactgtgaatgaaagcacgtccagagttaatagccaacatagtgcagtaaccgttctaacatttacatgtgggaggcactgttctgaaactccacttacattaattcatttaacccttacaatatgcttttgtggtaggtattattattattattgccattttacagattaaaaaaactggggaatagaaaggtttggtaccttgtccgcaatcacagagctgagattctaaaccagggaacctggctctagatttcatgctcttaattgtgacactacatcaccaaattttttttaattagaaatgcagacttttgcattgaaccattcaagttttacacttaataagaaagtaaaataaataaaacacaaattattttgtagacaaaggaaaatatatctgggctgaatttgactgtggatctcttatttgggaccattatctgaccgaaagagttggtctgcttaggaggattttatcagcctgaattcagagaagctgctcagtggctccaggcctcctacccttctggaaaagtactgaacacaaccaatccttcaaaaatcaattctcaaaattttgacagtgtcttcatgaaactctggccagttctcctgccctggcatcggcccagggtatcaggtaggcactgcctgacattggcccgtccttcagagggcattgaaaatcagaactggagcccaggaaggagacgagccttggtttgcatatcaggctcgaaaggccagctggggtcttttcacctcggggggttcaatttcctgcagagggctaggcaggtaagagatgtgtcaggtgccaaccagctgtgatttaataatgttgtggaaaatttgaggattggagaaagagatccctaaggaggcaagaggatgtgaaaactagtgataaaaaatttatcacacaatgcagtggtcctttctagaggaccaatgcatgaagtgtgccaaagagaaaatttgaaaattcaaaggaaggagcattgattcagagaggacttaaaaaaatttctgtcggagcttttccttgaattgcccaaagtcataaggcaagtcctcgtgggacaaatacaccttttttgagcctgtatcagactctgtatatgtctattagctagaaaacgggaaggattttttcatgcctttcttgcaaatctgaaaagtgtctcttaatccaagtccttctgttaatctcaattgtcactctcatagcctacttgttgttgtggtttcagcagtgataacagatagatcttttttattgaatgcaatattttccttcactatcaaccccacctcttcttctgtcactttgaaagaaaagacttctgcttttttgttttttttttttctctgcaacattccccaccctccatctttttggcagaaacagatgctgggatttctgaaggtgggaaaataagtggttacatcctcaagttatatttttttagcactttatgtaacaaatcctggcaatatttacccatttgtattatctagagggttgttatttgctgtgcgtgctgtttttgaacagcacgcaggggggaaaaaaacagatcccttcctcactgtgtccgagaatactgggaatatggttgaaaatgttctatgtggaagggccacattctgtctgtggattgacggttgcattcctagtaacaaggcataacatggggcttaaaaaaaaaaataacccttcacatacattacaacattgcaatattattccctttttatagatacaatacttgctcattgcactttgggaggccaaggcaaacagatcacttgagatcaggagttcaagaccagcctggccaacatggtaaaactccgtctctactaaaaatacaaaaattagctgggtgtggttgtgggtgcctgtaatcccagctacttgggaggctgaggcaggagaatcacttgaacctgggaggtggaggttgcagtgagctgagagcatgcccttgcacttcagcctaggtgacaagagggaaactccatctcaaaaaaaaaaaaaaaaaaaaaaaaaaaaaagagaatgctttctcgttgtaaaaatgtcttagaaaatacaaaaacaacaaagagaataaccattcatatttctttccatcagtaataccttaactgtttgatgaatgctatctcatgtacccattcagaattatactgtaagcaaatattaatatccagatttatatttgactctaatggcatccctatggtattagaaacttgaaatgcctgcataatgtttcagcacactgatgttcaatagcattttaatctattcccttatggaataggctattttcaagtttttacttctataaaggctaccttgataaatggttttgttcatcattcttttgtatttcatattattaccttaggctattcctatgggtcacatggttgagcccaagggaaggatatttttaagactgttgataatttggccatataattttttaggaaattgaaacaaacttagatcgtggagcctttgagaccaggttgacataagcctgtggttgaggtttcctttagtctttgggaaaagtatgaaagagatgatgggatggagagtgcctggggttgagacagttgcaggtggtgtctctaaagtggaagatacctgagtgatgtgagaaaacagcatgcatatatttaggagaagggattcccagcaagaacggagtagcagacacaaagtcccttaggcgggaaaagatttgactaagtgaagaatagtgaaaagaatggtctggttgttggcgttgagcttcttgacagtcagagaaagaagaagttgaacttcaggtgctcccttctacagggacatagttatcagtgcgttctttctttttttttctttcttcttttgaggcagagttttgctcttgttgcccaggctggagtgcaatggcacaatctcggctcactgcaacctctacctccgaggtccaagcaattctcctgcttcagcctcttgagtagctgggattagagtcatgcgccaccacgtccaggtaattttgtatttttagtagagacagggtttctccatgttggtcaggctggtctcgaactcctgacctcaggtgatccacccgcctcggcctcccaaagtactgggattacaggcttgagctactgtgcccagctgctatcagtgctttctgaaactcttatcttccatggacctgccaggctgcagggaaatacattcttgtgaccaattcaatccatggacaccggctgctcttcgttcaaatacagagatgctcccttcattatagaaactcatcaaccttcctggtcttaattctgattttcagttagttcagaagttcagagaggatgtggactttatagagcctactaagctggaaggaactgatgatcaaactcctatagggaaaagtaccgtggaaactctaattttctattaataattattcataattctactaattatcaatatcaatattattatcaataataaacacgatgatgactcacataattaagagattatcacccagactttgtgctaaaagtgttatatggattatctcatttcaatcatcacaataatcttaagaagtaggcaatatatcttgttcttattgtgtagaggaggaaatcagagcttagagtgcttaagtacattcctcaggatcaccaagctggtaagtgctggagtcaggatttgaacccacttttgtctgactctagggcttgagcttcttcatcaccatgcagtgttgcctccaggattgcctgggcgtttcaggtcagagttcgccctgtcaaagccgtacttcatctggcgaaaccctgaaatgcagccctttggaagagtttattctgttaactaggccctaaggaaggagggcttgaaacttcactctcacacatcctggcccccatgctgagatctggcctaattatggctttcagagccaccacagggcttggttagtcagaagggcacgtgtagtttcccttctgcacacaactgggttctgctcaagggcagagtgggaagctccctgcatggggtgcctggaagcctttcccagacacacttggttaaacaagcagtctccttggctctcctcagagctgcaaggataaggcaaggactgccttgtaaggggcctacagaaggatgctcccaagggcagccagtgacctccagctcatctagcaaagtccagcttagatatccctctccacttatctaagccacagttaccagccaaccaaattcactccttaatgccctgaatattactttgtggctaagggtgtaaaacttcctttgccaaacactcattagcgcttcccttgtacagacagtcactgctctagatgacctttcagatcatcaggaattagaccctccttcactcttcgcaatccaatgaagtaggtacaatttctgttgcctttttaccgatgaagattctgaagcacggaaacgttatgtaacttgcttaaagtcgcacagctggcaggcagcagaagagttcagagtcaaatcccggtggctcatacctgtaatctcagcactttaggaggctgaggtgggcggatcacctgaggtcaagagttcgagaccagcctggccaacatggtgaaacgctctctgtactaaaaatacaaaaattagccgggtgtggtagtatatgcctgtaatcccagctacgtgggaggctgaggcaggagaattgcttgaactgggaggcggaggttgcagtgagcagagattgcacccctgcactttagcctgggcgacagagtgagcctctgtcaaaaaaaaaaaaaacaaaaaaaacccgacaattggctttaaagtccaagctcttaaccatcctgtagaaatggggataaacagatctctgttcaaatctttgctatgccactccctgctacgtgtgcatgggcacctcttttaactgctctgtgcctcagtttcctcatttgcaaatggcaggtactggttgtacatactctatagggtgacggtgactgtgaggattcaatgagatagtgcacatgaagtgccaggtaggagtgtggttgctcaaagggaccttgccttccttaggcttatgttttactgccacttccgttcaactccccctatttcaaagtagcccagctgttttcttcttccaggaaagacagactaaaattgcaccttgatccaagcaaaagaaagaatgagaggtgatggaggcaggaagaacaaagcctagaagtagcaggctctcgctcactttccctttcttcttccctccccagtacgcctgtatttcaagatgtactgacttcccagacccaatccgcccccacattccatttctgagtgggatactatgatgtaacaagctgcaaagggaagccagctcccctggaacgagaatcaattttgggagtttccctgcaaatgtaaccctgcttctcctcattcctagccccaaactagctcatccaggtgggccctcctggagaaaaatcggagaggtgcatattcctgcatttccctcgacctactctgtgatatggtctgccccatgagcaaaatgtggagtcagattactcaaagtctcatttattaattgggaattggaggccctttatgacagaactgggcgattattgaagaactgagctgccatgaacgaatttaatttcaagaaaaagtcaattcaattgagtcctgaaaatcattctgatgtactcccagggaattctatttggaatcaataaacgtgcctgtgtcactgactcttgtctccactctctcccctgctggccccaagccaaggagaaatcattcaaagagaccaggtttcatttcagagaaatgtgggttctgccaagtgcacaaaatggagcacttattggctctgtgataaaatctcccccctcccctcccctcttctctcctctcctctcctctcctctcctctcctctcccctttctttgtctctcccctctcttcctctcccacctcctccttcttctttctttctcttactctttctttctcttctctctttcactctcctgtgactcttttctttccttgtcaatattgactccttctcttttctattcttttatcaccaattcgtctttcccttctttcaaaaatgcggattcacccttccttaaaaactctacaatctgtatgcaagagtctgcccagagttccctgtggaagtgccttagagaatttgtggtgccgaccatctcaccagagcctggatgactttgaggttgggtctgctgaggccagacaggtggaaatgcccccagaggagaaaaggttggaaaggagacgagattcacactgagacatcctatggtgatggtttgcacttctcaaaactttaatgtgcagaagaaccacttggagagtcttgttaaaatgtagtttctgattcactgtgtcttgaatgaggcacgagattctgcattttgaataggcccccacataatgctgctgttgctggcctcaacactgcacttgaaataccgtgaggtcgaatgtactgtcacccaaagtgtaagtcatatgcagctgctggtgcacaaaaagacatttggtgatgcacaggtgaagatttttaaacttctaatagttctgtgttaatttttattagtagcagaaaattataactaagcacctgtggttttatagataatattgcttgagaggagtttgaaagggtatttaatttcctaactgagttgacttaaataaaattattaaggcattggtagtatgaggtatgtgggtgtaatgattctgtgaatgcaatgagtgaatgaatgaagttgggaggagaggaggcacagagaagcaaggagcatgggctttggaatgaagccaagatttgggctcaaatcctgactctaccaaacttattctctttgaacgtcacttttctcaatgtcaaacgaggctaatgttgtctacctcacagagttactgtgaacaggagaaagatagtttgtggtacatgcctggtgcaaggtggggactgagataatggagataagggtagcaattttactattgcagagagaatggtgggcccagagtgaggggtacacactgattttaaaggatacagggcagagacagaaggcattagacagtggggtagtatgagctgcactggtcctttcttccttcatcacattataggacatagatccttgtttctcggtccagttgtgtcatggtggttaaagggaaacttggaaagccagaaaactatttatacaacctcttgtttgtccccccattgaacttagatgcacaggcaggaaattaacctcatttttagatagtaaagaaagcccatagcttgtgtatgtgtgcctgtgagtgcatgcgtctatattagaaagctggacagaacctcaaagcctcccctataaatagttctaaaactgaacctgaggagataagctttactaactctgaaaggcaaacgatgccaccagcctgatgccccaggaggaataaatggagcccctctggccttagttctttgcaatcaggcccttagttgcaatgggactgagccacctccctctgcatgatatgactatgggatacagactctctccatgaactaaacccagaggctcccagaaggggatcccagctgtgccactcctgcttccttcttttggcatctcacagggagccatgctgtcttctatcccccaggaatggccacggcccacttccatctagataatctcacttcctccaggtagtcttcattcatgcgagtacgactgatacagtttgactctgtgtccccacccaaatctcctcctgaattgtaatccccataatccccatgtgtcgagggagggacttggtgggaggtaattgggtcatgggtgtggtttcctccatgctgttctcatgatcgtgagtgagttctgacgagatctgatggctttataatgggctcttccccctttacacgctctctctcacctgttgccgtgtaagacgtgtataattataagtttcctgaggcctccccagccatgcgaaactgtgagtcagttaaacctcttcctttataaattacccagtctcgggtattcctttgtagcagcgtggaaacagactaatacgatgacccagtcaaaatggcaataactgttttttgcccaagaagcctagatttaaagcatttgtgttattttctccatgtgtaaaaagggaatacaaggcagttcctcaaaaagtcaaacatagagaactaggaacaattctacttctaagtatatactcaaaagaaaggaaaacagatactgaaaaaaatacatgtgcatgtatgttcataacagctgtattcacaatgggcaaaaggaggaaacagcccacatcagtaggctaaatggatgattaagtggataaataaattgtgtgatataaaatattattgaaatattgctcagccataaaaaggaatataataccagaatatgctccaatgtggaggaaccttgaaaacactatacgaaaatattaagtgaaagaagccagacacaaaaggtcacatattgtacaattccatttatgaaaaacatctagaataggtaaacctatagagatagaccaaagaatggtttttgccagggtatggaggggagagaagaatggagaataactgcttaaagggtgcaggattcccttttaggatgatgaaaacgttttagaactatacagaggtggtggctgtacagcattgtaaatgttctaaatgccaccgaattgttcacttcaaagtggttaattttgctatatgcattttaccaaatttttaaaaaaggaatgggaataattactctcttaatatgattgcgtgagaatgatgacgtagtgcaggtagaaccccaaacacaccctgtggcttaacacttgtccctcaataaatgcatttcccttcttcttcccagacttaatcttttcacagaccacaagaatcatatccctggtgtcccataacaaagttgaattgtccttaatttttaaagggtgatattaattgtttagggaaacccattggaaattaaaaaaaaaaataataaagcaggaaatgtacaaaaggtaccatttccaagcctggtttctgactatactacagcttttttgtttacctctgggatcttactctccatccatttctccaacctctgtctttgtgcttcccatttgtgcaacaatgaactattctcctctatggtttttcaatttctagttccaggctggatttgtgtgaatgaagtcttacaccaccttcatcacacggaagttgccttttattttatttttgcaaaagggtctcactctgtcacctgggctgctgtgtagtagcatgatcacggctcaccgtggcctcaatctccccaggctcaggtgaacctcccacctcagcctcccaagtatctgtgattacagacatgcatcaccatgccaggctaatttttgtattttttgtagagagggttttgccgtgttgcccaggctggtcttgaattcctgggttcaagtaatctgcctgccctggcctcctaaagtgttgagattacagatgtgagccactgtgcctggccagaagctgccttttagatatcttggcctccttggacaaaatgacagaaatgatcaaatattgctatcatttattgtgaatttgtgttgttttgaggtctaagagtgtttacgtgtgttttttattcccgcaacaatcttatgaggtgagttctattattagtcccatctcacagatggaaaactgattcgtagtgaggttaagcaacacacccagagctgaaataccaaataagtgaatgaacggactaagttaagtgaaggcctgccattcattggtttccagagggcagaagtgtcagctcctattttctatgaggggcatatagcacaaagaactgaaggtggctcttagacgatgcaggtgaaggacacccattactggatctgttctgacagacaaggtcaacgtaactatgctaggctgatcctaaaattcaggttgaatatttcttatccaaaatgcttgggaccagaggtgttttcaattttgaatcgttttttcttttggattttagaatatttgcatatacataatgagatatcttggggatggggcctacgtctgaacacgaaattcatttgtttcacatacacctaatacatgtagcctaaagataatttcacttccccctggggacgctgagtttgttgtgtgcctgagtttttactacaatctgtcacgtgaagtcaggtgtggagtgttccacttgtgttgtgatgtcagctctcaaaaagttttaaatttcggagcatttcaaattttggatctttggattagtgatgctcaattttccaatgactgtgactccaggtattcaggcccttgtgtaatcacttccttgggctagcctaggaatgtacttttaataaacataatgcaggaaaactgatggaataatgtgcctcatgagaatgggctacaaggactctggtttctatcctgtcttcccctgtctctctcactctcccttgcttgctctgctggaatccagttgcactgttgtaagctgcctggtggggaagtccatgtggtaaggaactgatgattccagccagtgagaaactgctgtgccctgccagctgccacaggcattaacctggaagtggattgtcctccatttgaatcttgagatgaagaccgcagccttgtgagggaccccgactcaaataacccaactagatcactttgatccctgacccacagaaaatgggagacaatgcagggactttagagcaagtccctatgctagcccaaagaggtgattacacaagtttggtttgaacattttgggataatttgttaaatggaaatagacaatcaatacagtaatatttcaaatcatacatatcctttgctagaccctttctagagacaggggagactgagaggaatgagaagacagagtccctgccctccagaagctcatgggctagtaggatggaaagataatcacttaaagtgagaatctagaagtgtgtgcaaggtacagaggtggcagaggagattcaacattaatgaaggattccagggctttgaagtaggagtaggagttcataagaagatgctgcaaactatgttttttgaatgaatgaatactctggaatggcaagagatgggaagcaagaccaattgagatacaggaaatggggttatcataatttggcaaccaatctgcaggaagggaggggtggagacaggaaaaagtcaaagatgactggattttgttgttgttgttcagttaaacaagtggtggttgtgccatcagctaagataaagatcacaggaagaagactgcaaagagcagtaagcctttgtaacagatctcggtcatgtgccatactgctgttctttagctttctttgatcactatttgataggagagagagggagagagaaagagagagacagagagataatgatattagttatcattgtgcaacaaaacttaatgatagcattctgagaatggcttaactgctcaggatctctctgaagttgccatcaagatattggtcagggctgcagtcagctaaaggcttgactggggctggaggatccacttccaagatgattcacatggctattggctgaaggtctcagttcctctccatcaggctgcatcttccagggagctaacatctttcagagcaagacattaatcaaagagcaagagagtaaccaggaagctgcaagatattttataacctagactcctaagtcatacactgtcacttctgctttatcctatcccttagaattgagtgacataaaaaatttgtggccatatcttaacacacacacccatacacgtatgtatgtgtgtatatatacacattatgtatatgtatgtgtgcttagactgataccttagtagtctaatagtagtagatacttaataaatatttatgaatgaaatgtttacactgcatgcagaagttttattctatttcatttaaaatgttacaaacatgtttctatggtattaagaaataaaaatatcataggctttgcatagactcaggctggtttgagttttgaataccagatccatctctacaaacctggacaagtcgttcaactgctccaaagcacagtttcagtatctatcaaatgagaataatagcacttacatatcccagagttgttataaggattaaatcacctagtatgtgcacaggacttaagccactgcctggcacatggcaatcattatttaaatgtcatttatttttcatattttgcattccagaatggtgtggcctttcatgtacttcccctgtattttctgctgctatttcctcctggcttgtggttgaggttttaaggattcagacatccaggaatgaggtttcacaggggcctcatggtgtgaaaggggatacgctttctgttctagtagaagcacgtggtcgcttcctgttctgtatctgctgtaggagatcagaaagcacaggggctgatgccaaccattatgctgactgtagacatgactaattggttgtccattccaggaattaacacttcttcccacaaatacctgattacaatgactaatcagacaaaagttcttcccaaaacctgcgtgaagtacagctctaatgtaataaaccttattcaatgtagatatgattaatttttccattctttctccttataggaatcaataagttgtttagatgtgtttaatagagaggaaatgaacaaaaagtaggttttgctcctttatgaaggtaacttttaaactttttgcctttaaaaaagaccatctttttcatctacccaatgagtgggattttcaggaaaatttagatgtgttcatttccatgattaggtgaggatgattaacggtccttccagcaattagtgttggatttcactgttaccaaaatgaacttgcgttcacaaatctcaccgcatatattctgagtgccatatgttacagaccagggaaaatttgttttctgttcttgcctcattccacatctaatgctcatgtctcccttgctcttttatgacattcaaagtacatctggaatgctgagatcctctcagaaaataattatttggaggcaccacatgagtaataggacagtaagaaaagagaatacaatgttctgggactttctaacgcacacgacatcaaattgtaggagcttttttttttttatgttcatcaaagtaatctttgttccaggctcatccccttggaaagaagcttgtctggtgtgtatgagtgacaatgtggatgaaaagcaccatataaatttcaaatggcattgttagttgaagtggaatggtaggacaagagactggcacccatggtagtggcctctggtctttctctgtctctcataaccatggcactgagggtcctgaggttgcattattcaaggtagattatttaggcaggaaaatagatggagacaatgttagccagagtgtccccatgagcatgggtctcagacaaatattctggaccaaagagatcctaagtatcccaatgacggtaatcttcaaattccctccctccaattctatcccactcccaccataactcttagtatctccatgttcatgatgggggacaaggtgtgtgtgtgaagatgaaagaagactcaatacaagacataacttacagctgtgaatttatgttgttgtcatccattgattcaatatagattgaacatttaatattatagggatggaaaaatcccaccaccatcctcttagggttccaactgggtcaaataattaaatcgccataagataggtgaacagggtaaaagcataaaataagttttatgtggcacaggagcctccataaagaaatgatgacatgaataaacagaatgagttatttatgtactggattggacaaagaatagttagttatgaagaaacaactacattatgtggggaggcttaaaagataagagtttctctaacaaggtctataccatattctcttggtctctcttgcctttttttccagtataggaagagtgtctttaatatgggaattttgttttctgctttaaagaaacagcataaaggtcaatgtggtcttcttgcacctgcggttttttcaagtgcctttaacttaataaatagttaatatgctggggggccagggggtaatgttggggctagggagggcatcaggaagaataactaatggatgctgggcttaatacttaggtgatgagttgatctgtgcagcaaaccaccatagcacacgtttacccgtgtagcaaacctgcacatcctgcacatgtaccctggaacttaaaataaaagttgaggccgggcgcagtgactcacacctgtaatcccaccactttgggaggccgaggtgggtagatcacccgaggtcagaagtttgagaccaccctggccaatatggtgaaaccccatctctactaaaaatacaaaaatcagctaggtgtggtggcacacacctgtaatcccagctacttgggaggctgaggcatgacgatcacttgaacccgggaggtggaggttgcagtgagccgagatcacgccactgtactccagcctgggtgacagagagagactcagtctcaaaaaaaaaaaaaaaaaaagaaagttggagaaaaaatagttaacatgccagagggatatatttttaactcttttatgatttgtgaggtgctgttctcagtgcttagaaagctaagattctagataatgggtcatgaccacactcttgggaacactagaccaaacctaaaacaacaaacaaacaaaaaactccaaacaaaatccaagttctgtattttatttatttatttacttatctatttatttatttatttatttattttgagacagagtctcactcttgttgcccaggctggagtgcaatggcacgatctcggctcactgcaacctctgcctcccaagttcaagtgattctcctgcctcagccctcaaagtaggtgggattacaagaatgcgccaccatacctggctaatttttatatttttagtagagatggggtttcaccatgttggccaggctggtcttgaactgctgacctcaggtgatccacctgcctcggcctcccatagtgctgggattacaggcgtgagccactgctcccggcctgttctgtattttaaatgccaaatcaagagaaaacaaattttaagcttttccattcaactcgtgttacagttataactgaattcaaggactggaggtgggcttttaaaaagctgcttttttttttctactatgaaacatttaggacataaaaaatgtttaaagaacagtttagtgaacatccagatatttatcacatagtttaagaaataaaccccatgaattcatttgaaggtctttgtgtgttcctcctctgccttatcccactctcaacctacagaattgctatcttgatttttacgttatcattcctagaggtgtgattatttaataggggcattctaagtcaataaggttaggatgaaataaaagccatcatgttgaatcatgtgtctactgaaatcctctatcttgaaggacttttagcaaaaaattagaaatgtgaatgtttggtctaaattctccactgcattataattaatgtcattgatttttatgcttttttttttttttttttgagacggagtcttgctctgtcaccaggctggagtgcagtggtgcaatctcggcccactgcaacctcggcctcccaggtccaagcaattctcctgcctcagcctctcaagcagctgggactacaggggcctgccaccattcacagctaatttttgtatttttagtagagacggggtttcatcctgttggccaggatggtctcaatctcttgacctcgtgatccacccacctcggcctcccaacgtgctggtattacaggcgtgagccaccacacccggcctgattttatgctttaacattcacatcttctactgaaggactatcttctaaggatgatttcaggttgtaagcaggagtccatgtaaaacccaagagtgagaatgcaaaaagggattgcagggcctagaagatactctgtctctcgtttctgcttctctgtctgcctgattcttcttgctcttcatgcaagatttctccaaaacaaagacattcataaggctaccaggtttagcaaaaactttatagatacatatatattttatatattatgtatctcgtatatatgtgtttgatgcttgattacatttaaatttccgctaaagaataaagatttttagtgttcatcctacgcaataactgggtgtatttacactaaaaatatttcattgtttattagaaatataagcttaaatgagaattcaatatttttttctgccaaccctaaatagcttttacaaatatacgtctcaagcccagccccatgtagagactcgttttctcttccttttaactcctgggagggaaaagactctgattggtccagccttggtgggtttcaagtagcttgggctgagtaatgttgattacacagtgctactagaagactacctttgtggattaaggcagcaactacagagggtgattgtgagctgggatgacatacaatgtccactccagactatctgtatttacttcgctttcaaataaatggagattgttctcgttggttccttctctcatttctcttaggaggcagtgttatgtggcaggtaggaacacagaccctgaatttccacttccaagcgtgattccttcctctactacttaccagttacgattttgtgcaagtcaacttccttatatgtaaaaacgagatagataataatagtaactataggattgctgtgaaaattaaatgaactaaaataggtaaagcacttagaaccctgcctgtaacatattaaaattatacaacagtttattatttttctcctgagaaaagtgtatgcccagtggctttcaggaaggatgtccaggaagagagggggacaatctaactgactcacttggttttaaaaccagtgtataccaactttaggcttattcttcaaaatattttagcccagaagtctactaatatttctgtaaagggtcagatagcaaatattttaggctttatgggtcctgtggtgtttgcacaatgccccaagtgtgctgctgtagcatgaaagcaggcatggaaaatttataagcaaatgggtgtggtcttgtttcaataaaactttatttacaaaaacagacagtgggccagatgtggcccatggacagtagtttgttaactgctcctgtaacccttctggcatcactctttttcccacttttcaaagaatcaattgaaactaatataaactaatcctcctgtccccccctcagtcatggatttcacagacactgaatgacgactgccttgaacacttgctgaaaatcagttttacaatatgctaagagccttaaaactgtagagaccatttattagtttgacaaacattgattcagaatccatgatatattaagcacccttctggccactactggacatcccttcaaaagaaatcatcagagaagcagacacagacaaggaaaatcaaatatatttatcaaaatgtgattacaatagcaaataattttcatagcttcttaaaatacaacctaaatttataatgtttaggtaaattctggtacaatcataatatggaatattatgctctcaacagatttccatccttcacaataatgtaaattttttttactagttttcaagttttaggatcaacttctagagaaagcactaatgtttcaattatggactaaagagagaatataaaaattagcaaaaccaactaaaagaaaaattatagctaacagaagttgagaagtgttagggaagataacaagatgaggcccttacaaaatgttaaataaaaaaaacccaggccgggcgcggtggctcacgcctgtaatcccagcactttgggaggccgaggcgggcggatcacgaggtcaggagttcgagaccatcccggctaaaacggtgaaaccccgtctctactaaaaatacaaaaaattagccgggcgtagtggcgggcgcctgtagtcccagctacttgggaggctgaggcaggagaatggcgtgaacccgggaggcggagcttgcagtgagccgagatcccgccactgcactccagcctgggcgacagagcgagactccgtctcaaaaaaaaaaaaaaaaaacccagttttataaatagggaaatcaaggtttagatatgttatttatagtataatggtaatcaagaaaggaatttaaaaataaaggcataacttgggagaagaggcaggagaaaatatgtgtttggagatggtggtagaaatgaacccaactcccaaccatcatagcaggaaatcaacagataattcctgaagtagagacatctagaagtcacatgttatttagccatatggaggtaacagagaaacttcaaatgaaaatgcttaaaaagtggttcccaaggggatatgactagatgaggagggtggtgtgtgtggaaataggggagggaactattgcatttcactattgaaaaggaaacattgtttatgaatagtctgtaataacatagaaaaatatttctaattgaagtggaaaggcttgtaacaaattgtatacacagaactttagcaagtatataaaaatgaaaaagaaaataagcaaaatgctatgcatagggaaatgccaaattatctacagctctctggatggtgggaaacaggatcattttattttttgtcacaaccttcttcatttctgtatttccccaattttctatagcagaattgcattacttttataatgccaaaagaaattacacattaaaagacttgaatggtagctctttggttcagttttctatactctctgtgttagataggtatcaaaaaggaaggtttggctgggagtcagaggtcgtgggattttgcttttgctctgctaacaataagctgtacctcatgggtgggttcccagcctcttctcttctactgcaaagggaaggttgagctaggtgatctccaagcttccttctttctcttgcactttaggattaattctaaagcaattcattatgcactgggagcaactccttattctttcatttttatttcatttttttttatttttttatttttttttgagatgcagtttcactcttgtctcccaggctggagtgcaatggcacgatctcagctgactgaaacctccgcctcccgggttcaaccaattctcctgcctcagcctcccgagtagctgggattacaggcatctgccaccatgcccagctaatttattattactattagtagtagtagtagtagtatttttagtagagacagggtttcaccgtgttggccaggctggtctcaaactcctgacctttggtgatcctcccacctcggtctctcaaagtgctgggattacagtcatgaaccaccacgcccagcctatttcattttatttttaacagctttagtgaggtataattgatataccaaaaaaaaacgtgcatacatttaatgaatacagtttgatgagtttggacatatgcacacatctgtgaacccatcgccacaatcaacatcatagatacatccatcatatcagttccaaaagtttccttgtgtcctttttctcttttttttctttgtggtgagaatattcatatacgtaatttaacatagtcaaatttatagaagcagagaatagaatggtgattagcagggcctagagggaaaggaaatggggagttgttcaattggcataaattttcaattatgcaggatgaatactctctacagatctgctctacaatatagaacctgtagttgacaatactgtattatgctctcaacaatttgttaagagggtagatcttctgttaagtgttcttaccacagctccttattcttagtcatcatgatccacacaacaggatcccagtcccgtttggttcccttgaaatgatctgtgtgtgcacccttgtcaaatagaacctgctgttggcatctcagatgcagcaaagagaccatgggctttggagtccggcagacctggccactcatttattgtgtaccttgggggaaaatcacttgtagcatagcacctgcaatgctgactggtacacagtgatttgtaaagaagaaatttctctgaacctacctccctgtctttaaaaggagacacataacaataatccttactttctagagtaattgtgagaacaagagagcttgtatgtcaaaggacgtagcatagtgtgtggcacatgacagggtcttagtaagaggaagctgtcactacagtacccaatctttagtatgtttataaagcttagcacagaggtttatgccccatattcattacctcgtttaatcttcttgtggtccttccagttagggagggatttctctcaggttggggctacaacatgaagtgtagctaagagcatggacttgagacaaacagacttccattgtctagctgtgtaattaggaaagttatgtaacttctcaaagcacctttattttctcatctgtaaaatgggatgttaataggatacctacctcaaggatggtagtgagaattaaataaattactgtatgtaaattgcatggaggagtgcctggtgcataatatagttagctattattattcttgttttacagatgagatcactgaaactggaagtggatggatagctctcctatggaggagggtcacacatttaagagtgaaaacatgaacccaggcgggtagaagccatcacttgcttgcttaatcatcatgctgtttaccctctccctggtcaactatttagcataagtgaatatggataaaattgcccagatgaactgttgctcactacatattgcatttgtaggttagagtaaataacatctgatagaaagtgtcattacaattaaaaaaaaaaagagagagagcttcagatgcccagtgttgtacccaagctaaagatgaaggatggcatttggaaagggcatatcacagggactgcagagcctgggcatggagcgatgactcaacactgagtccctggttgctacccacagtctggatggcttgctggtagcctgggaagcgagggtggaggggtcagtggctttgtgttggaaattgtggagcagagaagaaacaactattgcaaaagtttcctgcaaccacagagaacgtgtccagagtgatttattgcaactggagtttcattatttccttctgtctaggggattctgtgtgtaggtttctgctgacctccttccccaggaagcgagaacagaatgtgacctctccttgttctttattgagtccaagtgctcaaatgcaccttcaggtcagacgcaaacccatgagggatctactttgagcccacaatcatggaattctgatgtgctacaaggtggcagtaaaaatggaaaccatcattcctgatattttaagccagtaccatgttccagtcatactatatcaccgaatctaaaatgacttcaataactttcacttttgtttcatgtaccactaagaaaaaaaaccctccatccaataacctaggatataccctcaattgtaagtcacattccaattccagagatgataaaatgtggtaaacatgtgtctgaagagtaattcaatatagtgttagctcatttgatcctcccattgactccacaaagcaggcataaatatacacctccttcaagaataggaaagtggttcagagatattagataacttgttcaaagttaaacagtcagtaagaaagggccaaaatttaaacctgggcagcctgatgcaagcccatgcacctcctgcaacctgcaagtcacctgttctctgtgcatttaaggaaggaagcctggtggtatcttcgtgttccttctctccctttcctcagctgaacttcaggcttcacacattacagcttccctgtcccagactgagtccctagctgcttccagaggccagtagagccccagaggtcagaacttcctccttgaatcttttcaaaactctctggttgggaacagcagaaactatcaatagcagacggggagcttgttgggagaaaaagggcagcttgcagaatggaccagagagtgggacatgggcaacgccaggagtctggatgccaagaagtcttcaaacctctccttgtaagaatctgcattagccaattctgattaattttcctaaagtcgtgtcacaaaatgcaagagtcaacatttcaggacagacaaccccgttgaggattctcaggggaagtgtaaactcagcagggagttcttcaagaggaaatttaggcaaagagttcaggctttgggttcaaactgccttctttttttaaattttattattattatactttaagttttagggtacatgtgcacaacatgcaggtttgttacatatgtatacatgtgccatgcttgtatgctgcacccattcattcaaactgccttcttgcacagccagctctgcctaccctctgggtgaccctgggaacctaacccctatgcacctcagtccctgcctctgtagaatggagatcacaacagccctacctcacagggcttggaggatgtaggagatgatgcttcacaccatgtacacagcaagtgcttaataaatgttggcaaccatctgtcccttcatgtgtcaaactttgaaagttacagctctttgtcacagaaactttctgatgcctacaacttcatgattttttttccagaagtatctaaagtccctaagattggaaatgcctcatgtttgattttgagctaccacttggaagtgaaaaccctcaggtctcaaattttctgttgaaaatatgtaatatctgacattggtatataaatggatcatttccatagtcatccttcaaatgccttgtttttttttttttgatccactatgtacatagtctgtgcccaacactgtggcaatgtctataatctatatgcaaggagataaggtctgtatcattcatgaatttatgacttaataggtcagaaacctattaagttgtaaacaataggtcataaacttaaggaataaactaggtttcccaacctcatactattgacattttatcaattctttgttgggaggagccatcctgtgcattgtaggatgtttagaacatccctggtctctacttctagatgccagtagcaaatacccttccctttagttttaaaaaccaaaaatacctccatttttttttttctttttgagacagagtctcgctctgttgcccaggctggagtgcaatggcacgatctcggctcactgcaacctccacctcctgggttcaagtgattcttctgccttagcatcctgactgagtagctggaagtacaggtgtgtgccacccctcccatctaattttgtggttttagtagagacagagtttcaccatatcggccaggctggtctcaaactcttgacctcaggtgatctgcccacctctgtctcccaaagtgctgggatttgggagccaccgtgcctggccctccagacgtttctaaatgtgccttggggtgcaatgttgctcccagctgaggaccactgtggtggatcaacataagctccaagagaaactagctgtctctgtctggttcaccattgcattctcaggatctagaagagtacctgacacatagaaggtgctttacatttgcaaaatgatcaaataaacctggatcatggcaatcttaggctaaaaacaaaagaaactacaaaacacacttcaaatatccttattgctttctaaatcaagtctgaattccttagctggtgctcagagctctccaccatgtgggtccaagtgtaccttctcagtcttttgctcccatttggactcaggtggtccccacagactcatttcactacttttatttcattttattttatttgagagagtctcactctgtcgcctaggctggatggagagcagtggtgagatctccgcccactgcaaccaccgttttccaggttcaagtgattctcctgcctcagcctcccgagtagctgggactacaggctcatgccacaaggcactggctaatttttgtatttttagtagagatggggtttcaccgtattggccaggctggtctcgaactcctgacctcaagtgatccacctgcctcaggcgacccaaagtgctgggattacaggtgtgagccaccacacctggccaaccacatttatttttacaaaatgatctcaaccgcttggcgagaaatcatttcggcctaccacgtttatcctgcactagaagacccgttggaagaactgtcaaacaaatatattagtcgtcaaagtgacactacgaggtaaaccctacatgaataagagacgataatgttttatcgcacaagaataaagctggctctttccccctgcttgacatagatttgaaatggtacctccaaggctgtggctggaaagagcccagcttcaagtgagcctcctcccttttgttgctccctctctgccatcctgggatgggagtgtgcgtggggagcaggggggttactcagaatctgatgtaatccctcctttccatccatgatgcacagtcctgagcttgcagaggagccctgggaatggtctctcagctgtggccccttctgggtcccacaggggcctttccagggtgtacagtgcagagatgtgcacagagctgttaaaaaaaaaaaaaaaacaaggccaaggaacagaacgcatgtggcttttccagcggggatggttcttatttaaactttggttttacatttgttttgatatttgaatttgaagccaggccaggaaaaaggaaaatctgcaattataatcatttcttagcctgttaagatgaaactttaaaatgaaatgttaggttagaaagtaggcaaaacagccgggcacggtggctcgcacccgtaatccaagcactttgggaggctgaagcgggcagatcacgaggtcaggagatcgagaccatcctggccaacatggtgaaaccccgtctctactgaaaatacaaaaattagcctggcgtggtggcatgcacctgtagtcccagctactcaggaggctgaggcaggagaatcgcttgaacccaggaggcagaggctgcacggagccaagatcgcatgccactgcactccagcctgggtgacagagcgagactctgtctcaaaaaaaaaaaaaaaaaaaaaaaaaaaagtaggcaaaacagcaataggctcagaggtcaagcaacccagcaagttccaattcaggtttctctctttgtaggtatgtgaccttgagcaagttatctcacctttctaaaccatggcttccttaactgttgtaataatgttaaactctttgggtgctagggaagcttaaagaagataatccatgccatgttctcagcactgtaccaagagccacacataaaggaaaggtgctgttttgtttttgttgttgtagttgctgatgaatacagcctcctgtagagatagtagggtctcctctggacaatggcttcttccagagatcaagtcttacccctggaacatgcagagccatgtcaaatatgaaatcaatgtcttcttaccctttgcttgtgaagggaagctgacaagctgggtaggacagggttgggggacaagggtattatttggcaaaagcactgaaagtttcctcttcacagctggactaaatatggactcattctgtggccacccccctctagacctccctgtcaccatttatacaacaagaaggttagaatctgagtgtctctaaactatcttcattctttgatctactagtctggtgttgttcaatggaactgtctgcaatgctgtaaaccttgtgtctgccaacttggtagccgttaaccagatgaaggtattgagccttgaaatgtggccagtgccaccaaggaactaaatttttgactttatctaaattttaatacatttagattcaaatgtaagtagcccatgtggctaatggttactacattggacggcacatcttcataattctggaaatccacaatgaagtttctaaatgcaaccacgattcccatattgttgccagatccatccatctacaggtggcaataggaaggtatgttacactagcagactctagtatctgtgaggtcagagatcatgtcccagtatgactttctctccagagtcttttatagcatagaacacagagccggtgacaaatagcatgtcaataaatgaatgaatgaacgaatgaatgatttttctctgggagtctctctttcatcttcctgccataggcctgaaattcccctaagagcaaataattctggcagcttttgcattctgctgtccagaagtcatctgttaaaatacagccacccttgggaaggtattgtaataaataaggccattattagcatcctacatccattaatccatcagattagttgaacacttaagggaatagtacaaaggagaggaacacactgattgtaaaggctgagggaaattctataacttaatgagtttatgtgttgcatattgtacatgtttcctttttccttgtgtgttcaggtgtgcctgtctgataatctccaggtgtgtcggtgtatggctgtgtgtgcaatatatagatgggatttgtccattgttagatagttggactccaaatgacaatcataataataaaataatctcaataataatctctgccacttaatatctaatgtgatctttgaacaaacacttagccttttggaattcactaactgtgaaatggggataataggaattatgtcttatggatttgtgatcattaaacaacatattttttaaagtacctgacacaatacctgacatataataggtgctcaacaagtgctcactaaacgacacaataaaattgtgattatatatttcatatgtctacatattgtatatgtcttactaattacattaaatgcattgcaactattctcttctttaattctcataataatattgccagctacgtagtatattatctctattttacaaatacagaaatggcctcgaaggagctgagtgccttaactgagttcagccaaccagatcagcaaatcagccagtgttgaagaataatagtaatgatcctagagtgatctaataggaaaaaataattggaaatgagcacagactgaacttcaaatctacagcctttccctaaagctgccaaggcctctggagccaggagggccctgagtagccagacatctgcataatggtttctcatcctttcctctcttctcatcctttcctctcttatcagttaattcagctagctgaatatggctccaggctcagagccagttagagccctctgaaaacaaggctgtaggtggataagtggggaatgtctgttttcttctcttttgcatagaaacccagactgtgtgagttttgaaggttagcaggggtgctaaggaggctagtcaaggcctatttggaaagtgaaaggctaaaacaaagcacctcaggccagagaaaaaggaaatagcaacagctgtctctgcagatgcgcttccctcacccactctcgcatccccatccatcctggggatgtgggtggttgcaaagttgtgtttagagaagggatgaaattgggtggggatgaggaaagcttgagacattattgtaaagttaaagctataaaatctttgtgaaatcttcttcttctagatcaaacctggcccgtaaagttgtttaactcccacattatggttgtgggagatactaccacccaataaaatctaagaggctaccagtcatactgtgtctggattcatgtcacgtccagtacctgcaccacaactgtgagaagtaggaatactgcagagatttcctgatagatcagtaatctcagagtcccagaatcttcctgctatgtctgcttaagagtcaggttgtttaggttcaacccccagctcaatgttagttaactttgactttcttctttcaaaaatgggggtgataatgttgatattggtaagacaattaaaggaggtaatttatggaaaatatttatagtagtgcctagtacaaaataggtatttggtgaatgctggtgctccttataattattccgtctccaccaaacatccttttggtaatgaaatattgtgcttggtctcatggccagcagtcagagtgcaatgcactctcacaaagcttgtacctggagttgagtcaacagatgcattttatctcccatgtcttttaagtgacagaatcctcagtcattgagtggaagtccacaagtttggcgcttgacatggttaaatatagtttggatgtttgtcccccttcaaatctcatatttatatgcgatatagtttggatgtttggctgtttgtcctctccaagactcgtattgaaatatccctgtattaatcctttctcacactactataaagaactgcttgagactgtgtcatctataaagaaaagaggtttagttgactcacagttccgcacgcctggggaggcctcaggaaatgtacaatcatggtggaaggcaaaagggaaacaaggtaacttcctcacaaggtggcaggaagaagtgtcgagcaaaggggggaagagccccttataaaaccatcagatcttgtgagaattcactcactattatgagaacagcataggggaaactgcctccaagatccagtcacctcccaccaggtctctctctcgacacctggggattacaattcaagatgagatttgggtggggacacagagcctaaccatatcaatccccagtgttggaggtgggtctagtgggaggtgtttgggtcatgggggcagattcctcatgaatgacttgaggctgtccttgtggtcatgagttctcactctattagttcatgtaagagctgggtgtttaaaggagcctggcaccccttcctctctctcttgctccctctcgtgccatcgatgtatctgctccccctttgccttctgcaatgattgcaagcttcctaaggcctcaccagaagcagatgctggtgctacacttcttgtacagtctgcagaactgtaaggcaaaataaaccccttttctttatgaattacccagcctcaggtattcctttatagaacgcagaatggattaatgcagctctgaatcagaattgattaccctttcgtgacctcttagcagtatctttgctctagactgagccaggacctagctctgggagtttctgtagctcaagagttggtaaatagttacctccaggatcctggcccagtttctagcatctattctgccactttctgattggcaaccacaaagaaaaatggggaaagagcacaagctctagattaaggcagagtggttcaaatcctagctctactactcacttgctatgtaatattagttaagtaatttcacttctatgagctgcaggggttgtttttttcaatctaggcatcctcaaatggccttggtagcacaaacctcttgacgattatgtgagtcagggttctccaaagaaatagaaccaatagaattgtaaaccaaaaagtatctgaggcagtatctgaatcagtttagatttttatgttgtcaagattaaggaccatagcccgtgacacaccctcaggaggttctgagaacatgtgcctgaagtgattgtattacagcttggttttctatagtttggggagacagaagttacaggcaaagacataaatcaatatgtggaaagtatacattagttcagcctcagaaggcaggatatctcaaagcgggggcttccaggccataggtggattcaaagttttcctgattggatattgttgaaagagttaagctctgcctgaagagttgaattcagcataaagaaatgcttgagtttagataagcgggattggggaagccaagtttcttatcatgtaaataaagcctctacatagcagacttcagagagaatagatggtaaatgtcccttatcagtacttaaaatgtgtcagactctctggaaaggacccagtaagggaaggagattctctacagaatgcaaattttcccccagaagagatggctttcagagccatttcaaaatatatcaaataaatatattttgaggtaaaatacttcacctgctacctgtcgtgtgtcatgtcatgacagagtcagattgcaatttgataacatattgctacaagcagcttgttttgtcagtcttaagatctctcttttcatgttaatgctggccagttgtgcctaaactccaaagggaggaaggtattatgaggcatgtctaaccccaccttcccatcatggcctgaactagtttttcaggtttctttaggattcctttggccaagatgggatccatttagttggtcgagggccttagaatattattttggggttagagcatgtatttatacatactatagaaactggttcatgcagttatgccgactgagaagttgcacaatctgccgtctgcaggagggacacctaggacagccagtggtgtagttgcagtctgagtccaaagccctgacgactaggagagttgataatctaagatgcaatccttacgccatggaacactatgcagccataaaaggaatgagttcatgtcctttgcagggccatggatgaggctagaaaccatcattctcagcaaaataacacaggaacagaaaacaaaacactgtatgttctcactcataagtgggggtaaacagtgagaacacatggacacagggaggggaacatcacacaccagggcctctcggtggggtatgggtataggggagggagagcattaggacaaatacctaatgcatgaggggcttgaaacctagatgacgggtcgatgggtgcagcaaaccaccatggaacatgtatacctatgtaacaaacctgcacgttctgcacatgtatcccagaacttaaagtcaaattaaaaaaaaaaaaagaaagaaaaaaaagatgctgtccaaatgcagaaagagagaaatgtcccggcttaaaataatcagacagagagagaaaattctctcttaccctgcctttcccctattcaggcccacccaccgtagggaagacaatctgttttactcagtctacctattcaaatattaatgataactagaagcatcctcatgagcccactaagaataatgttgacaatatttgggcactgtgtagtacagataagttgacacgtaaaagtaactatcatagtggccttacttgggcaccaacactggaataaatgaaggtcagtggtttccagtctccttgcatcacttctttcaagagtcaaagtccccaccgggtgcagtggctcatggttgtaatcccagcactttgggaggatgaggtaggtggatcacttgaggccaggagttcgagaccagcctggccaacatggtgaaacctcatctctactaaacctacaaaacttagctgggcgtagtgtcgcatgcctgtaatcccagctactggggaggctgaggcaggagaattgcttgaacgcgggagttggaggttgcagtgagctgagattgtgccactgcactccagcgtgggagatgaagcaaggcgccttctcagaaaaagaaagaaaaaaaaagtcaaagttccaggaaagatactgaatggctgttattatatcatgtgcctgtccctatgtattctggtggtgtgaaaagtgatatggttgagatacccagcacataatacatgttccacttatgaatacctacttttattttttgtttctctcctctctgtgccttattatcagtaactcagtgaatcatttcagaatgtctttgcaatctagttatcctgaaaacaacctcctcaacacccactggccaaatttgcttctttgccgtcaataatgtacacagtttaggtgttgaacagtgtgatactagttatttcagttcttggcattgtgtttaccaatttttaaaagtcttgccttcaggacacactgaacatgattactctatgtgaaagacgcattcctggtacttttttaacgtaccaagccagagtcctaccagcctttctccctgcccgctgcactagaagtgtaagcatgtccttgcctgggaggaagggagccgagagccatgacctggcatgagttgggtcttttgggggtggaccctgtactttttagttagtagattagcaagctcatgaaaaggcatagccacgtgcggtgtctcatgcctataatcccagcactttgggaggccgaggcaggtggatcacctgaggtcaagagttcgagaccagcctgaccaatatggtgaaactccatctctactaaaaatacaaaaattaggtggctgtggtgttgtgcacctgtaatcccagacactcgggagactgaggcaggagaatcacttgaacccaggaggcagaggttgcagtgagctgagatcgagctgctgcactccagcctgggtgacagggcaagactctgtctcaaaaaagaaaaggcatagctcttgcctttctttgagcctcaagattgcactttttttttgagacagggtcttgctttgttgccctggcaggagtgcagtggcacgatctctactcactgaaacctccgcctcccgagttcaagtgattctcgtgcctcagcctcccaagtagttgggattactggcccctgccaccacgcctggctaatttttgtatttttttagtagagacagggtttctccatgttggccaggctggccttgcactcctgacctggagtgatccacccacttcggcctcccaaagtgctaggattacaggtgtgagccactgtgccccgccaaggttgtactttaatacttgtgtcacctaaaatctttcatcgtactcataacaacatcatgcgcatttattagctttgcgcaagaaatctgtttttgaaatgcatgcaaagggagagcaactgcccctcccactcccctaaatacagatatttcccattccccctcctcttaatttcaaactcggcctcgagcaggggcctctcaccatcacttcttctagcccctgtgcacttctacagaatcttaggcagactggagtagattagaaagggaagaaaacataactcctaaatgccagctctctagtaagagtctgtttctagttagagtctattttcgccctggacaacaccagtgtgattacaagtgcaaggtctgcagattcagctacccaccagggggtttgaacctccccatgttagcaacatttttcttttcctttttcttctctttttcctttttttttttttttaaggaattttactcttgtcacccaggctggaatgcaatggcgtgatcttggctcactgccacctctgcctcccaggttcaaatgattctcctgcctcagccttctgagtagctagaattacaggtgcccaccaccacgcctggctaaatatatgtgtatacacacacacacacacacacacacacacacacacacacacacacatatatattgtatttttatcagagacgtgattttgccacgttggccaggctggtcttgtacccctgacctcgggcgatccacccgcctcagcttcccaaagtgctgggattacaggtgtgagccaccatacccagcctagcaacatttttcataagaggcagcctactgcactggtgatataggagttaagaagaaattatttaggcagatagtgagaatacagaagtcctcagtaacattttcctttcaatgaaaagcagcccccaaatcattttttttccctaacaaggagcaccctgtaaaattgagctgcagacatagacaagcgagctggaagcttgcaccgttgaatgccggcagttgtgcaagtagaaaatggctgcctgggactaggcaggttaaaaatggcgcctccatcttcccttctttttgctaaacctcatgtacaggaaggagaagacaacatgacgctggccaggcaaaggccccatttgcataataagattggggtagggcgaccagccttccctgctcgctaagtaaatcacacacagcctcctcaagcctgcctgtaaaatcaggagcagtctgctgcaggctggtttttcctttccggcgcccctctttcttgcaagcgagagagctgttctcctttctctttcttctattaaacctccgctcctaaattcactccttgtctccttgtgtgtgttggcatcctcatcttcttggggcaagacgatgaaccctgggtatttacctcagacaatgacactgccttactgggttaaggatacagattaaaatccatgtgctaggttgcattgttgatcctaattcttcacccctccctccagccacatcattttccttgttgacttttcattttcttcccactcctctaatttgagttctgctatgtcactctctttaggcaacagaataagctgaggtgatgtaaaattccaagactactccttcccaggcctgtgagtttccctttgccctcttgcatctcctccatgctaggagaataacatgcccaggacaacctgctggatgaaaagaacagcagaaaggtagagccatgccagtgaattcctagcccacccctagccaacctgcagaccttgagctaaatgatggcttattgttgcgtccgtcctggaaagatatttggggttgtttgttcgggttcaatttcttgacttttcatgaagagctagaactagatggttcttaaggatagttttagctctgaaatcatgcagttcctcagatatccaataaatcgtcccccagtatctttgccttgagcattaattatattgtattgtaggaaacatatcaagtgtctgcctccccgaccgattgtgagatccaggtggatcagccatggcttactcatctctgcagcacagtgtccatctcagggctaacacattgtaagttatcagttaatgtttgttgtgggaatgactatatggccgaggggccattccagtggcacattcagataggcagcaagttcatcgactttctgttttcagagacagatatctccatttcacccgactatgtgcatgctgtcctttgtgcagtgggtgacttgatcaaccaggatttttttcatttaattaatgtatagcatacttatcaaatgcatacagtgcatcaaagtgcttttagattttcatgtatctatttgtatatttagctatcttgttaactataacaagataatacctgccaatgatttaaaaataggtactataaaaggatatccagtgaaaattaagtccctcctcctcttcactgttagttccctaggtcacctctctgttgtagtttctgggatagcgttccagagatattctatgaatgtacaagcaaataggcatctatcatcccacttctccttcttttgtgtattaatggtgcatacttccacgctcttttattttgctttcctcacttactgtttgctttagatagtacagtgtttagtagacattgctctgtcttgatattctaatggctgcatagtattccattttatagctgcaccacaatttaagcaacccttgttgtgggtgtcaaagttaatttcagtctttgggccaaactcctctgaagggcctttgaaaaccttggcctcattgggagccagcagggatgggcacttgaccaaaaggccagcggggaatgatatctagcccatactccactcatcaagccaggaactctaatgtatcactgtacaggtgtacagtgtgtaagacagattctccctggcctcatccctctaaaagtcttaaagaggtagccctgtgatcctagcgcccagcctatctcagagcttagctaagtgagatgaccagttgccaccttgaataaccacagatgctaactactccataagcagttaattatgaagagtcagaaccaagtaatagatattgagtaaggaggtggataaaaggctgggacttgagaacggaccagacataacaatggtgctagacccacgaagtgtcccataaatagaaaaaaagagggaatgcagagggcatggggatagagagtgatggtgagagttgatctcctaggcaggtgggggagccctggagggtcagttctgggggttcctgaaggttaacataggacaaaaaaagttaatggctgccaatagaattgtgaacgtctgatggaaacattttaaaaactcctctttaatatgatttttaaaacattttaatttttctgtaaaaaaaaaaagctatttatccaaactcttcttctttctatgatctcatgtctttaaatataccaaacatgataattttatgagcaaatcacattatacataatacatttttatgtttcaaatcttacaaaatgacttaagttccatagagtgtgttaattttttttaaagaagaatgcatatatttcagtgttcccactttgctacttcatctgctctcctccatcacaaatatccccctccttggcttcaacattttggaaaatttcttgtctgtaattccaaacttctcttcaaggatgacttctcctttccagataagatccggactctgattccaatgccaccatttgtttgcagtttgacttctgatgagtcacttaagcgctctagtccttggtttcctatctggaaagtggaaaccataataatacttaccccatgttgggatgattgcatggtatgtgttcagtatctggcacagtgctcggtgcacattcggcagactttatgttccgtttctccttcctgataccgttcagaaagtactctctttggtcctggaccagtggtctctcataataacctggctgggttagaaattagatggagatatttaggtaaaataaggagggatcagaagtcaagagaaatgacttgagatagatctcaagcagaaaaggtgacacaggaaaaaaacacaaaaacaacaacaacaacaacaaaaaacaaagagaggccctctgctggtatactggagaagacaggcctgttggaagaggcagggacaaatctctgggatgacaagttgtcctggttttcctggaactcagaagttctcaagatgtgagactttcagtgctagaaccaggaaatcaggacaagttgttcacccaatgtcttaaccttttggaagtcatgaaggacccttcccaggcccatgaaagactgggtggacccatctgcctcttgacagagtaatctccatttcttgttggaaaaatattgaaagggcagggaagagaccacagggccaagaaaacactgaaagcgagagagatcgtcactgggaaatgactcaataactctaattggctagaggaggccccatcctacctcaaatatccatttgtcttccaaaagaagcttcaaattggatttaaaaggatgttttttccccaaacaaggacaaagatccttccatcagcacagcaaggaagcagcactgttcagacaggacctctgatccccccagagactccagaatcactgttttccccagagagagaagaacaactggggaataaaaaaaaattcaacagggtgtgaccccaggaggactctcaggagcctcacgtgagaggattattaggggcacaataaaataatcaggcgtttgcctttgagtatatgcgcactctgtcctgatgttactcatgccttctccatccatctgggggcagaggtgctacatggccctgtggtccagctgccagcaactccaggggcttcctgatgtatgctaagctgctgccggagctggtctgtcctcttttgattcctcttttgaactctgcttttgtcttttaaaaatattcagcccttcaagacttcttctctcagcaaggggtcctctgccgtgcccgtcgaagtcagaggtccaggagagctgcccttcactggagaagggggaaagggaatggttctctccagggcagcttttgcaccttgaatggggttgaagttgtcagtgcatgatgcaattggaacatccatacaagggtcaaacactccatcttctctctttcaaaggaaggaaaacaaagccacagccagggacatgggaggaccagtttggtcctggagcccttccagctgcaatcaaatcctcttctgattcttcaggcaatctggagcagaggaggctggtttgagtaaagggtggttttgggtacagggtatcaccctaatggtatcattgatatgattcaagctcgtccttgggtgtacatttgactgagatgtgtatggatcccagacactgccctcccaatatccaggagggagggaggatttcatggctgtctgttttggtgtcatgcatatttcatggcatccagggtgaataggtcctctggacattttccaacaatctcagacttcctggagccaagagccacatcatgttttcgaagggataaattgtctaactttgcagagataatgatccaggtttcattcacctactaaaaggtttgaatgaaggagatcagtagagatgtcctaaaaaccattagaaataaaaggaaaattgttgcataaatatctggaacgtaaactaccctgttttaaggcaaccatcctacccttagcagcaaaaagggagggggaagttggggagggggaatttctccagtgcccctgcttgccgatataatttctgctttatgctttctcattaaaacttcataaccttgttacaaaggatagcaaagaccttgctctcaggaaaggttgtttcatctagctccagactgtctctgttgtaactacagccacggaagctaaaaggatcaacattttaattgtgtttccttgttttcacatgaatcttattccatttgacttccccatccatgcccatgtccctagttttcaaatgagaaaactgaggtttggtgatctttggactttgagaccgatgctatctcatttcatatcaagaatagaaagcagatcccttttctctcctcattgggggcagacaatcatcactacttgacaaaacctgtgtttggattcctcctttctgggattttcacattgctaccacttctaaagagaagaacatacctcttagtggttattggtgcagatgtctggagtttgagccagtgctggacacaagctgtcctcatgaacacatgtggctgactatgagaagaaacagcaacctgctcttgatttgaaattagagtcctgctagcagagggttcttctgtctccgagctttactcttctcctctgtagaattggggcaagttgcagtccctagctcttggatttactgtgaagaataaatgaactaaggccgggtgtgttggctcatgcccgtagtcccaacactttgggaggctgaggtgggaggatcacaaggtcaggagatcgaggccatcctggctaacatggtgaaaccccgtctctactcaaaatacaaaaaaatagccaggcgtggtggcgggcgcctgtaatcccagctacttgggaggctgaggcaggagaatcgcttgaacctgggaggcagaggttgcagtgagctgagatcacaccactgcactccagcctgggtgacagagcgagactccatctcaaaaaaaaaaaaaaaaaagaataaatgaactaatataaattcttatttgcccattacatattgagagaaatagggtcatgattgtaaaatgtttaccagggagcctgccacatcaatgctcagcaaatgttacccacccacgcctcctggagcagggcacaccacttccagtttatgtgctaggaacctgtatattctagagacaaggtaactcctacctttggttctggtaacttttcatgcttccttcctcctgtgaattgtttccatgtgcaaagccagttcccaaattagtcccatgggggacacctctggttggattagggttctgtctgtcattcatccattggctggtcaaagacccatgaggtcatctaacccagaggaggctggccaattaacttgagccctatcttcaggcctagtcagaccggctttctctggatgtgtcccataaataagaagaggattagttaggtgagagcaagtggataatggagttgagaggtgacagacacagagccatcattagggagaaagtttgcagaggaagagagagatagatggagtaggttgtttctagcactatcttgaatcctgatggcttttctggttccgcttccatcataaatatgctttcaatatctatcccctacccccctttaaaggtgactatagtcccttaaacaaaggtgcccatataacttttcatcggttgagaatgaaaaggaatatgctgtcttagaagatgcaaaattctcttttgggacattcctgctccgtacataaaatcagagacaggtcatgcaactgtcattcagctccatccttaacttgtttcgatgaaccagtcacacactttccctgattgagcctcagtctcctcatctgtcaaactgcctggacaacctctcaggctctgttatcccatgagccgtagagcctttgatgctctgtgtctttgagggtggccaagaccattttgggggggatcggagactcaagtaggaatcacagagtgaaggcatcctggttccttaggacctgggcaggactatcttggtgcttctgccttgtaccccctggtgtctacagaagaaatggagacatattatcaaccaaagaatgaagataaatacagcctttgttggattaatatccccaggattactcacatctccttcaaagtgaagcaaagatcatgtgccgcctgacaaccgcccatctggccctagaacagtcaccatatgggtagttctcactaattatagttaaatactgaagggatggggtccagcgtggtgcctcctcacatcagaagtcccgtggtttcccgtctcccaggagctagtggaaaggtcacgtggtcactctgctcagacctgtccaggagcaagcaggcatgtcattgaacctcaccagaaccaattttctccaattcaaaagtgaagaaataatactcatccttctctgtgttaaaaagagtttaacaacagtgacctctgtgccaaatagccagtcaagatcttggatcgtagaggaatccaagaaaacaattaataatttgataaaaccacattaggttcctattatggatccaagtccttgttcagtgcactgcaatttatatcaaagacagaaatatagaattattttaattacttaattattttgctagtcccaggcaaaaaacccttagtgaatcattctgatcccagaaaggaatttcccttgtagaaagcacgtagcaacctacagtgttgctttcttaaaatagttggaggttacattctctccttctcaagaagataaggaaataactcatttgaaagatgagaaatgtgtttcctacacctgcctttggataatcaccaagagccatcaatttagctgtggaccacatgtcaggtgtgggacttagttttgggtaaggggaggtggcatattcaatttgtgggtggatgttcatcagtggtttcattctgcctgcattgctttgtccattctagaccctggttctctaggcacagctagctttcctcacctataacaccatcaaagtaacaacctttctgtggaggctcaaacctccacaccccaagaatccaggtaggcaatatattaatacatgactaaagtggaacagatgcaagaaaatacacagctctctcagagtttgttaactgacccactttttaaaaagatgtggccacaaggatattctcttctgaaacaaaaacagcaatgacagtatgatgacaaatgttaactgatgcctggctctagagtctgggagacaatgaagtgtgggagggatagttcattagtgggagagcccatgcgctttgtcaaggaggcccccttctgaacagctaacacatggttactgatatggtttcgctgtgtccccaccccagtctcatcttgaattgtagctcccataattcccttgtgttgcaggagggacccagtgggagataattgaatcatgggagcagtttcccccatactgttctcatggtagtgaataagtctcacgagatctgatggttttataaagggaaacccctttcccttggctctcattcttctctcatctgctgccgtgtgagacgtgcctttcaccttctgccatgattgtgaggcctccccagccacgtggaactgtgagtccattaaacctctttcttttgtaaattgcccagtctctggtaatgtctttatcagcagtgtgaaaacagactaatatggttaccattcaccagtgaagtgccaacattgccagataatgggcttttctagagatactctcaaatgggatattcatgtgtaatattctgatttttcttgatgcaaattttaaaaaaagtacctgaagcttttcatgtggtttggctctgtgtccccactcaaatctcatgttgaattgtaacctgcagtgttggaggaggggcctggtgggaggtgattggatcatgggggcagacttccccctgctgttcttatgacagtgagtgagttctcatgagatctcattgttcaaaagtgtgtagcacttcccccttcactctctctctcctgctctgccatgtaaagatgtgcctgcttcccctttcattccaccaggattctaagtttcctgaggcctccctagccatgcatcctatacagcctttggaactgtgagtcaattaaacctcttttcttcataaattacccagtctcaggtagttcttaatagcaatgcaagaatgcctaatacagctttcaagtattatttttaaaaagaggcaccacctttactctggcttggctgaagtgataagatgtgaggctaccaggggccttcttgtcagtctaaggagacagcttacccaacgtgtcaccagcacagaagaaacagagctgagggatggtaagcatctgagtcctggtgatgtcatttgaatccctggatccagccacacctgaagcttccagtatccctaaacttcctaattgcatagcctaacaatctcttctttttgcttacgtcagttagagttatggctcttttacttgcaacagaaaaacaatcctaatcaatacaaggacctcagcgtcattcatgaataattgataacaacattgttcagcatgagcatgccaaatatctgctgatatttgaagtggctggaaaagagtatgtgttgaggctgagcagattgtacagataggaagaggagacatcatagatagcctagggtgctttccttagcaagccagtgaagggtttgggagatggccacagcattcagtcttgggattttatttggaagtctggcttctacactgcacgtcctgcctttttttctgctagttggttccagggcagtaaagggtctgcctcctgagtgatgggatggaaagattaggcccatgttttctggagttctaatacctctgagcctgttacagactcatttgactggtttgtaatctccaggtgaatgtatagtaagcagaagctctcctggcactttgaatacataatacagtaaagcaaaagtcacgataatggaagaacaaatggcacaatattttcctaagtgtatttgggttagatttacgttagacttgggaacctggcaatttaataggtgggaaaactttcatcaaacttcagaagtacatgtataattcatggcctcttggtacatggaatttcagggagggattctaacctgagagacacagtatgacacagagcaaaatactgtcacctgtccccttgctgagccttctcttgcaatttatggggattgtcagttactaaccatctaaataactcatttccatgccagagattataactggagcagaaaataccggagctcaatcccttattgtgacttttttttttttttttttgaaaatgggacacagtctggtctgtatgggtgtcaccaagttagagctgtcataacttaagggctattaggtactttttgccatatcagtctttcaccttattattttacaagggtcctaaagttcatgcaagaagcactgaaatggaaccagtggagagaggatgataagacgttgttttcatatcctaatagcaaaggctctgagattaaacagacttggatttgaatcaggatttcttcagttacaatctgctgtcttaaataactaatttatctctctgagcctcagtccttatcaataaaatgggagcaacagtagcaccgacatagaagttgtgcatagaatgggtgttccctcgtgcttcttttaataaaatgaagaattcatgaatttcaagcataatacccatagtagatttttccttttttgtttgtgtgtgtttgttttgagaaagaggtgtggagaaaaaaaagggagaaagagagagagtataacagcatggtgtttaaccatctggactttgaggccaatctgctgaggttcgagttaaaggctctgctaccagtttgttgagtaacctgctcaaacgacttaactctgagtgcctcagttagttttccataatgtggagataataacactatttagatcttagattgttatgaaagttacatgaataaatatatataaagtgtttggaatagtgcctggaaaataatgtactatacaccttagctatcagcaatgattatattattattaattggactctgctattatttctttagaaatgataaaggtaattactcatttgatgtggagggctataagatttggaaggatgattaaaagtatggtaaactttagatttagtcattcctgatttaagatgtgctcaaccttcatttctacatctataaaatgtgaacaataattgctacctcttgggactaattgacagcatggtataccagccttggacacagtggctgtcaagattatctctcattttacagaggaggaagtatgggaggataagccatctgcctacatacacacaaatggcttaacctcctatatttggccaggtgtctttcccaaaattctttgcctttttcgctccccagatgcttcctcttctaaaggaatatgggaacatataggggacagtgttatcctttggatgtgatggtgccttgtgaattgatgcattagttggggtatactggagaattcatctgttttgaaaactccccttgaggtgagtcctcagtggccgtgttcctgccatgtgacctcagccttttgttatgtgattggaccagggtagacacatgatcaaaactgtcccagtcagattcaccctctggggagctggaaatcagaagttgagtctttacaaaccctccaccacaatccggacagggggacccttttgaaaggcaaatctaaaaatcagtcactttttccctgcttcaaacagctctgtggctccctattgctcttatccagcctggccttagccatgatggccctgcaaggctttaactcatgtcatctcatctttcattttagtgctgcagccacactggactttgttgccccttgagctcaaaatgtgtcctcttgctaccgggcctttgcacatgctgttccttctgcagggaacacaagcccactctccactccactctctttctcctctttccaatataatttccatggttactttctcatgcaaaccttccctaatctccctgactgggtcaaatttgtctactgtgggttttcattgcactgtgtgcctttctatcaaaacactaaccacagttgtgattatacatttgtatgtatgattatttgattaataactgtctttcccagcagactccaagctccactgggaaggatccatgtttatttctctccacttctgtatccccagcacctggcacagtgcttgcccattgtagatactcaataaatacttgccaagaaaatgaagaagaatcagggatgtgtagagctaccaggtgaaagtccacaaaccactgctgctgagattcttagagttgtctttgtccccacccttgcctgtcttaaagtatgcttttttcttcacattttctgcagattcaataaaagaccctcaacatcctttcattgaattcccatgttttgtttaatcttgtatgagtggattcctcttccctgcaacccaataaaacctttcatgctgctgtaaggagatggagattgaaaaaaatcccaagggttttcttcccccaagatgattcaaaatgaggacaaataacagaggcaatgatgatgaccatcactctgagaaacataaaagatgtctatagtttatacctgctgttatttctactctgacgcagcagacaacctatcaggtcaggaagcattattctagttacctctggtcctagtaaagttttatcttcagttcttacagtgcctttgctaacctgtatttgtttctccattttaaacacgctttcctcccacagaccctgtttgagttaatcagtaacctattcaaaggcaaaactctccttaaaggaaacattgataacaacatgtaaggatcctatctatacgtagcagagacatactgattcatttgaaacctttaaaagtatctcagtctgcatgtctcctctggattcattatttatctctgttccaatccttttctgtgactgaaccagagcaacatccacccagttgcctaagccaaaaatctgggcatctctttgcttctttcctctccttctcacagtcaaatccattgagtttattcaccattctgcctgctaaatagttcccaaatctacccacttcctccctacagtctcaccaccacaaccctagttaagctgccatggtctgtctccaagatgcctaaaactcttttccaattctctccctgattacatgcttaccccttccacactactcatttttccaagcacaaaactgatcatatctattatttcacgtgctctatatctcagctgccacatcagggtcacaccttagaagtcactgttactgaacactgtcctatgtacaaacatcacagatgccagcttcctacattttttttttaagacagagtccaagctggagtgcagtggtgcgatcttggttcactgcaacctccatctcctgggttcaagcgatcctcctgcctcaacctccccagtagctgggattacaggcatgtgccaccatgtccagctaatttttttgtatttttagtagagaatttcaccatgttggtcagactggtctcaaactcctgacctcaaataatccacccctctcggccttctgaagtgctgggactacaggggtgagcctccacatccggctcaacttattcctttgtggctacaagatcctttgatctttaaggcaacaaactctaatacaataactcttcaacttcactatgactctaatccgtttacaccatcactttccccacattcggtagtccctttctctttgccattattattctgattagatttcatggtccattatttgcaatcacctgcttccaaatgccatctactcaatgttcttggctcctgttctccctccaccatactttcctggcaacacccagcactagatgcagtaagggctacacacctgagcagctaaaaaccacaacagagaaaaacccaagagaatggttttacatcctatgacgttttcctattgaaattgcttttctgctctcaaagatctcaaagatctaatccaaactaatgagtctgttgtaaagattaagagttaatatatgcaaaatgattaacatattacctagcacatgagaagcactcaatgcatattaactattgttgttgttaatatgattatttttgttttatttttgtcatgatcattaacccgacctattcttagctgatgatcttaccgcttagtcaatagagaaactggaaaacttcagatgaaaactctgtaatgttgctgaaatctttgcaccaaatctgcagatctctcaatatctctagttaacttcacattcttttctctgagaaattatatcttatcttcccaaggttgattccttaacatgtgatctcaatcttacataccttttctttcataaaacttttacattttcccacttttttctttttctctctagtaccacaaataaaatgctaatcatcatctaatcaccatgctaataaaatgctaatcaccatgtggtgtgggagtcacctgctcccacaccacatcctcaggacaatcccttcagtcaaaaatgtaaagcatattccatgaagtgatgctgggattctggcctctagatggagaaggacttggtctgggaggaaaataatcatcaactgctttacaaaaaagtgagaaatcctataattaaagtcctagttgattcacatatttgtatcctgaaagccatttctttcagaattgtagttcattatcctaaagcaattgatctctggtgcttgtatgtttaaaagtgtaagaagcatcctgacagaaaggctgactaattatattaggcatcatgatctttaattagatcaataggagaagagcatcagtaaacatcttgagaagcttttgttacattggctgggtcctccaagaaaccccagcatcaatactaatccataagaaagtgttcagaaaaacacggtggattaacaaggagagaaaggataatttggataaaattaatcattgttgttataggacaaaagcaaaaatcagcttagcaaatgggtccagagcattaaagaccatgcccttctctgccacagcctcaggactactctcagcttcacaacccatgacggtctgttggcagagacaaatgacaatttcatcaccaatgtatactactcttcaagggaaaaccctggaattattttacttataatgaaatcacccaagaaacccactgagtgtgaatcacagggcagaatcaaagcttttcttactcactgactttgtggagggtgagggtggagagtgatgggattggagaaccagccagtaggtctgtatttggctatcatttagatcttggttttataacaattcatctacgaaaggtttgtgtgtgtataggaatggggggtggaaattactacataccaggaatggttccaagtgctgcaaacttgttttcccccatcattccttttttagctcttcttccttcttcctcctctatgcccttttcttatttctgagggttctctaaagctgtggcagaattcaaaattattttctaaagatcagatccttgcaatatgttttcccatagtgcatctgccaccaaatagaataacatggtaataatattgataataatgataacagtagaaactatcatagtggcaacaataatgacacaatggccatatgtactgagttcacaccatttgccaggcatgatgataagcacttacaatagatgctattattggtctcattttataggtggagaaactgaaggcacagcaaagtgaatatatatgccccaaatctcacaaccagtaaatgacagagtccaagtctgagcccaagaagcatgcctccaaatcctatgttcttggtcattacactatagtaaggacctcaaaggaggcattagtcctcttggcttctcttagcaggaaagagctaagataagtcactctgttcattctacaggtagagaacactgagtctccaagggcctgcaacattccccatgtatgtagaattggaaggaaggagagggaggccaacccagagtaatttcataatttttgaataaatctctactgtgacttgtttagtgggtcacccaagctgcttgcttgggtacattaaacttcttttttttaaattttattttaacttcaggatacaagtgcaggtttgttatataggtaaccttgtgtcattggagtttattgtacagattatttcatcactcaggtattaagcctaatacccattagttatttttcctgatcctctccctcctcccatcctccacctctgaaaggcccaagtgtgtgcttttcccctctgtgttcatgtgttctcatcatttagctcccacttgtaagtgagaacatgtggtatttggttttctgttcctgtgttagtttgctaaggataccggcttccagctccatccatgtccctgcaaaggacataattatgttctttttttattgctacacagtattccatggtgtacatgtgccacattttcttaatccagtctatcactgatgggcatttaggttgattttatgtctttgctattgtgaatagtgcttcaatgaacatacatgtgcatgtgcctttataatagaatgatttatattctattatacccagtaatggtcttgctgggtcgaatagtatttctatctttaggtctttgacgaatcactacactgtctccacaatggctgaactaatttacattcccaccaacagtgtataagtgtttctttttctccacgacctcaccagcatctgttattttttgactttttaataatagccattctgactgttgttagataatatctcattgtggttttgatttgcatttctctaatcatcagtgacattgggcttgttttcctatgattgttggcctcatatatgtcttcttttgaaaaagtttcattcaggtccttcgcccaattctttatggggttgttttactcttgtaaaaaaatttttttaaaaatttctgtaagtttaaggggtacaagtgcagctttgttacaggaatagtggtaaagcctgggcttttagtgtaaccatcacccaaatattgtatattgtacccattaagtaatttctcatccctcatccttcttccactctcctacattttcaagtgtccagtgtctatcattccatgctccatgtccatgcatatgcattctttggcttccccttctaagtgagaacatatggtatttgactttctgtttctgagttatttcactgaagataacggccttcagtttcatgcaagttactgcaaaagcttaaatcggctgcgacgccaccagatattcatgggctaaagacccctacagctttatagagcacctgatggtcaaggaaggtctcaggcaaaactgggtttcctgaagactaggccagacttggtcgtctctcaatcaagtgcatcagtgtcgaccgaaaacagccttctattaaatgtaccaatttttgacaattcctttggaataggattacaaaagctactattgacccttgttgttggctttcacaaaggatgtcaagaacaaaaaaattgaggtaatagtaatctcccactcatggcatgttatcattcttcgtggtggaagtctcttttattttattatttatgtttgtatttgtataattttttctctaagaactaaaaatagaactatcatttgatccagcagtcaagtggtgtctacccaaaggaaaataaaccattctattttattatttttatttccccttttcccctaccataccgtatacaccccagtggacttaatacgtatacttcaagtagccttccatgttttataatcatttaatatttacctgcacccttaaaaaatatggtggtgcttgcgtgtgcatgttcttaatttgcataaatagtattgtgctataaatcccaacctgtttcctacttttcttccttcatgctgggttttgagatttattcacatttgttctatgtaatgtggcatgtggatctctggttttctggccatcttttatgctctgacttcattcattgactcaaaaacaatcaaaggaaagttgtattgtgcttatgtagtttctttttagttcttttcctgatgatgtgagaaaatacaatgtcaaggatgcattttttatttcaaccaaagaaaaggagggaaaattgccatttctgaacacttgctcaaccacttttttgagcacggggtcaggtatagtatacttatttaattcttaaaccaatcctatgagggagagaacattatctccattttatcagatgaggatcctggggtcatagcctcagcataaaggctgcatacctcgtttgggcactcagatattttaggaggcagaggtagtactcaaacacatcttttattgagtccatccataatcctattccaagtaaaatcactctacacaaggccagtacccacataggctcacagaaatcctgcacttacatgtcttcctttttcagggcatagtgcagggacaatagttgtttagagcgggtgcaaaaggaaactcgaggacttctttcaaaagagcactgcatttctggacaaagaaaaaaatactaaagtgaacttggctcaactaaaattctgggagatattatccataaatgatgtaatttagtttttaggggcccctgattgacataagaacactgggttatttctagaatgagtgttgtgtctggcctgtcttcattctcctgcagaatttcttctttttcttcaccatctttaagatgtactattgttgcccagagctcctcaattttttttctgacaattgtggaaggtagaataacgtacccccccacaaagatgtccacatcttaatcccaagaacttgtgaatatgttgcattacatggcaaagaggaattaggattgcagatggaattaagattgctaatcagctgaccttaaaatagggagattatcctggataagccacctgggcctaatgtaatcacatagtcacaagggtgagtgaggcttgtgttgaatttccaacccacataactataaaataatatatttgtgttgttttttagccactaagtctgcggttagttgttatggcagccacagaaaattaatacaataataacgttaagacaggtttagtatcccatatctaaaatgcttgacaccagaagtatttcagactctggaattttcttttttgatttttgaatatttgcattagatttaacagtgtcggcatctctaatccaaaaattcgtaatccaaaatgctccaatgagcatctcctttgagcaccatattcacgctccaaaagtgtgagattttggaacacctcaaattttggatttttttgattacagaggctcaacctatatttctcacatacttttacatgtcagcagttttgtgctaagcatctcacatgaggcatgtactattatcgcccttaatgtacgggtgaggaatctgagaggtaccctggttgagtaatttgcctaagaacagctggcaatttgtcgagctgatgcctggtgcctgactctgtaaccaatcaagcagcagccattcagtctccacagtcccacttaaccaaccacagacagagactgaatggctgctgcttgatgggattctgaattatgttagagacaatctgattggtcctgtttgaatcattgtgatcagctctagtctaatcagactatgctcagggaagtgggatcctgtaggacaatcatggaggtccgatctgcatttgtagattgaaggggcccgagaagaggaagattcacggaacaacttgtctttttaccaaaagctgcctgttacagagttccctcatttgtatactttgtggcctcaccagcttgttttctctttgcactctccatttgcctcggactaacatccccctttgccagagtgggtaggttagtggcccacagagtcatttccaaacactgttccctcatgcacacacccactcttgacatttgttctttgaaattaccaagccagtgtgtctgttctgttctctagcctggtaaggggctctttgtaaccaaggaaatagatctgcttttgaaccaaagagatagacaagaggcatataattcccatctaggatctttatatagcaaatatcaactccctttgttctcttaattcccaccagcaaaatgccagtgaggtttgcaaggcagcatcggtttagattttcctgttgactgatattcagtaggtcttaaccacccgcagtgttaacacatagtgacttgcatggacgagggggtctcatagaggcagctctgggttcttcagaaaatattaaaaacttgcctaaagaatgagagcggttgaagtgataggggacagactctagagatgcgtatgtgactttgctgattaagcaccagctctctggaggtcaagtgccaggttcctgagaacactggaatacaaagagaaggaggaggtactgggagctctaataccacacagagccactgctgcactcactgatccactggcagttgtagcatttctgttgcaacaagtgccctttgagttagcatgattagatgttttcaattccaagttgcacatctttccacattttaccattactgaaagcatgaaacaactgacagttgatgggtacacttatttttgtgtttttcttctagaaaggtgctattaaatcagtgatgtgtcttacaaatatggcatcttagaatcatgaaggtgtagtaataaatttcatgtagggatggttacttttgtttagatgaacagaaaaaggagctgattttcatctggtctggaagggaggaactaggttaaataagcaaaaagaccaaggtctttagaagatatgtagaagttaggaggcccattatttttaccagagttctctgaaaggcccctgtgatggttaattttaggtctcaacttgactggattaagggatacccaaatagctgctaaggtattatttctgggtgtgtctgtgagtgtgttttgggaagaggttggcatttgaatgagtggactgaataaggaagccctgcccttgacatggggggctccatccaatcagctgaggatctgaatagagcaagaaggcaaagcaagagtgaatttgttttctgtctcttctagagctggaacacccttcttctcctgcctttggacatcagaacttcagattctctggccttcagacttcaagacttgcactagtggccccctgggttctcaaggttttggccgcctcggttgagagttacaccatcggcttctttggttctgaggccgttggagttggactgagccatgctaccagcttccctgggtctccagcctgcagattgcctactgtgagatttagcctccataatcacgtgagccaattctcttaacaaatcacttctcatatctttctccttctacatatcttattggctttgtctctgtggagaaccctgattaatacagcttctaaactgataaatgctcacttatacccattgagttgagattgcttcctgtctagcctcaaggctctgtcctctgaaagccacgcttgggatcttcaggtgagtgcctctgtataccaattgcagacatgactttgcagaagtgggttctttccagttgtgcctttttgcctcagaggcccaagttcctccaagatgaccctaagctgcttttttcaaagtatttttgcaaagaaagagtgaggaaaaaactgagccctggggtattaattctgaatggcttgttgaatggctggctttaagatttgctccttattacacagaaaccctctttattcttcaaaagaggctttggcaaagtcagagtaagtaggacttaatcttacaatacaacctggctgttccagggaacatgaagcccgcaatattttctaccgacagtacttcctagaaaaagcttgcaggttttcccgaacagtaaatatggctaccatctattgggcactgatgtgcaggcactgggctaaattctttatgtgaatatatttttatatgaattgtctcaattttcaaaacaatccccatcatactggtgaggaagctgagaaacagatacctttctcagaatcacacagcaaaaagtggcagagccaagactcaaacccaaatccctgtcacatcaaagcccagtctcctagtcccttacctacactgcctgtcacgaaccgcttgttcttctctgacccaaaggcccccagacagacgacgttaaagctaccagggcaagcaaatggcagctgctcccaggtaaacatactcctccgtataacatggttttctaaccttcagttcactgactggtgggtggcaggaaaggcagaggagatagaagacaagtacaacacactatgaatagcagaaggatgaactgaggactgtcaacgtgcaaaggaggttgaacatgcaaaggaaggaagccaggacagttgtaagggcatctccaggtcccatttccccaccccacccctgccatcctcctcccaggctgtgatgaatccaaggaggataaatcaacacttgcccaggttactgtttatttccttagaactagggaaaactgcatctccccttctttcacttggaaaaatcactgtgttagaataattatgaatcatcctttgatctgtctctatatctgcaaagcataaatagcgttcagctgttgaggtctgattgctcgatatttcaggtttatattttgaataacacaaggattggttgctaacaccagtaaataatttactctagtctgaaatatgagctccaggcaagaaacatgagatcaaacacggggaactgtagtatgatagcaaacatactgctatcctgtgaagggtttttctaaattcactgctggaagacagagggagaaatgacaacaggtggagcatcagccaaggtccttctggctcctgcccgaatagaatggctttcctgacatcaaaggatgctggagagatgaatatcaatttgagcatggagagaggatgtgatagctgaaggagggcttcttcagcttctaacaccaaaacattcctccctccactccaagcccttggtcatgccaagctcagtagcaatgccaacttcttatatctcctttaaaaaaatcattctgagccacaggagggcagaatattgggagaacagagtgcatggtctgatttctttgacttcataaaatctggagcagaaataaaaattagcaaaaacagtttcttttgatatgagagtttatttgatgcttttgttatgacattaaatgaaaaggcagggtttcaaatgcagctgcagtatgatcacaatgaagttcaagtcaacagcaaaatttctggggtgagcaaaaccaacaataaatgcattaatgcattatcagtggttgccgtagggagatgggagcgtagctatatccagcacctccttgttacaatataagcaggatcccagtggaaatgtaagggctcctgtgttgtccttaagattgttctggaaagtaacagtattttcatgcgcgtccgtgtgaagagaccaccaaacaggctttgtgtgagcaacatggctgtttatttcacctgggcgcaggcgggctgagtccggaaagagagtcagcgaagggagataagggggggggggggcggggcgttttataggatttgggtaggtaaaggaaaattacagtcaaagggggtttgttctctggcgggcaggagtgggggtcacaaggtgctcagtgggggagctttttgagccaggatgagccaggaaaaggactttcacaaggtaatgtcatcagttaaggcaaggaccggccatttacacttcttttgtggtggaatgtcatcagttaaggtggggcagggcatattcacttcttttgtgattctttagttactccaggccatctgggcgtatatgagccttgggctcagaggcctgacattcctgccttcttagtatgaaaaataaaacaaaatagtgttgaagtgttggggcggcgaaaatttttggtgggtggtatggagagagaatggacgatgtttctcagggctgcttcaagcgggattgggggcggtgtgggaacctagagtgggagagattaagctgaaaggagatcttgtggtaaggggtgatattgtggggatgttagaagaaacagttgttgtatagaatgattggtgatggcctggatacggttttgtatgaactgaaaaactaaatggaataagaaggagaaaaacaggtataaaaggtctaagaattgggacgactcaggatatctgattagagagtgcctaaggagattcagcatagtcctgccagcaaagatcatttatttacttcaagagttaagcgtggcagtttggggatagcaccaggagatatcagctgtgatggcttggaaaaatagtgtaaacctgcagtgtaaacaagagcagggcatgtgtgagtagttgagatcggtaaataggagtatgattagacagaagatagtagggatgacaagttttttggggcacagtctaagttggtctggtgtctggaatgagactggggcctaataacaaggagcgtctatacaggagcttaaatgggctgtaccctgtagcattctgaatacaggcctgaattctgagaagggaaagtggtaaaagtattgtccagtcctttttaagttggtggctgagcttggtgaggtgtgtttttaaaagacctttagtccattctacttttcgtgaagacggaggaccgtaagggatataaaggtttcactgaatactaagagcctgaaaaactgcttggctgatttgactaataaaggctcatctgttatgagactgtattgagatgggaaggctaaactgaggaattatgtctgacagaagggaagaaatgactgcggtggccttctcacaccctgtaggaaaggcctctacctatccagtgaaagtatctacctagacaaagaggtattttagttatctgactcagggcatgttgagtaaagctaatttgccagtcctgggtggggcaaatcctcgagcttgatgtgtagggaagggagggggcctgaagaatccctgaggagtagtagaatagcagatggaacactgagaagttatttccttcaggatagatttccacgatggaaaggaaatgagaggttctaagaggcaggctagtggcttgtactatagtataacctgcctttgctggtgtgtggcaattaggcctggtggaaccgccatcaataaatcaagcgtgatcagggtgaggaacaggaaagaaggaaatttggggaaatggggtgaatgtcaggtggatcagagagatacagtcatgggggtcaggtgtggtatcaggaataatgtgggattgaagtctgggccaggaacaacggtaattgtgggagactcaacaaagagtgagtacagctgaaggagccagggagcagaaagtatatgcatcaggtatgagaacgaaaatagattttggaagttatgagaactgtagagagtgagttgagcatagtttgtgattttgagggcctctaaaagtattaaagcagcggcagccgctgcacgcacacatgagggctaggctaaaacagtaaggtcaagttgtttggacagaaaggctacagggtgtggtcctggctcttgtgtaagaattctgactgcgctaaccatgcctaggaagaaaaggagttgttttgtagaaggtgctggggtttgagatcagttggacacgattggcagggagagcacgtgtgtttttatgagaattatggcgagataggtaacagttgaggaaaaaatttgggcttgattgaagtaatgggggctgtctgtgaagctttgcggcagtacagcccaggtaatttgctgagcttgatgggtgtcagggtcagtccaagtgaaagcgaagagaggctgggattaagggtgcaaaggaatagtaaagaaagcatgtttgagatctagaacagaataatgggttgtagaggcaggtattgatgataggagagtatacgggtttggcaccacggggtggataggcaaaacaatttggttgataaggcacagatactgaactaacttgtaaggcttgtctggttttaggacaggtaaaatgggggaattgtaaggagagtttataggctttaaaaggccatgctgtagcaggcaagtaataacaggctttaatctttttaaagtgtgctgtgggatgggatattggcgttgagtggggtaagggtgattagattttaatgagatggtaaggggtgcatgattggtcaccaaggagggagtagaggtatcttatacttgtgggttaaggtggggggatacaagaggaggacgcaaaggaggctttggattgggaagaagggcggcaatgagatatagctgtagcccaggaatagtcagggaagcagataatttagttaaagtgtctcagcctaataagggaactgggcaggtggggataactgaaaaggagtgcttaaaagagtattgtctaagttggcaccagagttggggagttttaagaggtttagaagcctggccatcaatacccacaacagttatggaggcaagggaaacaggcccttgaaaagaaggtaatgtggagtgggtagcctccgtattgattaagaaagggacgggcttaccttccactgtgagagttacctgaagctcgatgtccgtgatggtctagggggcttccgaggcgatcgggcagtgtcagtcttcagccgctaagccgagaagatctgggaaggagtcagtcagaaagccttgggccagagttccaggggctccgggagtggctgccaggtgagttgaacagtccgattttcagtggggtcccacagagatgggacgtggcttaggaggaatcccaggctgcgggcattccttggcccagtggccagatttctggcacgtgtagcaagctcctgtgggaggaggttctggaggaacacctggccactgcggttcaggcgtttggaagttcttgtgtgctggagatgtggctggggtttgtctcacagtggaggcaaggaattgcaacttttttctattattgtacacctgaaggtgaggttaattaaatcctgttgtggggtttgagggccggaatttaatttttggagttttatttaatgtcgggagcagattgggtaataaaatgtattttgagaataagacggccttttgccttttagggtctagggctgtaaagtgtctcacggttgctgccaaacaagtcatgaactgggctggatttttatatttgatgaaaaagagcctaaacgcttctgatttgggataaagaaaaaggagcattaaccttgactgtgcctttagctccagccacctttttaagagtaaattgctgggcaggagggggagggctagtcacggaacgaaacggtaagccagaccaggtgtgaggaggggaggtgataaaaagattatagggtggaggagcagaggctgaggaaggattgggacctagctcggcctggtgaggagcagcctggggaggaagggaggggtcagatgggtctgtagaaaaggaagattagaaagactcagcgacgcttggggttggttctgaggggacaggtgggagggtaagaaggaagatttgggacaagttgcactgggcacagagactaggaagggactgatgtgtaaaagaatgcctggacgtcaggcacctcagaccgtttgcctattttacgacaagaattatttagattttgcaggatggaaaaattcaaagtgccattttctggctatttggaactaccgtcgagtttgtattggggtcaaacggcattgcagaagaaaaggcatttaggttttaggtcaggtgtgagttgaagaggttttaagtttttgagaacacaggctaagggagaagaaggaggaatggaaggtggaagcttacctatagtgaaggaggcaaacccacagaaaacagtagagacacggagaaggggtggagggttcttgccctccagaaaagcagagaaggggttggggcacggaaataagggattggggcacagagataagaggctggggtgcggaaataagcgactggggggttcttgccccctaggaaagcgggacttgccgctaagggtgaagtccgtgaccggcgccggagttttgggttcacggataaaacatgtctcttttgtctctactagaaaatgaaaggaattgaaattaagagaagggagagattgaagtgtggcgctaagattgaaaggagaaagaggttgagggatagtgagggaggttggagaagagagtaaaaagaggccgcttaccggatttgaaattggtgagatgtttcttgggctggtgggtctgaggacttgaggtcgtaggtggatctttgtcacggagcaaagagcaggaggacaggggattggtctcctaagggaggtcccccgatccgagtcacagcaccaaatttcatgcgcgtccgtgtgaagagaccaccaaacaggctttgtgtgagcaacatggctgtttatttcacctgggtgcaggcgggctgagtccaaaaagagagtcagcgaagggacatagggtggggccgttttataggatttggataggtaaaggaaaattacagtcaaagggggtttgttctctggcgggtaggagtgggggtcgcaaggtgctcagtgggcaggagtgggggtcgcaaggtgctcagtgggggtgctttttgagccaggatgagccaggaaaaggactttcacaaggtaatgtcatcagttaaggcaatgaccggccatttacacttcttttgtggtggaatgtcatcagttaaggtggggcagggcatattcacttcttttgtgattctttagttacttcaggccatctgggcgatatatatacgtgcaggtcacaggggatgtgatggcttggcttgggcttagaggcctgacagtatgcctctgtgatgggtacggcctcccttgaaaagagagaatcttccttcatccagcaagttttagcaagtggaaagggtagcaattggccctcactactagctatgattggtagtgactatctgggatactggggtgagaaggattctgaaatcaatggactaaaagacctgattgattagtgatgtctacctgggagcatgaggtgctatatttgacatctgggttttgagtgagatacctgtattcaaatcctggttttaaaagcttgggattttggactttaaaaagtctctcttctaatgctgtccctccctttgtcccccaccccccaacaggctgtgctgtgtgatgttcccttcgctgtgtccacgtgttctctctcattttcttagatcagctacctaatctgttaccaacctaaggggattacataaaatattccgtgaggatgttgctggcataagtagatgctaatacaattcctctatctcttcccatttccttccctttcctttacattcttcaggacccaaaaaccgtaagagagtattctcttttcagaattttcaccaatacattcagcataattgtaagtgcttcaaccaaccagtgaaaggcctccagatagagaaagatgggaacccctctctgccttatacctgaccaacataagactgttgacagttatgagttccagacatcaacagcagctgtaataacctttctcttggctgttttcagcagagccataaaaagatgaacatgatatgattgacaggcctagaagacagggtgtttttaggaccaaatagtgttagaaggacctgctggaatgaggaatacaggaaaagacctcaatacactgtgtatggtactgaacttagcagattactgatggaatttttggaatacctcctcagaggcatgaagcctagaactttaatagctctgtattcctgaaggtaaagaatttcttgattaggatgagaaatgcaattcccatccgttggacttcaactgaagaagaatgtccagttttagattctccagaagaatgtccagttttagatcctagtctgcaaaacaataaatcttcaaaattccaataattagtactgaggagaatcaacttgttaatactgttgccattttcactgtaatattttttggggggaggtcaaggcggggtggatcatttgaggtcaggagttcaaaaccagcttggctatcatggtgaaaccctgtctctactaaaaatactaaaaaaatagctgggtgtggtggtgggcacctgtaatcccaggtacccgggaggctgaggcaggagaattgcttcagcctgggaggcagaggttgcagagagcagagatcatgccatggcattcctgcctaggtgacagagtgagactccatctcagaaaaataaataaatagcaataataatttttattttatttatttattttttgctcagaactggcagcatggtaggtgggaaagttgtgtaagtttagaattctatccaatatgggtgaaaactccaatttatcaccatacttttacctctctgagactcaggttctcatatgtcaaataccactagaggtatttatacatttaaggatttttgtaagatctgaagtttatgggtcacttcttttttctagcagatgcggttggtgccagtgtcactttccttgtgtgaagcaggttcactgtgcacgggttaccaacttgcctgagtgtggtgacacagaacacccacacacatcaagttagataaagtgaattcattatttgcagataggcagcaaaggatgctagaagcctaggattcatgttgagctggtcccccaagactcaagaaagctgcccagggtggatagagtttcatctgtgcatgccccacttgcatcacagctgagggactatggaaagccgtccacctgagttctgtaccttggggaacttgacttgctgggctaaagcgtggaaggacatccggttctggggactggaacagagcctgggctgttacatccagttcctctctatctcaggatgttgcattctttgcatattctacagttacttaagagaactacaagtgagaaagagggagaaatgagttagtgcaagaccactcagagaactgtcctgcaccctcagctcacctctaaattttgctgcagctgatgctcactgacggtgtcccacttcagttccccactgtgtttctccactttcctgtctcagggcttgatatggtttggctatgtcaccacccaaatctcatcttgaattgtagttctcataatccctacagatactgggagggacccagtgggaggcaattgaatcatgggggcggtttcccccatgctcttctcatgatagtaagttctcatgagatctgatgtttttataatgggcttcccccttcacttggctctcgttcttcttcctgccaccatgcaaagaaggatgtgtttgcttccccttccgccatgattgaggtctccctagccatgctgaattgtcagtcaattaaacctctttcctttataaattacccagtctcgggtatgtctttattagcagtgtgagaacagactaatacagggcttttatcaaaatggtggcagctcagtcaagcctcgcataggtggagccgaggagcttagggaatttacaccaacaggacaacctgcaaccagtgggtgatgggagtcagtggataaatgcttcagcctcccggccttctcagggaatattctgaggtgcattctacacagttcctcagagggctcctggtaagatgatctctggttgcccatagtagtaacaagctccataatgtccccttcaccagcttttcatccttccccttctcacttgctctactcctcattccaacttttggagataacctctcaaataaaatacctgcaccaaactccttgtcttaggttctcttttggagagattcaaatagacactcaagctctgttaaatattcttcacctttctagtactcacactttttccttcatttcccatactcatggatgatttaatttcttcctcaagattaagaaggtacaccatcttcttttcttctctatctctctgtccatctttctcttccttttatttttaggggaatggggttgctcgctctctagagctaacgcttttattttgtcttgaataaacctggttctccatcagcgtcatccatttcaattaatgacaccaccatcctttcagttgcttaagccggaaacctggatgcatcctcctcttatctcctgatcaatcaccaaatcccaaatgtttcttgattttgtccacttctttctctattaaccttcattgggtatctgctgtgtgctgagcattttatgagctttacaagcttcatctcatttatatccctacagaaatgatgccttttataaaatggtactatttttatccccatttgtagatgacaaaatgcaggtgaagagaggtcaaggaacttgcccaaggttgtttgagtgagttcatggggactaaaacatgaatctttttcctaattacagagctcatgttcttccactcatgtgctgttccacctgcacgtcttcaaaggcattgcaccctgatggttgttccttcccatgccatcatctccactctccttctcagagattttcttcccttttgccattatccatgatgatgtgttgtctgtttcatacaataggcttaaagaaattatttattggatgaacaagccttcatataactaattatttccactatgtgtattatcatttacattaacatgtaattgttcattatcctttgtcattaaaaagaggtaaagaattatgggctttggagtcagagagacctagagtcaaaccccgttgccatcacacactagttatgtgaccttgagtgattcacttaacatttccaggccttcgttttctcacctgcaaaatatagattaaaaatagctcctggctggctgcagtggctcatgcctataatcccagcactttgggagaccaaggcaggcagattgcttaagctcaggaatttaagatcagcctgggcaacatagcaagaccttgtctctactaagaacgacagccaaaaaaaaaaaaaaagcaaaaccaaacaacaacaacagcaacaacaaaaaaaaccccacaaaaaacaaaaaccagcccagcgtggtggtgtgcttctgtagtcccagccacttgggaggttgaggatgactcgagcccaggggatcgaggctgcagtgagcagtgattgtgccactgcactccagcctgggcaacagagggagaccctgtctcagaccaaaaaaacaaaacaaaacaaacaaacaaaaaaacaaaaacgtggtgatggcaaagatgggggagctgaagaggacagtattgagaaagatggcatctgaactggactttgaaggatgaagcagggagtggagaagaggattctggatgtagtaagacatgtgcaaggaagtgaaaatgcagaaagttttggtcatcttgggtctagagaaattttatgaagcacttcatcccatcttgtccctaagccttatcccatatccctggtggtagtttcctctctttcacttctcacattcctgattttatttccatttcttgtatttcttctctcccaactcctggagcaaagtcccgttcttttcatcttctcatacagagccatttagctttctctttcattgccttgtttttttcaaagtccaggcactgagaattttctttaatccccaagtgacttctcaagggattcctctcaacaaaaacagttcccacatataaaaggaatgctgatgccaactaataatataattaaggttttcacatctgctgcacttgtgttagtattagattgctatccctttgggaagtagagctatgtttcattgaactcagaaaactagaaaatgctcgaccatgtgatctactctctgtaggcactgggtacacagagatgagagaatgtggatttggcccttcaagggaccagagtctatatgggtaaacaagcattgaaaacaactatttcaatgctagatcataagcacaacatggaaatttgtgtaaggctcagcaaaataacaatttaatatcacaacttgaagttgttcatttcatgtcttcccctctggactatagtatctttgaaggaaaggtttttcttgaggaagaactaagtctccttcgtttgccgttttattccaggtgcttggcacaatgaccggcacctaaggcaaacctggtaaacatttgtggaattaaagcatgaatgatggaagggatttttaaaaattaggtggtggtggcaaggatagggaggtggagaggatggtattaggatgtcagcagctgaactgggttttgcaggatgaaacagaagagtagggaagtgtattctggacacatgaaaaactatgtgcaaagaagtggaggtgcagaagagctttgaatttggagaactgtaaatggtttggtagaactggaacaaatgcagggatatgggatcatgaaaggtagagctccagagacaagcaggatgcagccttttctgtatcatctgtgctgaacctagcacagcgctggcttcaggataagcatgcattgcttggtggttttaaacttttgagttccttagcatgcatgatagacgtgcacattttcaaatcacggaagattactattcaaggtctctagggaagaagtagtcgaagagtagtccaaagaccagaaatatcagcatgtcctaagaacttgttataaatgcacattgtcaggccctcccagacctgctggatcagaaactctggggacagagcccagcaatctgtattttaacaaactttccacatgattccagatttacacccaagtttgagggtcactgatctgagggatggagctaagaaacaacgagaaaacaaaaccaaaaaagccacagatgtttctgatgatctgtccagcttgagaatttctctttaaatgtatgtgtcatctttattgtcattggcttagcattgaactgacagatttactctgccttttggaactagcctgggcttctctgaaacacctgtgcccactaggtccttactgaaaacatgaaatagaccagaatctggggaaggaggagagctagtctctgatattcacaggctccaagaaggaaggaaaagcaattgtctctgctgaagacgttgaatcataggcaagagatgccctgagaaaataaagagaagcaaatttagaacaagcaacaagagatatttttgcattcagcattcactcaacttgcaggatttgggtggtttatgtctttcaatgaatatgcaagatggttcttttcacccaaatataattaacactattcagtatttttattcaacacacaatataccatatagacaatattaaacagacaatgcccaattatagtgaacaccagagaatatttttattaaatagaaaattcaatgataggaggcttctgcaagattgtttgctatgtcatttattcttggatcaagccctggaagagccttgattccctatgtctaaagaagtgcgctctttgaatgggtggtttccctggacgataatcacttcttgaataatatgaatgacagttataataaaagtatctgtgttcagctaatttccttgattagagcacatttatttgagcatgttgctggtaacatccaggctaggggttccgtctttgtgtaggcagtaagaacgagaagatgaacaattagggatgaggaaaaacaaaggaggaaagtggatagaaacattacaagaccttgcatttccattgaggagagcctatgaagctgagtccaaataccctaggacctagggacaccacaagtcttccaaaaatgatgatggtggtgatgatgataataaaagtaataataatagctggcaggtattcagtacctatacctatattgtgttcaatgctttatatgtatgcattttccagactttcaaaacaaactggggaaggccctagcatcacctcatggagatttaaactgggaagggctaagaaatgtccccaaaggtcacattcataataagggactgaaccaggcttcaagtccaggaaagcttgtgctccttaccactgcattgcattgcctctggcaaggaggacctacaatgtaaggagggtagtgatgaatccatgttgtatgtagcatgctctaacatttattggacatgtgatgtgtgccaggcatcatgctaaacatttaacataccttatccctcttaactctcctacagagagtatacctcttttttttttttttttttttgagacagagtctcagtctgttacctaggctgtagaacagtggcgggatcttggctcactgcaacctccgcctcccgggttcaagctattctcctgcctcagccttctgagtagctgggattacaggcacgtaccaccacgcctggctaatttttttatattttttatagagacaggttttcactatgttggccaggctggtctcgaactcctgacctcaagtgatccgcctgccttggcctcccaaagtgctgggattacaggcctgagccactgtgcctggccccagagagtatacttctaatcttcacatcttatggattgcaaacatattcggaacaccaagttgtaattgttggacgtggaggtggaaaccagaaatgagtcccaggtctgtgaaacctcatggatgacctatggatttgaacctttgaaaaaaattaaggacaagaatggaatgattctatagctcagtaagtttcccctaaggaaacttcatctcatagaaaataaaagctctgctgaagccttctagtttgcctggaattgaaatacacagagcccctacttagtcgttatcatcacgtggtgtaatactggtgcttttatatcactgtggacccagaaaattatgcaccattcaagggccatgtgtaaaatgatggcaaaactgccatcagttactgatctgtggacaaaatatccagcatcttatttaagtggcttgtatcatttaaaaagatcttgcagattactcaacggttaatgctttaatggaacatttaggctttggtctactcattttcttgtagtgcctgtagcatagacagaatcagcctgtgaaaatagaggacacagctatctaaaaagaatgcaagcaaatgtgttttcatttacagtgtcaatatttagtaaatatatttcaaactttattgtgcatacagatcacttaaggatcttgttgaaacacagatttggattcagtagatctagggatactgagattctgcattgttacaagctcccaggtgacatcaatgctgcccatacctagaccacactgtgagtagcaagaatccaggttttagtcagggtgcagaggctcatgcctgtaatcccagcactttgggaggctgaagcaagaggattgcttgagcccaggagtttgagaccagcctggagaacatagtgagaccctgtctctacaaaaataaaataaaataaaataaagaggccaagtgcagtgactcatgcctgttatcccagcgctttgggaggccgaggtgggcgatcacttatggtcagttgagaccagcctggccaacatggtgaaaccccatctctactaaaaatacaaaaattaggtgggcatggtggcacatgcctgtaatcctagctactcaggagactgaggcaggagaatcacttgaacccgggaggtggaggttgcagtgagctgagatctcgccactgcactccagcatgggcaacagggtgaggctccatctcaaaaaaaaaaaaaaaaaaagaagaagaatcgaggttgtaaaaatctgggttaatatatgtgtacaattcctgcccttcctcaaagatcttaataacctcaaaaatcatttgtcaaaccagtacaaggagtttcaattagcaaaacttaaactcagtaattaaaccaactacagtactagggtgaacatctaaataaaatgtccaagaatgattgtcaacaaccattcaaggattatacgttttgccactaccatatgctgagggcttattgaatgtcagacatcctgcagagtttgttctgtggtccccattatgttggagtctaaattcaggcaaactagatactataaacagaggaggggaagatgccacccacgggtaccatttattaagctcttaccctgtatcagtcacgttatagacatgatcccaattaatcctcacagtgaaaagacggaaatattatcattgtccctatttttcagaacaggaagccaggatccagagaaattaagccattggctcaaattcttaaagttcttaagtgggaaaacaagattttggacccaaaatctgttgacttattacctagcttctattgaattctgcatcattagtaatgaaaacttaactcctaatcctaacacaaggttaaatagcaagtaggatgcgggggggaatgaagatgtttcctgaagtgtacacgcgtgtgcgtgcgcgcgcgcgcgcgcacacacacacacacacacacacacacacacacacacccctgaatttggtctgagaacatggatgtgctaacaaacccttacttacttctgggcattccacagtcttccaggtcattagcctcctagctcccattcaaatccacaccattagtagctgcaatcagctataattcttttattttttaattttattttatttattattattatactttaaattttagggtacatgtgcacaatgtgcaggttagttacatatgtatacatgtgccatgctggtgcactgcacccactaactcgtcatctagcattaggtatatctccctctaaatgctaagcttcctctaaaaaacctcacagattggcaatttcctactgtgcctcaagtgttaattcaaccaggtcaatcaaccagcccttaaaactgagcaagatcacctgcaaaggcatttctaatagccatatctgaggagaggctgagtaggtgaaattgtagggatgattttgtaaccagaatttttcaacccttggagagctagaggtgcttctgaggcagtgaggtgagaaaagggggatttcaaggaattttggtagcacaggtagtctcttacttctccacgggggttcaacagactaaccttacatgttctgaaatcagatatacacagtatcgctactatattcaaaaacatgctaattaagagaggacaggacttgtaacaatcagaagaaaggccaatgggaactaagaacctgattagattatgtaggttttagaggcttcgttgcgttagggggttttgtaggaatgaagagagaggatagtggagaatgcagtgtgagcttgtttttagattgagagaagacctttaaaagacgtatccagctgatggtaaaatgatggggtgtgctgtattgatcagaggtgaattttcttatcttggagggtagaaaaaaacaggctaattaatagatacataaaatgcatttgattggagcaatgacctccaaggcaagatatgtgcaaaaaaaaaaaaacccactgggatatggaaataaaatattagagctactaataatgtttacttcgacttcaaaatacagaaggaaattaaattttactaatatgtagcatatgattgacagggagtaagtatacagtgtataaatgaatatgcatacatgtggtatatcataaaatgttttttcctggtaaggatgagactccttagtaagattatttatatgtgaatctgtgtgtttggaaatatttgaaatgtgatgttggtgaaagaaaaggtactagaatggatagtgttaaatatttatataatggaacattagacaactgttaaaatgaatatacttgctttagataaatcttaaaatgtcaaatttaaaaaagcaagctgcagaataatgtgctcagtgtgattccattcatacatattttgaaagcgtacaaaatagtattctgtgtcatttatttccgtatatagaaaggatataacattgtggataagatgagtgcttgctaatttcagagtagttgtcaacacctgggagaacattagggctacgagattaggaacactacaaaggaagttctgaacaaaacattaacatgtgttcagtctaggagataggagtgtggttgcttgctggtttattaaatgaatctatattcttttgtctgttcataacattttataataatccaatcaatgatatgtgctaaattggtggattgagcagaacatatcctggaaagttaggtttataagtgtgggaaggctgcagaaagtttactttcttgggaccccagaagtaaggtgagctgtaaacaccttgttcaagcaagagaagcagaggatgcagccaagactaaactgctgccgcttctcggtgtccactgatggggctctccgtctttgtgccaactgcatcataatgagcagaaccgcatgcattaaataaagagtaatcaatcatgagcaacatgacaggtgatcctgtgagcctcatgttgggggatgtagggtgagtttgagaagaatgtcaaagaatgacaaacactgagctcacaggggctagccgggtcagtggttcttaaccccaggtgcatattagcaacacccaggttgcttaagttctctgacccctccgcagaccaattgaatcagtagtatctctggggttggagacctggcctaggcatctaatttaaagttccttttttatgggtgagtagtattccatggtataaatataccacattttctttatccactcattggttgatacaattcatacatgcaaccaaaaaccatttgtacctgtaaagcaattgaaataaaaataaaaataaaatacatagagttcactagctgattccaaagtgcagcccgagtcgagctcagtggggtataaggtatttcccggggtgccacgaccatgggttttgtctgtttttacgcctcctggcttggtaacgaccaacgtaacttgtgtttgcaaacacaggttgccttacatgctgtgctggttaccttttctgctcagatacaaacctcagtgggaaatgggatgtagagtcaatggcccttaaggaaatcatatgatatggggaccaggtctttaaaattaggaaacaaaggtcctggaacaagaaatgccttggcccaaagacacacagctgtttagcagtaggtctgggatttaaacactaattttctgacactatcttgaaattaaagaaagttccgttaagaagggtttgttttcttcagctgatactgttaacctgcaccgacttacgaaggcattgctgagtggaccttcttctgagcacaaaacagtttataattatcctaattgtacggaaatgagagctttccaaacatgtgaagggtcataaaaatgtcttgttcagttagttattttaagtattcccactatgatcttgttttgaacataattttattttatttttgagggagtgtttggttagtgctgaaaagctctaaactaccctctatttgaatgggtttgcattaaatattagaagccaaattagtaaggttctgaaggactctagtctgaaagagaggctgggaatggagtggactcaataaaaatcaagtaatagaaataataataataatagcaaacacttatgagcacttgctgggcacttttcttagtgctttaagtgatagggttgctgccagatttagtaaataaaaataaagggcacccaaataaatttgaattccagcaaacgacaaataattttttactctaagtatgttcctgtattttctttgctgattctgtcgactccactaagtgaattaacaccatttaacctttacaatcctacgtggtagatttaattaatccccaaaatacagaggagaaaatggaggcagtgttaggtaacttatccaaaactacaaagctactatgtagcagagttgggatttgaacctaggaagtccagataaccaccatgatacactgcctgttcaacaactattcagtctgcagacatttactctgtatctggggaacttgctaatatccagatgtccctgctcacccccatagattctgatgcaataggtctaggggtggatccttggtatccactgaaactgatgtgcctgaagtctgagatcctccaaacgacatcatctctatgcttcatgattcttgatcctggctgcacattagagttgcctggggaggctgtggttcatttgatgtggggtggagccactgagtgattccaccataggaaccaaggttaagaatcactgctatagtacagtacctcttggctctaccttgattcaatggtaagtgaacacacatggttgaaacactcctaaggaagttaaggataaagaaaaaagagtaagattagcgatgtcccttcatgatgaagaaccttcccctcacctgacatctgaatacttattttggcatcagttcactcaacatctgtatgctaagaaccaactgtgagctcaacggggagatgtacagaatcaattactatctagacacatgcctggaaggcaggatggcattcaggaaaactgtgactcaatcctcagtcaggtgcccctacttttcactctacccaaatcccctttcagataatcaagaccaggattccaacttgacttctcaaacccacccagagtcacagcagctgcctaggcaacacccgtgccacccatttctcttgcctgcctttcttcttctttgtaaagcttacctgttctctgtttcagttcctccagagctcttccaggcatttagaactcaaacactgatcttattggagctcctacataaatatctgcccgcggattgatatttagccattgctaaagagtctgtgctagggtggggagtatcatggaagtaccctccttttgtggactctagggattttgcatcccccaatcagactttgaaagtctccaggtgggtaggcacactacactagaaaggaattattaaacctcagagttattaaagtccaacattttccattcatttaacaaataacaaggtgctgggtgctgggctagatcatgggaaaataaggctgatggagagggacaaggtccctgtccccatggggcttatattcagtctatctaaggtaagtccaggtgatatagcttcctcctagtaaatatggtacaggaacaaagtcttaggtctaattgcaacttgccctaaagcaaaagggatcatggcatggcccaccataactcctactctgatataatgtccaagcagcaccatttcagtggcagggatgtgggccgcattgctgagatttgagacatttgagaccacagaccttggtcccttgaaacaggctctggttagctattcatttcagttctcagtattcactaagtatttcctaagatgataaccatgactaatatttaagaagctcttttgatgtgcaaagctctatatgaattactgcattttaacttcacaatgaatagctgcaagattgcaaaggacgtaaaggaagcagagattgaccgacctacagtcttactccagagtagtgtttcttaaccttttttttttaaaccatccctctaagaagccctttaaaacactttttattaattgaccctttcatatgaaattttaatgacatagatatactgtttagtgtatgtacctcataaatatttaatgtattggatacatatctgtgctttaaacataaaatagtaagtttttttcatcctcagaaccaattcttgccccccttggaggccatagcaccctcactgaaagcacatatcccgactactaactactgtagaaaggttaacccacctttctacacttcgtggtgtttttatgtgcaaaatactggtttattagttgctcccctgactccaagcaaaatgccttaccctgcaatatgaggaagttcatatcctaattgatacaaactgtttcaaaggttgaaagagtaatacagcattagctgattcgccataaaacatagctccttgttgcaaacacttgggtatagcctgggaggtagtatgctctatctacaaataacaagaaaaaacaaactagtgttcttgcccaaatcttgtctcttacctgtcttcaatgagggaatctccacttgttaactctgtgactttgggctgctcattattgtctctgagccttggctcgctcatccgtaagatgggagtgatgaggctgggcgtggtggctcacgcctgtaatcccagcactttgggaggccgaggcgggcagatcatgaggtcaggagatcgagaccatcctggctaacatggtgaaactccatctctactaaaaatacaaaaaatcagccgggcatggtagcgggcgcctgtagtcctagctactcaggagactgacacaggagaattgcttgaacccaggaggcagaggttgcagtgaccgagattgcaccactgcactccagcctgggagacagagcgagactccgtctcaaaaaaaaaaaaaaaaaaagatgggagtgacgatagtgccaccccaaaaggctgttgtgtgaattaaatgaggtaatgtacatgcagtgtttagcacagaggcccacacagaataagatctcataacacgttcatatggtcacaggttgggttccctggaagcagatgctgagatggagtttgggcattaacccctggacaaggaaggagttgaaggaaaaatgtttggtaatgatcacttggggaagaaaggggaggaacagagacatgaatcatgatgcagtttcaacaaagcttggccaacttggccataagctctggagcaagtaactctcatcacgttggccagcattaggccaaaatgtcctggcttatttcttttttttgttgtttttgtatttttttttctttttttttttagtatgctttaagttctagggtacatgtgcacaacgtgcaggtttgttacatatgtatacatgtgccatgttggtgtgctgcacccgttaactcgtcatttacattaggtatatttcctaatgctatccctcccctggccctccatccatgacagaccccagtgtgtgatgttccccaccttgtgtccaagtgtcctctttgttcaattcccacctatgagtgagaacatgtggtgtttgtttttctgtccttgcaatagtttgctcagaatgatggtttctagcttcatccatgtccctacaaaggacatgaactcatccttttttatggctgcatagtattccatggtgtatatgtgccacattttcttaatccagtctatcattgatggacatttgggttggttccaagtctttgctattgtgaatagtgctgcaataaacatatgtgtgcatgtgtctttatagcagcatgatttatagttctttgggtatatgcctattaatgggatgcctgggtcaaatggtatttctagtactagatccttgaggaatcgccacactgtcttccacaatggttgaactagtttacagtcccaccaacagtgtagaagtgttcctatttctccacatcctctccagcatctgttgtttcctgactttttaatgactgccattctaactggtgtgagatggtatctcattgtggttttgagttgcatttctctgatggccagcgatgatgagcattttttcatgtgtctgttggctgcataaatgtcttcttttgagaagcgtctgttcatatcctttgcccactttttgatggggtggggttgtttgattttttctcgtaaatttgtttaagttctttgtagattctggatattagccctttgtcaggtgggtagattgtaaaaattttctcccattctgtaggttgcctgttcactccgatggtagtttcttttgctgtgcagaagctctttagtttaattagatcccatttgtcaattgtggcttctgttgccattgcttttggtgtttcagtcatgaagtcctttcccatgcctatgtcctgaatggtattgcctaggttttcttccagagtttttatggttttaggtctaacatttaagtctttaatccatcttgaattaatttttgtataagatgtaaggaagggatctggtttcagctttctacatatggctagccagttttcccagcaccatttattaaatagggaatcctttccccatttcttgtttttgtcaggtttgtcaaagatcaggtggttgtagatgtgtggtattatttctgagagctctgttctgttccattggtctatatctctgttttggtaccagtaccatgctgttttggttactgtagccttgtagtatagtttgaagtcaggtagcgtgactttcaaatagaaaaaagaaaacatccaaaaagaaaactaagaaaacaattccattagcaatagccaaaaaacaaaaaaacaaaaaacttaagaaattaagaaaagaagcctaagacttgtacactaaacactacaacacatcactgaaagcaactaaagaagacctaagtaagtggaaagctatcctgtattcatggataagaagacttaatattgctaaaatggcaacactctccaaatagatctgaagattcaacccaacacctatcaaaatcctagctcccgtttttgcagcatttggcaggctgatcctaaaatttatatggggtttcaagtagcaaaatacaaggggtttcaaatagtgggaaaaaaaaaatcttaaaattggaaaactcacgttttctgatttcaaaagttacagcaatcaaaacaggtacccaggtgatggaagaagtccatcttggacattgataattgtgttccctagaaaaaagagagaaaatgaaataccacacaatgactctgaaaaattctgctcataattgttccacatcattttggttcacattccaatggcataagcacgtcatatggctaaaacatggtttcaatgaacacaaatgtataatcctcccttagggagtggcagtaaatattttgagcaattataatatgttcaggtgatattttagatagagtcatggcataataatttggaggtctagtcactcctggagcctgactgattctctggaagaatcttcagaaagtgtgaagatgatgtcaacacacttatatgactacatgcttctcagcacatttacagccaggtggggaaatcccatgtcagcccactcacctctctaatgtatctgaagtcatttcagcttttacctctataaccagagctgtttttttccagagagtccaagagaaagtaaagttgcagaaaattgaatcaggaccatggctatgagcaaacacatggattttttttattttagattggttaaaaattaaatttctgtttccaggggtggagctgaaagaacatcccttattctgtaaattatagggtgtttattttctttcttatctttttggagacagggtctcactccattgcccaggctggagtgcagtggcatgaactcagctcactgcagccttgacctcttgggcgatcctcccacctcagcctcctgagtagctgagactacaggtgcacaccactatgcccagctaatttttgtatttcttgtagagatgtgttgcccaggctggtttcgaactcctgcactcaagtgatccacccgccttggcatcccaaaatgctggcattacaggcataatccatcatgcctgaccatgatagggtatttgtatcaaaaaagacagattccctaaaggaaagttaatgagaaaaaaacctttaatgctgcttccatcctctcaggaggaagaattgcgggaagggttacagcatctcaccacccaacgagggcacactgcataccagtggtggagaaatgggtgagccccaagagcttgccttggatggtcagagaatgaggctcttattccatcatggaccacaatagcagccttaggggcggcattcatgtgctgttgctcaggcttcacaggaaagaaagctatgggctgatccctttatggagcaagctgagtattcagagcagccgtgtactcaaggatgagctgcccaggtgctggtaaatcccagttcttttttatcatgtttccagatgccaatcattcatttacatttcaaacatcgtatttgttcctcatgactcattagcttggagggagggagagcaaagaggattgtcccaatatgcctctgttacctggactgctaggccatgctgagcagagagcaaagctaggacacctgatacctatgccacccatggattttgatcccgatcacctttaatatgctaataaaatgtacaaacacatacgtggttctcttggcacaaatatattctccaagtctgttgggtctcattgaatgtgaaaaagaagattctactcagtatatagctcaataatgttccctcttgggaatatcctttctctatgaaaaataaaaccaatagcatttatgcaaggccgggtgcagtggctcatgcctgtaatcccagcattttgggaggccaaggtgggcggatcacttgaggtcaggagttcgagaccagcctgtccaacatggtgaaaccccgtctctactaaaaatacaaaaaaaaaattagccagtcgtggtggcacgcacctgtagtcccagctacctgggaggctgaggtgggagaatcgcttgaacctggaaggcggaggtggcagtgagctgagattgtgccactgcactccagcctgggcaacagagcaagactccatctaaacaacaccaccaacaaaaatatttatgccaactggagagccctgacatctgtcaccctgctgactgtgaagcctgcagagctaggatagatgatgtcttgggatttatgttacttagggatagaactcaaactagttgaggtcaagagaagaagttaatgacccacatacttgaatggttcagggattgctccaatatggctacctcaggtatgacttgttccaggtactcacataatgtcatacaaacttgctctgtttccctttcttggctctgttttactgtgtgttggttttattcttaggcaagctctctccatgtggtggcaggatgactgtacattccaagcagccctggcattactagagtgcctgcccactgccaaatagtttcaggaaagtttctgggttgtgttataaaccctgcctgcgtcttgtgtccatctctgaaatagccactgtgtccaggaagatgccgtggtctacttgaccagcccttgttcatgtgcctagagtggagtcaactctcctgaatcatatagagaaatcgagagacagactgttattcatgcacctgtcataatatatgaggttctctatagattaattcttttcctatctttctcctcttctaggtgctgagcagcacaagggtttgggctatttaatgtgtctctataagtgcagtgtctagcacaatgtatgaaacctatgagtgcccaataaccgatcaatattgtacatgaatgagtgttcaataacaaggtgataaatcacaaggatcatatgcattctaattacctagtttgggggttgctccatagctcaaaaatatttgttgagtgaatcagcattcagttcctctggggatggaaattatatctgattaactctttgtgtgttttcagcaaaatacacagtaagtaaccaacgatgttgttaaataagaaaatagatgaatgggtgagctttaagtttcaccactcaaggaacctcatctccttcatcactcaattcccagtggtagatccagtaagccctaccctctagggactcaagatacctccatccttactctcccacttcccagctggaaagctgcttaactcacctgtatcccagaggatgtccagaggatgtgggccatggtgagaagatagtgagtttgaatatgaaaaagaggcaagaaggagacaaatgaggagttcactccaagttcacattcatcttattttggaaggaagtgggaaaggagaacaaagttttcatgaataatgctgcatattaaaatgcttgctctctctgatggtgattaagatggatgcagcatcatactgacttttggagggagtgggagtacagctgacaattttcccatcagagcttttcacgaagaaggagcaactcccaggtccccccgccacttccctcctcctgctccagcctgcctttcctgcacagcttctggctgcttctaggcactggaggaggaattcatcaggggctgacaagtggcaaatgacattagctgccaactatatttttttaaatgtgaacacaaccggggtaatgtcttattcccttctccctgtttccagtccctgtgcctaacaatagtgcctgaatcctggtaggcacatggtatttcgaattcctccgcggtgggcatttgtcattttcggctatctctcgttcctttcctcttcttctgttatcaaatgcctttcttttcttttgaggagccactcccttccttcaatttatgtggttctggggattaaaggagctaattctgtcaaattcttaaaataccgccttaattaatattagctatcattatagctaatatatcattacagctaatattacattatagtatagttaatgaaacacccatgacacaggataccataaataaagaaattttgagagtgtatgaagggccttttataactaaaaagataacaattattttaaagaattaaataagcataagagttggaagataaaattaagaacatctcagaggaagtagaaccgaaagacgaagatacagaacacagagatacatacatatgtttaatttgagcatcagttcaagatgtccagtattttcagaatcctcaaaaaaaaatagaagagggattacagaggaaagaaaattatcaaagaaaaaataaaagaaaaaattccgggtttgaaaaatattatttttcgtatcaaaagatgtcctttctaacccagtgctgagaacaaaaaagtgaaaaaagcagtcaaatcaggatgtatcatcatcacattttaaaagaaggggggaaagagaaaatgtttcaatgctttaaaagagagaaacagcagatcatgtacaaagcattggaaatcagtatgacattggatttttccacagtaatgttagaaactagaagacactataacagtgagttaaaaattctgactactaataatttccagattagaattctatcctcattcaaactatcgatcaagtataaaggggagcctagattttttcttcaaatttgcaagttttcagaaagctgttgcacaatttattacaccaaaatgaaggagtaaactaaaagacagaaataataacttttcttttttaaaacttggcattttattattattattatactttaagttctgggttacatttgcagaatgtacagttttgttacataggtatacatgtgccctggttgtttgctgcacccatcaacccttcactttcattaggtatttctcctaatgttatccctcccctagccccccaccccccagcaggcctccatgtgtgatgttcccctccctgtgtccatgtgttctcattgttcaactcccgcatgagtgagaacatgtagtgtttggttttctgatcttgtgatagtttgctgagaatgatggtttccagcttcatccatgcccctgcaaaggacatgaactcatccttttttatggctgcatagtattccatggtgtatatgtgccacattttcttaatgcagtctatcattgatggacatttgggttggttccaagtctttgctatagaaataataagttttctaaagaggggattcaagcagagagaagaggcaaagataataatcagaaatcattttgaagagaagcccctagatgacagctgggaagtaggcctagagggcaactaaccagattagagaaggaagatggagagattagagatagaaataaagggttcctagcaaagcagtggaactaataaccagtagaataacaaatgtatttgtctgtgggaaaaagtgttaaaagggtttctagtgttctgtggagactctgaagtaatttatccataggaaactaaacagatttcaaaatgaggcaactctcaactccaggaaaagcataaagttatagaactaagaaaagatagtcaaaatatacaccttgactcaatagtgcacttaaatgtactgagtcatttaatgaacaagttatattgtaaacatggaatgttcatttaactatatttgagatgtaaatttattggacgggttggggagcaaagtggtgttggtggtgctattcctgctgcttttccttttttagcgctaaattctcatttactgtaaaaaaacctaatttctaaattaagaaatatatgcagtcatatgaatatattatctataaacctaactaagtgtatagaagaaatagcaagaagttgtaaaatttttattgtgcctggagcaggacttgggaaggttgggaacatgggaggttgctttttgtcagaagatttgtaatataatttaaaaatctttagaactaattatgtgtattattttgttaataaaaatgaattttaaaataggtaaatgacatgaagagagtgttcccagacacaaatgcaagtgaaaaaatgctcaatctgagtcaaaattagaaaaatatgaattatacttaaaatgtgatatgttaaacacattaggttgaaaaaattttaaagtttgataatataatcagggacggtatgggtaaacagtattttaaattttggaagtgtattgatacaaactctctgagtaaaaattaacactgtttgtcaaaatacgctttcatttagcatttctacaatgaagaatttatcctacagatattttctcatgtgtaaacagagatatattgcagtaagaatatttattatgactgggcacagtggctcatgcctgtaatcccagcactttgggaggctgaggagggtggatcacttgaggacaggagttcgagaccagcctggccaacatggcaaaaccccgtctctactaaaaatacaaaaaatagctgggtgtggtgacgcatgcctgtaatcccagccacttgggagcctgggtcaggggagaatttcttgaactcaggaagcggaggttgcagtgagccgagatcgcgccactgcactcaagcctggatgaaaagggtgaaactccatctcaaaaaaaaaaaaaaaaaaagaaagaaaagaaaaaaaacaggcgtggtggctttcgtctgtaatcccacctgtaatcccaggactttgggaggctgaggcaagtggatcacttgaggtcaggagtttgagacaagcttgaccaacatggtgaaaccctgtctgtatcaaaaataaaaaattagccgggtgttgtggcaggcgcctgtaatcccagctactcgggaggctgaggcaggagaattgcttgaacccaggaggcagaagctgcagtgagccgagatcatgccactgcactccagcctgggtgatagagcgagactctgtcttaaaacaaacaaacaaacaaagtaaatttaaaaaattgttataacactttttttgataagaaaaagaatcaagcaatatgttactgatcacatgtcattgatacctccatgtaacttcttcaatcagcagtcactaagtgttcgttgcgtgtcaggcactattctaggctttggaaataaagcaataaacaaaactaagtcatcaccctcatggaacttacattctcatgggtggagagaaacaataaataaacaaataggtcaagcgatacaaaatgctacagaaaaaaatgaattaaaagtagaaagaaggtggtgggagatggcagctattttacgagagtggttaaggatggcctttctcatcagggaagactggagcaaagatctggaggacgtgggaatggagaaagctgcattccatgaagaggaagcagcaagagccaaaggctcaaggcaggagtgtgtgtaaaatacaagataataatatgcagatacttaaaaaagaatgaggcagatctgatatggaatgatcttgaacatatatccttaataaaaatatgggggaagaatagtattctgccatttatggagagagaaaggtagagacagagaaagacaaatgagtgcttatatgcgtgcataggtagaacatctccgaaaagatgaacaagaaactggcaatagtgatgtcctttgaatattggacctggaaagggcattgagaggagcatattaagttggtgcaaatgtaattgcaccagccacaattatgtttgcaccaacctaatatttatttatttatttattttgagacagagtcttgctctgtcacccaggctggagtgcagtggcatgatctcagctcactgcaacctccacctcccaggctcaagcgatcttcccaccttgggctccgagtagctgggaccataggcgcgagccactatgcctggctgatttttgtgtgttggtagaggtagagatggggatttatcatgtttcccaggctggtctcaaactcctgagctcaagttatccacctgcctcggcctcccaaagtgctaggattacagacgtgagccaccgtgcccggccaacaccaacctaatactttaaatgtaatattttgactttgatttttttacagggtgcaggtgtttgctattttttagaacatacctatttgaaaaaatggttaacgttaggagagaggaagaaactatgcctcctttcaactggtttatacatttaggatttttttagtttggcaagaggcattgaaatgtctagcaaatttcattcttctctgttcataggcaaataataagtttcgaaaaattcaggataggaactacatgggattagaggccacccaggacaatgaatgcagatttcaagctctcctgatatggtttctccactccattccccatggtcaggttggcagttaatgttgggtggtgagatgctaggaaataatctccattttgcatcttataaaatagctgtggtaactcttctctctggccaggtgatccctgtcttaacttttgttaccttgaggacttcaggggccatggttattggaataagtagaagtattcagcatatggcatgagaatctggctatggtaggtttccaataccactgtggatataagaagagcaatggtatccatttttctctaccaagagccaggaagcaatggtactctggacctcaggctacagcaaacatctttcagggtggggagacagcaaccttgaagctttaaggacaagaagtccataggttatgtctggcaagagcgttttcttccgtgaaggaaaatgaagagaagttcaattccaaccttttcccaaacagccatgatctgctagacacaaacacaaagatttgatttttaaattaatatttaaatacatttggcatgaattcattctttttataaaaagtttgagggtaaatccatccaaattaaaaatgtcttctctgtgaaggaccccattaagaggatgcaaagaccagctccaaactgggagaaaatatttgaaaaccactatctggtaaagaagtagtatctgtaatccataaagaatgctccaaactcaaaagtaaaaacaagcaaacaattcaatcagaaaatgagcaaaagacaggaagagacagtttaccaaagaagatatgcatgaaaaagaagcacaggtaaagatgagaaatgtgaattaaaataacaatgcgatatcactacatgcctatcagaatcgttaaaataaaaagtagtggcaacaccaaatgttagcaaggatgcagacattaataaattcataagtttcagatgggaatgtaaaatggtacagccactctggaaaacagtttggtgttttttacagaaaattaaacctgcaagaatcagcaattgtattcttgggcatatctgccagagaaattgaaatggacattcacacaaaaatctttacaggaatgcttatagcagctttattcatagtagccccaaacggaagcaatctagatgcccttcaagggggaaatgcttaaacaaactgtggtatatccataccatgaaatagtactcagcaaagaaaaggaacaaactgtggtatatccataccatgaaatagtactcagcaaagaaaaggaacaaactgtggtatatccataccatgaaatagtactcagcaaagaaaaggaacaaactgtggtatagccataccatgaaatagtactcagcaaagaaaaggaacaaactgtggtatatccataccatgaaatagtactcagcaaagaaaaggaacaaactgtggtatatccataccatgaaatagtactcagcaaagaaaaggaacaaactgtggtatatccataccatgaaatagtactcagcaaagaaaaggaacaaactgtggtatatccataccatgaaatactactcagcaatgaaaaggaacaaactactggtacacataacaacttggatgaatctcaaaggaattatgctgagtgaaaaaaggcaatccaaaaatgccacatacaatatgactccactaatatccttgaaatgacaaaattagatgagtggtggctagggattaaggatagggacagggcaagagggaagtgtgtgtgagtaagaaaggacaccataaggaatcctgtggcaatgaaacccttctgtactgtgacggtgcccatggatatatgaacctacacataataaaagtgcatagagctaaatagacacacacaaatgagtacaagtaaaatgggaaatctgaagatcagtagattatattaatgtcaatatcctgattatgatattatactataattttgcataatgttatcattaggagaaactggataaagggagcacaggatctttctgtattatttcttacagatgttaaaaattaaaagctgaaatcccaatggtttccatctgtagtcataggatctcctccacctcaccctggaagtgtccacttactttaatgcgagttctatgctgggagaagaaatggccctttgaattcagacaagtctggattcaaattctgattccaccactcagtagccttgagggagtaacttaatttctctgcctagcttcctcttcataaaacaggatccaataatagtacttagcttgttccaagaatctaataaattaatacatatcagtttcttagaagtgtgtctggcacgtactaaattctcgatattatttttattatacacgtatctttgaaaacgtgtagcatgattttctttgatgtggattgttgtttgttttatacaaacgatgttatgcttctatatcagtctgttatttgctttttcctttctgcagcaatatgttttagattcctttccatgtcagtaaatatcaaactgtctcattttaattgttattgtaatgtttaattactttgtaattgctgcatagtattccatggtatggttatatttaaatttatttaccatttccctactgatggatatctagtttgtttctaatgttttactatctaaattcatatgcgtgtctctctgggctacatatgagaaatagaatagctaattgactgaatacggctttaacactttcagatgatatgttgagagtcagtgctatctataaacgattctgtgccttcccctccagcaataatttaaggaatcttcttgccacttaaaataaatcattgatgtgtaattcacatattataaaattcatccatttctgtacatttacatagaatttgcaaccagcaccatgacttactttgttatgggttgaactgtggtatcccaaaaaatgtatgttggagccctaattcctagtacctccaaatgtgacctcatttggaaatagaattgttgtaaacagaattcaatttaagatgaagtcatactagagtagggtggacctgacatccaatataacttgtgttcttatcagaagagggaaatttggactcagagacagacagggagaacatcatatgaaaatgggggcagtgactggattcatgttgctgcaagccgagtgatgcctacagctactggaagctgaaaggaacaaggaagcttcctcccctagaggatttttttttttttttcttgagacggaatctctcactctgccaccaggctggagagcagtggtgccatctcagctcactgcaaccctcgcctcctgggttcaaacgattctcctgtctcagactcccaagtagctgggattacaggcacgtgccaccacgcctggctaatttttgtatttttagtagagacaatgtttcaccatgttggccaggatggtcttgatctcctgacctggtgatctgcccgcctcggcctcccaaagtgctgggattacaggcgtgagccaccacacctggcctgcattattctttatggtgcattttcactgatgaaaatgactcgctaactatggtccgttacacccttagtctcagtagttctccaccattggagtgaaactcaattatgaaattttcttggagggtgaaaatcccctcctagaaaaaaaaaagacatgtatctcctggatctccacactacgaaatttcactgacagtgttagaatactgagagccgtgaagcctcttctacaagccttggtatttccatgctcatggggaggtcagtagtacctgagacagcccattccatcctgggagctctatatcctacaaggtaattcctgcaggttgaaatccaggttctggtggcttccacttattcatcctgtggattgagatgtggaacagaagaaaaaggaaggatcaatcccaagagtcaaataggattctatagaaacgtgaatgggaatgattttcatgcctctagcaaactctcagaagggggaaatagtgcagtgggaaatcccagaatttggggaatttttttttttttttttttaagacagagtctcactctgttgcctgggctggagtgcagtggctcaatctcggctcactgcaacctccacctcccaagttcaagcaattctcctgcctcagcttcctgagtagctgggactacaggcatccaccaccatgcccagctaatttttgtatttttagtagagacaggttttcaccatgttggccgggctaccttgacctcaagtgatccacccatctcggcctcccaaagtgctgggattacagacatgagccactgtgcctggccagcagaatttggacagtcttttgtttgaaaatcctggttctatcatatgctaactctctggctttcagggcttattggtagcctttctgagcctaagtctcttttgtctgtaaaattgaaaaatctggcacatcgtagatgttctatcctcaatggttttagatggaagggaaaacctcatgtgaacaaaagaaaggacctcattctagaggagatggaaaagaggtggaggggaggaaatttccacgtctagtagcattcttccaaatgagatgatcaagtctttaatacagagaacctttgtaaaaaattttatagacattattttttggagtagttaggggctcagagcaaaactgagtagaaggtatagagttcccatataccctctgtcctatacacgcatagcctcccctgtcattaacatcccccaccagagcggcacgtctgctacaattgatgaacctacattgacacatccctgcattccaagtccagggttcacttttggtgttgtacattctgagggtttggaccaatgtataatgatgtgtatttaccatgatagtatcatacagagtagcttcactgccctaaaaatcctctgtcctccacttattcatccctccctcctgctatcctctggcaacccctgagctgtttaccctctctgtagttttacctttcccagaattgtcattgagttgggatcatacagagtgtagccttttcagattggcttctttcacttagccatatgcatttaagggccgtgtctctttatggcttgataactcatttctttttagttctagatagtaatctattgttcatggtaaaagtggaaagcagttcactatgtacatgtgtatcaaaatattatgctgtacatcttaaatatatacatttaaaaaagaaaacatttcattgtctggatgtaccacagtttattgattcacctactgaaggatatagatattttattgaattaaattagggctccattttacagcccagggatcatagcatggaatcagcaggtggcagcattccagatcacttggaactcaaacaggtcctctgattaacctaggctcacaatgatgtactccaaaggataggtcttaggtctctaaagtcccaaaacccactgcattaagaggttaaagaaataaaactgatttgctgtggaggctgcgattgtcctggaaaatcacaatgcaatatctccactggctataatcactgaggaattccttctgcccctaaagggttggcactcttgcgtaggatgggtgctcttgcaagatctaatcctggaaatgctctccattctccattcttttttccacttacttctaaggacaatactgggttaggcacctggcttaaaggagtctttgaagatcccaactgacaagtgcaaaatatacgacttgaaaagaaaatcagaatgctttgccttggtttgctgaagtgtgaagtacatagaacttaaatactatgtgggttttttctaacctttttttttttttctgtaactgagccaaaaaccaaaagggattttttctctctctctttttataagataccaggtgcaccagaagcaagcatgcattttctaaaaccagtgaaccatgacatcagaagattcttaagtcacgccagaaccaaacctgcatttcatctaatctctgatctaaattaggcctcagacatgcaattgttttacccagttgcaatccaacatgaagtgtgtttgttgggcctgtctatctcggctcagttgtgttgtggtccagttctgtctcactggttctctgcatctgggtggctggctgtctttgtccctctgtgtttctatactttgtctctctgctttttgctttcagtctctctgttattccgcctgtgatctttctcactctgctgctgcccttttctgaagtgctttcaacactaagtcacgtttaagagcacgtttaagatttcaagcttaggcttgaaatcacctcctgcctctttcttcagtctcatctgtcaacatgcttagaagggtatgtggcttgtaacaagcatgttacagtcattcactattatgattccccacatttgtgtagcacttttccaggtagtttctgagatcagcacgctgggtgacaccacaaaatggaaagaaaggctttgggagaaagaagatttcatgggctgatgaaaagaaatacttaggtgacttctcttggctgtgtgtgtcttctcatatctttcacaagaggcagtctgagatatctcaggcaactgcagggtatgcatgtggcatatcttgattttcgtaacactttggctgctgaatctccattccaaccatggcaatctgtgaaagcaagaatattgaggagaaaagagtaaagaaaaggggagacaacatgagagagaacaggagtggagaaagaggatgagaattaaagagagggtagaaaagagttgataagagtgacagtaagaggaagagaaggcaagagatagagtgacattcactgaaaccataaagcagtgtgtcctgctgaatagagtaagtgagatcaacatgaacccttggaaaaaagatgctatagcccacattattgctccttacattaaattgtactaaatataagtctattatctgcttaacttagtcttggtataattcactgtgctgctgtaggcctcagtttccatctgaggtcttgcctttgtaagcaaaactgtagctctgtacagcagagatttagctccttcacaactgaaaaaaggctaaagaaagggaaaacaaggcacttggtgttacagagttagagagaagagatactgaagtattatacttggaagcagcaaacaaaaatcagtccccaacgaatctatgccgtgccatctgcagtcaatatgcattattacagttacacagatggctgggttcggggggagttccaagccagtggttctagaccttagcagtgcactgtgatcacctgagagcttaaaaaacatctcagtgtccaggttccaccctagatcaattaaagggtggaatccaggaatcaatatttttggaggcccccaggtgactccattgtgcagctaaggttgcagacctctgatcttggataaccctgggagccaagcaacaaagtttttgaactctgtaacctgactgcaggtaaagtagctcaataaatgactgtacctgttgggtaataacggtggcaattcagggactgtcagaggactatgaaaagtccatctgtttggaatgatgcagatttaatcaaatgatattcttcaaaagtgactacctcattctcagacatttggtttgccccgagtgtctgatggtcccggtttgctggtatctgtttatagccatctgctgccagtgattgtggaggtgaggaacaacgtgttgccagctgaggtgtgcagcagggcagctttcctacctggttttttcctgggaggaaaggtatcttcacccctgggagtaaaggtacctcgaacatcctaaatacacctgttatggattagttgtgtcttcctaatattcttatgttgaagtcttaactcccagtgccttagaatgtgattgttttggaaatagactctttggagctgtgattagttaagataaggccctactggagtgtgatgacttgacagctcccttctttttagttctagataacaatctatttttcatggtaaaagtggaaagcattccattatgtacatgtatattaaaacattatattgtacaccttaaatatatacatttaaaaaagaaaacatgtttcattgtctggatgtaccacagtttattgattcacctactgaaggatgtagaccttttactgaattcagttggggctccattttacagcccagggactacagcatggaatcagcaggtggcggcattacagatcacttagaggtcaaacagtccctctgattaacctaggctcacaatgatgtactccaaagcataggtcttaggtctctaaagtcccaacacccactgcgttaagaggttaaagaaataaaaccgatttgctgtggaggctgcgatatgactggtgtcatataaaatggggaaatttgtacacagaaatatgcacacacggagaacactgtgtgaagataaaggcagagaccatctgcttctattaatataaaccaaggagcaccaaagactgcctgcaaagcacgagaagctaaggcagaggcctggaagggattctcttactcacagccttagaagaaaccaattttgttgacaccttgattttggccctccagagctgtgagatgataaatgtctggcttttaagcgaaacaggtcgtggtaccttgttacagcagcccttggaaactaatacaacgccccaggatgggagaacaaattctgcccactgatgggaaccaaatggaggctttcaggcctgggggaaggtgtgccctgaaccaatcagctggccccattccaaacctgcttcaaactgatcacacagatgtttgctcctgataccctcgtgctcactgtatccactgttgggggattgaaataccccaagcagggccagctccacgggtgtgtgacctgtgcagtcacacagggcccactcctattttaattctctggtgttgccatcttgaaattcttaatttttgaacaagagcccagcattttcactttgcactgggccccccaaaattgtgtggccattcctttccccaaatgtctcaccaactttccctctttcgatcagatcccatctactttgtctgaatttcttattgtgtctgatccactgatgtcacccccttcttgctttcagtgatatttttgtagaagtttcctttttaatactattgtttctgttatttgtagggatttggggcaggagggaatggcagacgggcactgtgtcagccatctaaattgaataacccaaagccaacaggactcttatgctcattaggttgttagtcctatcagggacgttggctagagaatggaggagaagtttataaaagactgtgtgagccttggcttaggtagtacagctctgggactctgatgaccatgagtaactgagagtctggagggagtgatacactgcttaggacccttgaaggcttgaaggtggctggctgtctctgtgtcatactggcatggtgttttgctaatctgatcattttattcacagctccccttgaaatcctggcataggtttctattattcctgggatgctctgacaagttgggtcattgttcccattctttcctctttccctgaattagaaatatgcactcacactctttgccacggtgctctacgtcacgtcccactgtgggcaacgtgaccttcccaccccattgacactgggttagccatgtgacttgccttggcggatggaacttgaatgggattgtcaatgtgccagttcccagctgaggctgtaagaagcattacgcatttccactcaccttcttgcatttctaccatctgccatgagaaaaacacaccccacgtagaaactagtccagagagaatgaggagacagtcccaatgcccagcctggattcaaacctagcagattccagctaaacccagaagagatacagcccctctacaaacccataagcagcgttaatgtccttgtttacagaggccagtgagtttgagaggtctttgctatgcagaattattgctgccaaagctgactgatgaagaaataatgtgatttctttaggtgggctttcatgtccttttctggtctggacctttctatttgctcagtcttatctcctaccccccaccctcttctttgtccattctacactcagttcagatgttctatgttctctctcagctttgagccaataacacattctcttcctccatccctgccctactcaggatcctttgacttggctttctcgttctcactctctagctctcggtctaagtgtcacttctaccagtaaatcttccttaaggcacagtaggaaacactaatggccctgcaatgtactctctttgtgccgtgttcttccacaccatagcacttaggacagtattgtgtcactgctaatatggtgggggaaatatattgagatatttatttgtatttaattgctgtagaagaatcaggacgaatgagaggcagcaatgctttgctttttatactctgcccctcacttgcacacaaacgaatcccaaggagtccatagggcccctcccttcctctgccactgtcattttaaagcaaaagcagtatctggggtgtgtgtgtgtgtgtgtgtgtgtgtgtgtgtgtgtgtgtggctgtttgtgtgtgtgcatgtgtagggggttggtttatcttatgaaatcctaagaaattctagtgaaatcccagaaggggaatgatgaggaagaatgtggctttgcagtctggctatgaaatgttcctccagaatgagtgtggacagaggttggcaggtttcatgaatatgcagacctgtgctcgccataagaatttggagggctggtgcaccttcgaggagctgagtcccaatttctgggctcttgggtatcaagaatgcctgttgccacatgtcatggaaacaacagctcaaatgaacttcaggaaccgtgcagacttggactatacagtgctcaacagaaactggggtagaccaaagaaaggttgccaatctaatgacttaaaacagcaccaacttattatctcatgatagcccatagggcaagagtctatgcacagcataagtcctctgctcaaggtctcatatggctgaaattgaggtttcctttctgcaaagtccgacattaagggactgagccctaatagtgtctgagactgaatggcttgacatgcagagatgccaggctggcaatggaacttaactaggtctacacacataaatggcattgctatttcttatatcatctcatttagcttttaaatgtatgtctattatactttaatgttctgtctttcctggtagaccataagctcttgcaaggtgggctgtttctgtcttgcttattgttgtgcctccagaacctaagacagttcttggaacattgtagcgagggagtcgataaatatttgtcaaatgagtgcttgacttttaggtgcttgatatgcacttattgaactaaatggaaccagttctcataaacgccatgtgatctgtgcagagtgggtatcactacagctgtttcaaagaggaagaaccaggtttggggagtttaggtaacgtgttcagggtcacttcaaaggtaggagcagagctagatctttttcattatattcagaaaaaaaattaatctctttttatttgaaacacggccctgaaatgtaacactatgacacattctaagtcgtatgactcatacttttcatcttctgtgatcaagagagggggaagatgtaatgaattagaagcgtttataagatgtgattttatgttgaggcctcagatactaacattgcatagaatctcaaactctacagtacctgaatcttccaaatggatgagtctcctcttaatagaaacacaaactaaatcaatcggccggatgcaatggctcacgcctgtaatcccagcattttgggaggccgaggccggcggatcacttgaggtcaggagtttgagaccagcctggccaacatggcgaaaccccatctctactaaaaatacacaaattaactgggcagggtggtgtgcacttgtaattccagctactgaggaggctgaggcacgagaatcacttgaactcaggaggtggaggttgcagtgaactgagattatgccatggtgagacagtgtcctccactagccaactccccgaccctcaaccagaaatcaatattaagggctcatggcataacctggtttctctcagacagactagacccaaatcctctttcaggtttctgttgcctaaatagagtggttgttcagtgagcagaaatctggcatgtggattgtattccttattaatcatgtaagcacaccatgaattcttgcttcagggcttttgcacgtactgggatgcttgtttgaaaggctcttccctttcttgtgactccatccttctcattcttcacttcttgatgtaaacatcagtcctcaaggagtctttcctgaaagggtgtctgggggcaccctccctccccatgagtccccatcactgcacaccatttatactacttttcataatttgcaattacagctgacccttgaacagcatgagtttaaactgcacagatccacatatatgtggattttcttccacccctgccacccctgagacagtgagaccaactcctcctcctcctgcttatactcctcaacatgaagacaatgaggacgaagacctttatgatgatccacttccacttattaaacagtaaatgtatttactcttccttatgattttcctaataacattttattttctccagcttaaattaactgtaagaatacagtatataatgcatataacataaaacatatgtgttaatcgactgtctacgtaatcagtaagtctgctaattaatagtagtgaaatgggaaaagttcccttatccccctggcagggcttgtaatgggggtgtggctcgcttctttggtgccctgctgctgaaacccctagggggagcatgcagacaggtccgctgtggggctgtgacccacagtgtctaggtgtgaatgtttacagctcctgaagcccaagtgggcatgtgttacagtgtttttggtttgtttgtttgtttgttagtttgtttttaggcagagtctcgctctgctgcccgccccgctggggtgcagtacagtagtgcaatcttggcttactgcaatcttcacctcctgggttcaagcgattctcctgcctcagcctcctgagtaactggaattacaggtgcacgccaccacacctggctaatttttgtgttttttagtagagacgaggtttcaccatgttggccaggatggtcttgatctcttgaactcatgatctgcccaccttggcctcccaaagtgctgggattacaggcatgagccactgtgcccggccacagtgtgctcttctagtttagccatccacaggcagattgtgttaaccagctcaattagacccctgctttatcacaaagacagagggctttctgtatcccagggtttcttgccttggtgtaccggaagaatgggaggacatataggcttggagaatgagtgcaaggtttaattgagtggaagtagctctcagcagagcggggagccagaagggagatggagtgggaaggtggtttttccctggagtcaggcctcttagcagcccatgtgctcctctgactgccctggccaaactccaggaggatccgacagtcgatgacctgctgtggcatctgtcggtgtgctcttttgcagatgtgttcccctagactagtccagccgcttgtgtctctgcctactagggtcttgggtttttatattcacaggatgggggcgtggtggcccagggtgttcttgggaaatgcaacatttgggcaggaaaacagaaatacccatcctcaccttgtctgtgggcacaaacccgggggtggagccctggccaaggaccacacccttcccttcccagcacttcccggtcccccttctgtatcagtaagctgttagtttttaagtttttggggagccaattttgactgcacagggagttgatactcctaacccccgatgttgttcaagggtcagctgtatataggaatttgtttatttacttattcgtcttccacttgatctcatgcttcacaagggtagctaccaatgtggtttattcaccattttttttttttttttgacacagattcttgctctttagcccaggctagagtgaagtggcatgatcttggctcactgcaacctccgccccccaccccacctccggttcgagcgattctcctgccttagcctcctgagtagctggaattacaagcacctgccaccacgtccggctaattttttgtatttttagtagagacagagtttcaccacattggccaggctggtcttgaactcctgacctcaggtgatccacacgcctttgcctcccaaaatgctaggattacaggtgtaagccaccactcccggccttattcaccaatcttaactcaactctaacacagtacctggactaaaacaatcatcaattatttgttaaatgaatcatgaatgaattaatgaatggagttcattgggtcattcagcaaatatcaattgagtgccagttatacgcattagaacctagaaatacagatagggcgtggtggttcacacctgtaatctcaacactttaggaggctgaggcaggggaatgcctgagctcaggagtttgggaccagcctggcaatatcttgaaaccctgtgtccaccaaaaatacaaaaaattagccaggcttggtggtgcgtacctgtggtcccagctacttgggacactgaggtgggaggatgacttaaacccaggaggcagatgcagtgggctgaggtcacaccactgcactccagcctgaatgatagagtgagaccccatctcaattaaaaaaaaaaaagaagctagaaagacaaaattatgtaagacctgggtccttccttctaagtgttcacagtttagtcctgaaacaaaccatatattcaagctaaataaatggccaaggttttacctgatttaaccacaaatggagccaaattaacacaacacttaaattgtagtggttctttgttctaccacagaactacatgaacttactgtcccccaagatctctctcagttatttttgtgagtccccagggatgcttctcctgtgcttcaagaccggtccactcatgttctcgtcaccccttctagccatgctgccacattgctcctggcactattgctttctgttctttccatgggtccgtggctttcttgcatttcattgggcacaggaagctcctgcttcttcaccgctgcttatcccaggccagctaaatgtggctatggtcttccagcacagaaatgagaagggtgcctgcgtgtatctgacttgcctggggatctggttacaattcagtttctgattcagtaggtctggagtgggtcctgagaatctgcatttctcataagcttccaggtgatgcaattttgctgtcccatggaccacattctgagtagcatgaatgtagaagatacttgtagtgggaacagtaaatgctcagtccattttggctgttatgatgtttacacctggaaggtgcctagcacaggggttgccattttgccaatgctttcaagcgtatcaggtgctctcagtaccctgcctatccatctcagaactcatctctacaagtaaaagctttaactgtgagtacttattacttttacagtccatggaaacattgttggccctcacgtgaagcaggttagaaatactggagattaaatgcttcctagagcaaccttcaacccacagtggacaggaaactggggaataaatgtcccatttctcttgcctctccggtagaaccattctgaggcatgcgttctagacaggctcccagtgtgacccagaaaatgaaggcccagctactggcattagtaactttcttgatagcaccctgctaatttactttattctcttccctgtctctcttccctctgttccaacacacacacacacacacacatatttcctagaactacttagcaagtaaactctttgcatctgaatctttacctctgggtctgcttcccaaaggtttctttcaaggccaaatcgtcttaccataaaatcactgttttttgcagaagaccaagtgtcatcctgtaagccacgtccagacaatgcccaccatgtctaacaggagggcttcagccacagctccccttaccttcccagtgacatcatatcaaatcaggaagacagttgctgccagggtccccacaatgttgtctcgatcagaggacaagtggatgattcattccaataaccctgactccatgtctgaacaaatcagtctgtctgcttctagtttatgcggacaaccagttgttggatcacattgacccccaataagccaggtgctgcaggacacagcttaggaggccctaaatgtcagctgcacagagcagggaggaagcttcttccttatggacactaacttctttcaactccatggaagaaagaaactttgagaaccaaataaagaaagcatgggtgaaccctggcattatgaatgaaattgctccagacaaatctaaacaacctctcctagcaggtgagctggtgattctccagcttaagcatgcatcctgggcccttagggagtgtgctggaatgcatttttccaagcccacccacagactctgatcccaccttgggaaagtgctataagttgtgagagtgagatgaccatcccacagaatctcccaaggattaaatagaatttgttgagtgcctatgtgccagaaactcttcaaagctctttacctccattcacttctttgatttttgtgacaaccttttcagttaggtacagttattcagccttatttttacagatgagaaagccaaggcacagataagctaaggaacttccctgaagccacacatccaggcacactggaggagccaggatttaaactgccagtctgactccagagccacgcccttcccactatgatagaactgaggctgagcaaggcccacgcatattactttcattctctagaaagaccctgctatgggctaaatgtctgtgttcccccagtgtttgcatagtgaaggcctaaccccccagtgggactgtatttgaacatatggtctgtgaggaagtgataaagattaaacaagtcataagcatggggccctaatcctttagggttggtgcccttataagaagagaaagagacactacagctttctattccccccgtatgaggacttagctagagggaggccatctacaagacaggaagagggaccttaccagtgaccaaattgtctggcatctggatcttggaattcccagcctctatatattagtcaggtgtattagtatgttttcatactgctatggagaaatgcctgagactgggtaatatataaagaaaaagaggtttaatggactcaccgtcccgcatggctggggaggcctcataatcatggcagagggccaggagaagcaaaggtggcaggcaagagagcctgtgccagggaactgccctttataaaaccatcagatctcatgagactcatcccatatcacgagaacagcatgggaaaaacctgcccccattactcaattacctcccatcgggttcctcccatggcatgtggggattataggagctacaattcaagatgagatttgggtgtgggcacagccaaaccatataatcagtgttctccagagaaatgaaatcaataggatatacatagatatagaaaagggaatttatgatgggaattggctcacgtgattatggagtttgagaagtcccacaacatgctgtctgcaagttggagaaccaggaagccttggagtgcaattcagtctgagttcgaatgcttgagaaccaggtgagccaatggtaaatttccctgtctgagacctaaggcctgagaactggggaggccactggtgtaagtccaagggtacaaagtttcaacaactcagagttctgatgcacaagggtaggacaagaaggacatttctgtgccagaagagagtgaattcacccttcctccgcttttttgttctacttgggcccttcgtggattggatgatgtcacctacattggagagggtggtcttttttttttttttttttttgagacagagtctcactctgtcacccaggctagagtgcagaggcacaatctcagctcactgtaaccacctcccgggttgaagcaattctcctgcctcagcctccccagtagctgggattgcaggcacaggccgccacgcccggctattttttgtatttttagtagagatggggtttcaccatcacaccccgctagacgaacccaggaataatgttttaccagctatctgggtttttcttggcacagtcaagttgacgtatcaaattaaccatcacattccagaactgttacaaaataaatttctgggctgggtgcagtggctcacgccagtcattccagcactttgggaggccaaggcgggcaggtcacaatgtcaggagattgagaccatcctggctaacacagtcaaaccccgtctctactaaaagtacaaaaaattagctaggtgtggtggcgtgcgcctgtagtcccggttactcaggaggctgaggcaggagaatcacttgaggttgcagtaagccgagatcgtgccactgcactccagcctgggggacagagtgagactccgtctcaaaaacacaaaaaaaaaaaaaccaaagaaatttctgttgtttaagtcacctagtttgttgcattttaccataaatgactgagaagactaatacggacccacagtgttccatgaggatttcttgattccattatcaacacttgcctgccctatgtctatttcctcagatccctgctgcatgatcagaaataaactagaaataaatttgaacagccttttaggacctaatttttaaatagctcttttattcctgattgtagtcataaattgagttcagagcagcatttttagcatgcagtatatctttgtggaatgaatgaatggatggatgattggatgaatgagtgactctgcaggatcaggagtgaggagctatcccctgcagaatgcacttcaagtagcaaccatgctaatcccatgtggaatgttatccctaatctctattgggtttgacaccttcaaaacacagtgctggaaatggagatagtaattcaaaagcagcactgaatcacagtattagagggtgcagcaaagagtcatcacacttatgcctccacaaggagggaaacacattattaacattaaatcatcttctgagtaggttgtgtaaggatctgaggacagagtgacgcctttctaattcagggtctgaaatggcactcttgaaaagatggatggagaaatgacaaatgcaattttgtagatgagcgttttggtaccagctggctatggattcttgggcaagtcactttacctgcattggcctcagtttcctcccctggaaaggaaggggaataaacatggtgggtcttctgatgtttgggtgggtcctctgatgtttctgtgaccctatcaagtcagagtttgatgtttcttctctaaaaacacaagatatggcaagagcaaataaccaaaaggcacgtcttgtaaatggtagaatcgtgattcgaactcaggctctgcttaccctaagctcatgtcaggaactttcctctattattttgttatttctctattattttaattatgtgatcccccaccacctaaaattcccttcttcactcaacaataacaacaatgacgtatctagggtatctgtatgtagccaggcactttgctgagcgtaggaataaaatagacagcttctatgctatcacagagattacagtctagttgaggagttacatgttaatctaataagcatgaaaagaaatacgaaaatgaaacaatgagaattttgaaagttttcaatgctttgaagtcatatattagagaaatttgtcctcatcggggaagtaaatctctgaggaagggaagcctgagtgaagaggtaaaagataagtagatgttaactaggccaagagagaagggaaggtaattccaggcagagatacagcacatgcaaaggccctgtggtagaaagtatatggtgagtttatgggacgaaggctacaggtggccagagcacagagaatgggagggaggacatgttatgagatgaagctgcagagatgggtagggatatagggactgcatccttgtgagctatgctaggtattttatatcctgacacaaatagaaaatcactgaaagagattctgtaattgtctttagggatgactctcaaacatccattctatctcaagtggccagcctaagccaatgatgttaaagcctttttctgttataagtaactagttagaaatggacatgtgatccagcaatggacattaagacacgagagagcatcttctagggggcttttaaggtaggtttccatgttcttaagagggacatcctgaaagagatagtctacttgtccctctggacacagtcatagatgtgatgcctgggacttctgaatccattcaaacgttacctcctagttatcctaaggcaggtggaagacactgcgtcccttcagcttccacggtggatggtggttacctggaattaccctgtcatggagaagacacacattgggcaaagggtcttgcccctcagagaaaatatagggatggctatagtgtagcaaaagtagacaaatctttattatcctataattggttcatttgtcaataattgcaatgaaatctggatttaatcttctagtcaattccgaatatgttattttcatggtgcaaaagaaacccagtcctagtgaaaggaagcagaccccttcatgcccttaattacatgggaccacagggtaggaggcagccttgggaaatcagatgtggaagtgtttccaaagcattctgtgcagtgtgcactcacccagaagatagaaagatgctccctggaaatcagccgctctgcaagagattttctgacagaaggaaccccagaactggaagacatttgtttgttagtttcttcaacatttattttaggtttggggtgatatgcgcaggtttattacctaggtatattgcatgatgctgaggttttgggtacagttgatcctatcacccaggcactaagcatagtaaccaagagttagtttttcagcccttgtccacttccttctcactgtagtagtccctagtgtctgttggtgtcagctttatgtccatgagtacctaatgttttgctcttacttataagcaagaacatgtggtatttggttttctgttcctgttttaatgcacttaggataatggcctccagcttcatccatgttgctccaaagaacatgattttattcttttttatggctgtgtagtattctttggtgtatacataccacatattctttatctggtataacactgataggcatctagattgattccatgtctttgctattgaatataggccttggcaaagaaatcatgacaaaaaaaaaaaaaagcaattgcaacaaaacaaaaaatagacaagtggaacctaattaaactaaagaaaaagaaattttctacacagcagaaggaataatcaacagaataaacgacaacctacagaatgggagaaagtatttgcaaactctgcatccaacagcgtctttttaacagctgcccagatgtgccactccttgactttttgcaaaaattcaccaaaagttgtgcattttccaagcatctttggacaataagaagaggcagagagtaggaaaccaagacattatggaggcttgtgagtataatcttgttagtgctttgtagaaaatcagatagctcacactctgtctctaaaatcctttaattaaccaagaatcagtgccaatgttactcttaactttcctgtcttctcaaccccttttttggttctgaacccaggttcatgttatttgcctggctacctggaatagattcccattttcagtatgactttggggtcctctctagaatgttaatccctaagaaatgtgctctctagactcaggtccagggcatcctctttttacctgctcctgtagaacattctcttccgctttctactgtcttgtactccttcttcaagagcacttgactatgccctcagacttctacaacttatgagtatgcaccagaaacacgaccctgcgggttgggaaggctgtcacatagtgtaaggcattagttgggtttgggagtcaaacacattaggattttctgacctcatcactttctaggtgtgtgactttgggtatatcattttagatcactaagccttcacatgttcatgtacaaaaaggagaccacaggtcgggtgcggtggctcatgcctgtaatcccagcactttgggaggctgaggcgggcagatcatctgaggtcgggaattctagaccagcctgaccaacatagagaaaccccatctctactaaaaatacaaaattagctgggtgtggtggcgcgtgtctgtaatcacagctacttgggaggctgaggcagaagaatcgcttgaatctgggaggcagaggttgcagtgagctgagatcgtgccattgcatgccagcctgggcaacaagagtgaaactctgtctcacaaaaaaaaaaaaaaaaaaaaaaaaaaagaccatgacttgggctgctctagtctattcaaactaccacaacaagctaccatagactgggtggcttatcaacaatggaaatttatttctcaccattctggaggccaagaagtcctagatcaaggtgcaggcaggttcaaggtcagttgtgggtctgcttcctgatttgtagatggcttccctctggctgtatcctcatgtggcagagagagacagcgctggtctctctcctgcttcttataaggatgctttgtgcattcacgtggtggaagaggcaagggatctctttagggcctctttttaagggcggtaatctcactcatgggggctctattctcatgacctaataaccccaaaaggcctcacctccaaataccatcacactggccattaggatttaacatatctattttgagggggacacaagtgttcagtttatagcaatgatgctgtcatgaacactgttggtttcctaaccaataaccattccttcttttttgacagtagagtgtttcattcagatattcagggtaatgtgtcctgtctaaggggatgaatttgtattgctacattgatcataataatcctctacccatttatcaacaactgctttaggttaggccatatgaccatttctgaactagagatttaaagggaccgtggaggggaggttttcctccctgatgaaaaaaagaaacttgagaagaggaagcacatcttactttcttcataattgtagatattattgtgtaattcagtgatgtttggtgctacagcaaccttcttacaaccatgaggagaaagcaaagaaaaccacagagaagccatgtagagatctagatgtcttacagatctagagatagatgtcttattatatgagagagttaactcaacatgtgcacatggtcagggttctggatggcttctctgtgatttttcccattctgtaggttgtctctttactctgttgataatttcttttgctgtgcagaagctctttagcagaagctctttagggtttcttagatgtctacctaagacatctctagatagaagtcttatatgaggaagaaaaatctctattgtttaagccatttttacacacttgtggggtatgaaggttatattatgttgtagacactttttaagtaaaagaacacaaaattaaaatataaaagttgatataaaaatgaatatttacttagaataaaaaggaaagaaagccacagcaggttacaaatattaaaagctgataaatgccaaacatcataaagcatttttaaataccagtttttattaataattgactaataaaataaacaccttatcctttttattcaggcaggatggtctgtcttcatatgacaataattttgtagtattatttctatagagagaataaaaaataattttttctagcataactgataaaaatttaatattattatcaatgactcagaaaactttctctcagcttcacaattcattgttgttaatgctgtataaatttttatgattgccatcaaacttaggaaaagctctaatgagcttgtttcatatatgagttgtatactttagaagaatttcccacacacagcctaacttttgccttcatacatttcaaacctgttttctcctctgtacgtacatttctacagttcccattgcaataccacccccagtcctgctgttgatatcaagataccaagtgagtaagcagagtggtggcagaagtattcctagaagtcatccctgtaatacagacaggagacagggaaatactgggtagaagagggccgtttcccggcaaaggccccaccctcaagcctggatacccatggccttaagagagaacaggtattcttgttttcatgtccaaaaagttgtcttttggcctgccacaccccactatcctgtacccgtataaaccctgaaccccaggctccggaagcaggagatgaccagatgaggagacaagcagacaagtggtagaatggtatgacaggaaaagacgaagagaaggaatatctgaacactgagaggagtttggctgggggtagtcggagaggagttcggccgctagatggccaaactccaggggaagatcatcttcccactccatcccccttccagttccccatccattccgctgacagccacttccaccactcagtaaaacccctgcattcatccttcaagtctttgtgtgacccaatttttccaggacactggacaagagcttggggtacagaaagctatcacactggccctctgtccttgcagaaaggtggagggtccactgagctggttaacacttaagccatctgcagacagcaaggctaaaagagcccagtgtaacacttgcccacttgggctcctgcacctgtccctctgcatgctccacctcctgtaacggatttgagcagtggtggtgaccccacgcccctgtcacacatcctgtgatggggatcagggaactctccagtctcagctacacaagggcagcttatagtgacttaactatacatggaaataattgagaatcacataaacttatctcaccaaccctattcctaatgtattgtcttagctggatctcaaaatgcccccagcctctgcagcaccaactatcaggagggaatgtgtaacaagagagaagttcaggtggaaagaattagcagccatataccattgcagttaagatattttacttttgcaaactttcaaaaaatatgcgaacatgtaaacaccttgctagggcttcagaaagggtttgtttacctgaaggggccccaaaacttaaactttgcagtaaatacatcttctctgatcataggcatgttgtgagaatgggatgaatacataatgtaagtaaactgcttagcgcagtgtcccgcatataacaagccttgaaatatggtggcaatgattatatttttagtagtattagtagcatggaagatgggatctcccatagaactttccttttttctcctgaatatgttttcattgctgcaagcaaagcagtgaaacaagtctttgacccacagttttctattctgggtgaacaaagctttgaagttgatttttagtatgaaatttgttcaggataggtctttagtcttgaggagttaaacattctcatgcctgaaaatgttgaatatctctataattgcagtgatgaggacatcaaagtgacatctttccaatcaatagttttattattatgctttaaatttacaggcatctttgccctaaaatcggcgtgttatatttagtcaccatcaccaagagacatctgcccaatgaggcaacagttcttttcataaatgatacgtcatgtatttatttcagcagctaagcaccttctggcacaacaaacagccacctttggaaacaaagatgtcattttgggtggcttaacagatatgggttgtctaaaattaaagacggtgctaattaactggaacacagaattagaacctacagtttcgaaaatatgccaaaaacaaaaaaaaagtgtttgccagaaactttaacactggagagctaagttggctctttcaaggacgctaaattgattataagaattatataacattgggagatctcaataaacaaagcctgtcaggttgtgcctgaattagatcacttgtttgctcaaagagctggtgtttaaagtaaattccctttcactgataaaaattatgaatacacctagtgaaaaggatactatctgtgggagggagacggaaattgaccatagcctgatttgtatgtaactgacaattttttttctgtcaaatacaccttaattcaaaagaagcaattgtcattaatatcattaaatctaaaaccagaatgagttgcttggagtgttaaaaaaatattaggagaagctggtagagtactgggtataggtaccagagttcttctaggtgattcatactaatggaattgaatgaaaagggcaagatttgaaagtctagatacatgggttttcatcccatatccgtccctgattcactggatgattttagccaatctcctaacttgatgtggctggtaaggacaacgatgtttccttcctccttaagtgagataatgaatagtggaacactttgaaagctagacagcactacataaaagaaaaaatgggaatggcagttgagcatgatgattaggagcccaaattttgtgtgaatcaaaactagactctgcaagaagctctgccactatccaggtgtgtggtcctgggcagagtaatgaacttctcttctttaacttctcttcaacagttgtagcaatggccatatgcaataatacatgttaatttgttcacctgtgtgtatcagaagcacaggataattatgacttaaacacaaagaagatggactagcagttcatctaaaggctagcagtccaggccgggagggcctgtctgctgcatggggtcattcagtgatccaggatccttcttgctgttgctctgccatcctgagcctgttgttttcattttcatcggcaaggatgccttggcagtatctctgaattccaagcagcagaataaatgaagatgaggtaaggagaatcaggatatagcccttttctttaaggatacactctgtaagttacacaagacacttctgctcatatttcattggttggaacgtagagagatggctgcctgtgtctccaagacacacaagctttattctaggaggccagagcccagataaaactcaggggttatttgctaccagaaagaggaagaaaatttacaggaaggatgctgaagtaggtccatcacagcatccaaaactcttagcacacatgagggtcaataaattttagctattaccatctacaatagtcagcaggtgtgaaaaaatttttcagagggggatgatcccagttcatctctgccatgtctggcctggtacaccaaattctttacctttctgagtagtctcaccctaaacacacacaaggcctattctcgaatgtaagtacagaaagggacacgtttctgagatccacatgtggattacatcaaatcattttctgggttctcaactgcaaagtgtctcattctctgctcaatgagaaatgatatccaacctggggaatgtttccagactgtccacagatgctaaaatatttgagccctgtgaggggtcagcaccacatgagttacatgggctgggagtagggagggctgatttccccgatgaaaatagggatgttagagacagaggaaggaatgctagtgcttagtgtgaacaaacaacagatgttcataccatctcttcaattctctttctttcttctctattccttcccctttcctacgttctttctcccttccttccctcccctccttctctcactttctttccctaataaccactgtgcaagacacatagatgaacctcttgtggttcctgacttcgggcagctctcagattcaaaaaggaggccgggcatgatggctcacacctataatctcagcactttgggagtctgaggcagactgattgcttgagcccgggagtttgagaccagcctggccaacatggcaaaaccccatctctactataatacaaaaaattagctgggtgtggtggcacacactggtagttccaggtacttgggatgctgaggtaggaggatcactttagcccgggaggcagaggttgcagtgagcaacaaacacaccactgtactcagtccgggcgacagagaaagaccctgtccccctaaccaaaaaaacaaacaaataaacaaacaaaacaaaaaggagaaagacaattaaataacaaactccagtaaaatgtgatatgctttggaaatgcatacacaaataaataaataaataaataaaggaatgaatgaatgaatgaatgaataaaatggtataacagaattacacaaagtactctaagtgaacagaaaaagaagggattaactcacctagatcagatgaaaactcggggaacttttcacaaaggaaatatttaatctgactctgaaggatgaggaggagtttataacattttccaacaaaaagagaccctcataaaaccaccattagggtcttcgaattttcacatggaacttggagaaaaattctatgatcaaatatcagtgaatttgagtagacacagcctgtcactaaatttaaccttctgtaagtcattcgtctactcttgtcatcagtttttatcttttgtaagataagcagatggggctatttatgaagctccttcctgctcttaaaaacaaggaatttccatttgaaaggatgaagacccatgggttgtacagtgaatggaagggtctttgatgctgagattctaggtaaatttgcagtgttggccaggcgcagtggctcacgcctgcaatcccaacactttgggaggccgaggtgggcagattacatgaggtcaagagttcaagaccagcgtggccgatatggtgaaaccctgtctctactaaaaatacaaaaattaggcgggcgtggtggtgggtgcctgtaatcccagctgctcagggaggctgacacaggaaaattgctagaacctggaaggcgaaggtttgcggtgagctgagattgtgccattgtactacagcctgggtgacagaggaagacttcatctcaaaaaaaaaaaaaaaaaaaaaaaaaaaagacatgttgttgttgctttggagagttgagtatatatattgggagaaactggtttaccagatatgtgaatcagctagttgctattgtggacactaaggaaaagaagtaatgagacttctaagttaaacgtgggtcagtttattccattgactaaactcatcctgcaaccgtagcaatggctggaaccaatgtcaactgcagagccaacaggaaattcctgtaaccagattaattttttcccaaatcccaccacttgaggttcatcttgttaagtccttctgatggtcttttccccatgagttgaattttgctttttcatggttgggaaatcacacttggccaacaaatgagatggagttaggtgtactaaaatatgtatacagtttaaaattatcaccaggttctttttttacttcttaatttagtaaacaggaggaaaacaaaccctatgccacccctctgtgttgtaatcttgtattgaaaagtcctgttgtgaaagcagcatgacccattaagccctgaagttcaaaccacaaaaattactaccttgacctaatgattacaatttgttattggtgctcagctccagcagatgagtaagttctagcacacagggagaaaatggacttgaaaacaggatggagtaggagttcacaaatgcccacacagcattcctggaaacaagggctttgaattccctggggatattattggcctcattttaaaagacaaggaatgaggctcagagaagtaaaaagactggctatgtcatatagctaggaagcggacatgtaggggctcaaaacaaatttttgttaattaccatgttcgttcgttctttctttctttcttctttctttctttcttttttttttttcagacagagtgttgccctcttgcccaggctggagtgcagtggcgcgatcttgggtcattgcaacctctgcctcccgggttcaagcgattctccctagtagctgggattacaggtttgcgccaccacgtctggctaattttttgtatttttagtagagacagggtttcaccatgttagccaggctggtctcaaactcttgaccttaggtgatccacctgccttggcctcccaaagtgctgggattacaggcgtgagccactgtgcctggccaggaacaagatttatagacagcaaaaggacagcaatgtacagaaaatggaagtgaagtacagaaacaactggattggctatagctcactgtttgccttatttgaacacaattcgaactgttggatacatctgattggccaaaactcaggattgccacaggtatgggctacaatcgatttacacctccacttgttatagttcatgatgtacagaaaaacctttaggctgaacttaaatatgtaaggaggcagctttaggctaaacttgatttaacactggatgaagaaaatgtggtacatatacaccgtggaatactatgcagctataaaaaagaatatcgtgtgctttgcagaaacatggatggagctggaggccatgatccttagcaaactaacacagggacaaaaaaccaaataccacatgttctcacttttaagtgggagctaaatgatgagaacacatggacacatggaggggaacagcacacactgggccttattggagggaggaaggtgggaggagggagaagatcaggaaaaataagtaataggggtattagacttaatacctgggtgatgaaataatctgtacaacaaactcccattacataagtttacctatataaccaacctgcacacatactcctgaacttaaaggttaaatacgaataaaataaaacctaaatcacatgacaaaaaggaatgaaatgatgtggagctctgtttatgagcctaagattgtgctaatatctagaaaacagaatggattatccagaaagatttggatagctatggatatgattattttactgaattatttcactaatatacaaatctaaagatttgatttaattgaaaatccagtaacctaaccttctttcgttaaaaaaaaaaaagtcactttgatttgcttacaagagtaaatattgtatgaaacgaaaaaaagagtacatactggaagattatatttatatgaaattcaaaaacaggtaaaaactaatctttggtgttagatgtcagaatagcagttacccttgggaagtagtgactagaacaggagataagtgaggtgctttcgtggcattggtgatgctcttttacttgttctgggccaggatatatgactgtgattggtttgtgaaaattcaccaagctatactcataacctatgcaccgttctgtaggtatattctacatgaaaaaaaacctcaaaaagtaaaaaataaaattcacacaaagttaagaaacaagctagctgaaggcttatagaaagagttataaatgataacagtagtaggtgacatttaccattggcttacttagaacctggtaagtttatgcagtaattaatttaattccttcaacatcacaaagtatacacaattgttaccccattcttagaagggaaacaaggctcaaaatcttaattatcttacccctgaccatataacacataagcactagagtacatattcaaacaggagcagcccacctccagtttaaccatcatatgtcattttaaccatcatatgacaccagttctccaacactgggaggatgtgagacacccaagggtacttagattcacaagtttattcctgtggaaaccacttagaaacccaagaaattggttagccaggcacaatggggcccacctgtagtcctagctacttgagaagctaaggcaggaggattgcttgaatccaggagttcgaggctgcactgagcgatggtaacaccactgcactccagcctgggtgaccttgtctctgaaaaagaagaaagagaaagaaaggaagaaagaaagaaagaaaggaaggaaggaaggaaggaaggaaggaagggaaggaaggaaggaagggaaggaaggaaggaaggaagggaaggaatgaaggaaggaagagaaagaaagaaagagagggaagaagggagggagggaaatgaaggaagaaggaagagcaagaaagaaagaaaggcagagaaagaaaaaggaagaaataataaaacctaagaaatttgaataaatttcttaaaattacctctggaagaaaacaaaatgtttaaataaaaactcagtgttcactgagatggagaaagtctgtttataacaatttaaggagccacacagaaaatcacaagggctataacttcctgcttgccgaaggcaccttttggatgaattgctgcttatatcactgcatggcaactggagaagacgtggattgatgcagtcgttctcaggaagttagaggactattaacatcagcacgggattcatgatgatgtgttgaagggtggttggcacccgcaaaaggaaaggtgatatgtttcatattttatgatatgttttgtcactcgagggaatttagaagtggaggcacttgatagtgaaaatggaagccaactttctctttttgtcacttgcgttatttgggatgttttgagttggaaaaaaaaaaataagcagagactgaatctgtccactaaaggagaagggagaactgggttggagccaagaaatgggcagagtgagaagcaaggctgggaaccagatatttgctcagtttatttgcttcctctctcttgttagctattgagttttcattacagtgtactcacttctttcttcaagtcttcactgtcagtgtcttgcaaactgctgaacaccactggatccctcattcctaaagcagaagtggcttgactgaatgtcatcgtagtgggaatcacacacattgggcagaccccaccattggaggctacctcagcagatatcgtctgcaaagacagcctgtgcctggatgatgagatctatccctgctcaaggaacagctcactgtagcttccctaagtggagacaatgggcaggttaatgccaacgggcagagaagaagggcatggtggtgaccctatcaacatgctcgaatgctggcatcaaacagaggatgcttgaagctttggtgtggtgaagctggtggaactttttgaaatctcttgggaaggtttatgccaatgataccctacctaaaccccatctcacattttcttggttgaaaccatgagcctattttcttcttccctccttttcttctttaaatccttcctttattacttcctttgctccttcattcaacagacacctgtcatgttttggaggggaggcctagcctgaaagaagctagattatgtttatctctgagaatatgacttgtgtaggcatctcaggtttgtcagtacagtggttgacctacatgtatttattagcaggatctttgaagaaaaaaaaaaagaggtgctccaattgtttattgctaagtatcaaaacagccccaaacttagtggcatgaaagaatggcattttaatatgcctatgattctatggatcaggaatttgaaagcccatgtccatgttccacaatgtctagggtaatgaaggctggagatggttggaatggctcacctggggctgtatatctggcgcctccattcttcaccatgtggcatctgctgaaaccgcatatgcaagagaactacttcactcatatgcatggtgtgtgggctgaagtggctggaacacttggggtctgactggcactgcttctcctccgtatgaccacatggacttccccccagtatggcggtcttatgttactcaacccagagactcctgcccaggcccatggagagagcagaagctgctggagctctgatgatgtggggcaaactgggatgttctgtggcccagatggcaaagcagcaaagagatggcatgattttattcacctcctgcatgaattcacagttacacaatgtggctctagcaccataaggactataagtaataatctaaccttgagaacacagaagatagcatgctggtgtgattgcactgataccctcagccagctcaggcagaataaacaacacgggctagcagtgcaggacaagaacagcacattgcaccttccttagtgaccacagctaatagcctgattaatgaggcacaggtgaaacaaccttggggcattcccagaaataaagtggggacatcctaaaggggctggaggttctatgtaagtagttgaagaaaactttagtaaaatgtggatatttaatcttatataaacccacgtgtatgaactggtttgtgaagatgcaaattacactttacaaaacttttagttcaagctttgtatttaatgacctcaccctccagggtttagtatctaattggaaaaataaaattaatatacattaaataatggcgtaagacaatgtaacagctgtcaccagggagccctgaataaatgactcaaacattaagttttatagggataagctccaagaaagaagacattctgagagatggaaagaacagcgggcctcctggaagctggaaatttgatctgtgctttggaaggtggtgcaattaagttaggcagacaatgaaatctcaaaactagaaatatttttgaaagacttttggctttgtgggactaatctttcctttaatatctaaataaaacaactcataagaacaactattttttcctaagcatttttagtttttaaaccttagcctttgttagcgtgtgatgtctagaactctggagtttgaagacatgtgggaagtctagatgtggttataagagaggattaaaaaatcaaaagtagaggaggtaatttagagtggctgtttacttacgtctcttcctgaacttgaagaccagggttggccagatagtaagtactttttgacattgtgggtcacacaatttttatagcaactactcaactctgttgttgtagccaggagcaatcataaacaaggcataaacaaataagcatggctataactgtgttccaataaaactttatttacaaagccaggtggcaggctggatttggcccatgaaccatatagcttgctgacctccactctagatgttcaatttattccatcaatgtttagtgaaatctacactgcgttaatcactgtgaataagaacatgggataaaagttgtttgctcaagctgggcacagtggctcatggctataatcccagcactttgggaggccaaggcaggcagatcacctgaagtcagtagttcaagaccaggctggccaacatggcgaaaccccgtctctactaaaaatacagaaattagccaggtgtggtggtgggcacctgtaatcccagctactctggatgctgaggcagaagaattgcttgaatctggagcggggaggttgccctgagcggagatcgcaccactgcactccagcctgggcaacagagtgagaatctgtttcaaaaaaaaaaaaaaaaaaaaaaaaaaaaggttttttgctcagcaggcgtttactgtaggctgattgtgtgcttggtgctgtgccagtcaagtgaaatctaatattgaacagataaatatgatcctcccctcacagaaagcttccagcctaggagtaaaaagcctggagatggggatggaagctatcacaggatctaacccagtcttgggagatgaagaaaccagaaatgtctttcctgaggaagggatgttcagtctgagattggaagaagcttgttcttagcacagacaggttataaaagtgggggatggggggtaaggaaaggcaagagtaatgttccatatagaagaaacacccatttcaaagcacagaagggagggtgtctttctttaaagaaacagaaaaattcattatggctgaggcagcctgattaatgaagccagaatgagacaacccttcaacccaagatggaattggagggctgactgggagcccaccaacatccccagaaacgcacaaatgcccctgaccctcagcatgtgcacatttcttctgcagtgtcagggcatttaataatcagccttgtttaggaacagctgagattctgcagatgacaaacactatgaaatcctctcacgtagacattgattccactcaagagatgatggtattacagctgctcccagcgaaacagctagattttgcttcaggggaaagcagtgatccaacttggactcttcacacataccatgcaaggaaaaagtccatttccacatcattttcaatactaattaaactggcaccaattaatgcaaacccagggagcatttgaagtgatccttggccctttcccttcaataaaaatatgcagttggctgaaaatcttcatccctcaggccaggtaagagaggatctgctgcattcagatgtcctagagacagtgccatttcttctctgtgttattactgacaagtactttctgcattccatataattccaatataccatccttgggctctgtattaatccgttttcatactgctgataaagacatacccaagactaggaagaaaaagaggtgtaattggacttacatttccacatggctgaggagtcctcagaatcatggcaggaggtgaaaggcacttcttacatggctgtggcaagagaaaatgaggaaaatgcaaaagcggaaacccctgataaaaccatcagatctcgtgagacttattcactaccacgagaacagtatgggggaaaccacccccatgattcaaattatgtcccactggatccttcccacaacatgtgggaattacgggagctacaattcaaaatgatatttacgtagagacacagagccaaaccatatcagtctctaattaactaagatgcaaacttcatccaatagaacaaagtaaacactcagtaaattttaatttatgtcattttgttgtacataaaagaacccaatacaatatttgacacacagtaagtatcaacaaatattagtcctcttccccttcttccaggccattctagtcttcaactctcacatgaaatctcataaaacctcttatgtgccgtattttcccaaacgaatcccaggttggggtaaatgcttccagccacactaaaagaaatgtctgatcagcaggatgtggaggagatgctaactccctggtgacgagcacaggaaatgcccatgtggtgatctaagccctttgtggggctcttttctgcctgcatcctctaatataaatggttggttttgcagaaccagctttgaatgcatatacccaatcactacacaagtggagctggtcagcttttcttgcctctgtggccacaggagagagcactctcaaaaacacaggtcacctccaaggaccaacccactcgtaaaatacgggctgatgtctgatggcaaatgctccccatggagccagcacagaggttcagtgaggctccaaggatgtaacaggcttccaggctaaagcacaaagtagcaaatatgttcctgtccttgctacaagtgtcaggatttttttttaaaaagttatttttgaataccttcaacattcaaaagctatttattaatgccatcaacattcacatagcctggagaaaactacattggcactgactgatataagacaattgggttaggctgggcgtggtggctcatgcctgcaatcccagtgctttcagagggtgaggcaggtggatcacttgaggtcaggtgttcaagaccagcccggccaacatggcgaaaccccatctctaccaaaaatacaaaaattagctgggcatggtggtgcatgcctatagtcctagctacttgggaggctgaggcaggagcattgcttgaacctgagaggcggaggttgcagtgagctgagatcactccactgcattccagcctgggtgaaagagtgagactctgtctcaaaacaaacaaacaaaaacaaagaaacaaacaaacaaaaaccaccaccaccaacaacaacaaacaattgggttaaaaagttacatctgaatgttgatcctgtaattttcatgaccttgtgagtgatcttagtgagattcagtccccaactttgtgtctccatttcttcatctttctgatgacagtcttattgcacgtgagagctaagattcctcctaactctaaaatgaaaggttcctgttgtatctttggagaaaggaggaaagagacctggactcaaagttacagaacttggattcctatcctaattttaccactaatcaggtgcatggtcttgcacaaataatttagtgtctctaagaatccagctgccttaccttaaaatgagaggaaggagcttgatcagctttaagttttatgagtcagtgacttgaagatggtattgatctgggcatcttctctgaacagtggcatccaggagccccagaggtcagatatctgaatgtttgcctgagaagagtgaaggcttcaatattccaggcagtacagaaattgtctacttactttgtagagaaaccaccagcctctggccatctgacatctgccttgtatttaccctggagattgttttctttatttttgttttattacaaaagggagataagttcaaaggaagagaaaagcaagaagaagaaataacccctgtaatctaccttatcccccaaagttaccaagagttcaatttcattttataacctctgtacctgttttcagtatctccgagagagatccatcgtttatccaaatcatccctaagttctttggctttcggggactaatctttctttaatatccaaataaaacaactcatttcccctgtattatttttctattgctgcataacaaattatcgtacattttggagctgataacaacacccactcacagttctatatgtctgtgtgcatggcatccctgggtgctctgctcaggtcttacaaggctaaaatagaggtgtcagtaaggctgtgttccaacctgtagtctctggagataaatccacttccaaactcattcagactgttgaattcagttctttgcaactgtaggactgaggtcctgtttcctttctagctgtcaaccaaaggctgctctcagctccaagaggccacctgcatccttgccacattttgccatcaccccattatcaagccaacaaggacgcattgagttctcttcattcttctactatctttatgtcaggaagagctctgtcccttttaaggactcatctgattaggtcaagtccacccaggtaatatctcttttgatgaatttgaaggcaattgatttgtaaccaaaccatagaagccatatccaatcccattcactggccccacacagtcccaagagaggggattctatacagtatgtacaggaagggcaggaattgtggagggtctcttagaattttcctaactcacgccaattctgcattactgcaggaaatccagtcctctcctgaatatctcactaggaagtaatctgttacagtgctccgcattgagctgggctcaaaaagcaactgataaatgaatcaaagtgctcctgaatgtaatgaccttgtggccagcccctctcatttgctactccaatgttgcccacttcttggccacttctggccttatcatcacattccaggcttctctgcctgtctcttctgctccaaacccctaggcatcagccctccaaggcaacactagcagaaggtcaatgcctgactgcagtaagattgggagaggaaaaggccaatgaaggccatcacaaaacagggaaaaatgaaatcatgcgaaactgggtaccaggcatcactactccttaagtccaaatcatatcccgtcagaagtcccttactggtagtctctcaccttagatgagagctcagaaaacttttataaatatgttagattttgcaagccataatgtctctgttgcagctatttaactttcacctgtaatgcaaaagcagtcatatatgatatgtaaacaaatcggcatggctatgtctcggttaaaatttatttataaaataaagcgtagaccagaatcagcctttgattgcttctggcttagaccctggctgctttaaggctttggcctattctcccagaatggagtcttcaggtatctttgtttctttaccctcctggatgaaggaaactcttgtcccaggccaggagaggaaagtgaaatcatcataacatccaaataaactcttcattcaaagagaaccactccatatatataccatggaatactacacagccataaaaagaatgatatcatggcctttgcagcaacatagttgcagctggaggccattatcctaagcgaatgaatgcagaaaaagaaaatccaataccacatgttcccgcttataggtgggagctaaacaattggtatacatgggcataaagatggaaacaatagacattggttacttcaaaagcagggaggggctgcgtgcggtggctcacacctgtaatcccaacactttgggaggccaaggtgggcagatggcttgaggtctgagaccagccttgccaacatggcaaaaccccatctctcctaaaaatacaaaaattatccaggcatggtggcacgtttctgtagtcctggctactcagaaggctgaggcaagagaattgcttgaacccaggaggtgtagattgcagtgagctgagattgcacacctgcactccagcctgggggacagagtgagacttcgtctcaaacaaaaacaaaaactaaaacaaacataaataagcaaaagcagggagggaagaatgggggtaagggctgcaaagcaacttactgggtactatgttcattgtttgggtgaggggttttctagaagcctcagcattatgcaatacactcgtgaaacaaacctgcacatgtaacctcgatctaaaataaagtaaaaataaatacctttttaaagagaaagaaccactcattcacatgaacataaaaaagagttttaacttcctgttgtcctgaactttgtcattatggattttgcactaccttggaaaaactcatttgagagtcgttgttatttgcttgtttgtttcttcctagagaagatccccaagccacaggaagaccccagagtaactctgatactgtagttgttattgtggctttgcctgatcctgcaagcctagatggagttcttgggggctgcccaaggtcaagtacttgtgctttgcttcctatcagtcattctgtagggtaagctaacgaacaggaaacagacaacacagaacagttatcttcccctttctgagcccactctgaaggtccctgcttgccttcttctttttccttccttttgtaataggaacttcacagttcaaaggcttctgcggagagtttggcagaaaatgtagtttaagctgcaacttgctgtaatcataatagctgccgtttattgggagcttactacacgtcaggatccttgcgaagtgttttatatgtgttatctcatttaattctcacaacaattttatgagatcggccccattcctttttccattttatgcacagaaaactgcagtgtcaagaggttaatcagcttccctaggtacacggagccagaaagtggtggagtctattcagaatgcagatctctctcactccaaaaggagttctcccaaacatgacaccaaagagcgtctgcatctgggagatagagcccccactgggaggcactgtctgtgtacctttcccctgccatcagggtgatggaagtttatggcccacctcatagagggcgccacagagaatcttgacattctttttagaccaaggccacttaataaagtacttctattgatcgttcgaagtaaataagttcaagacaggctagagggcttaatttcagacagaacaatacattaagaggaagcaaaggccacatggctaacttaataaagcttcttcacttagggcatctttcagaccacatcaaaaaataacactgaaattgaatggctgtacataaataagtcagaattgacatcatcctcacctcgcagtgtggtttatgaatggcgttgacagtaattaaacacttctcagctgcaagtatcaccaagcattctatttacattatcatacttaattttcacaataattctctgcattagtcaggacagtctaggctatgctgcagtaacaggcaacccccaaatcctggaggcttaaaatcggaaaggtttatttctcactcatgccgattgtctactacagtcagctggggagtttgctgctctgggaccaggctagcagaatattctggaatgttttatcaggaactttcctaattggtatctgaaacattgttggctggcattgcaagaggggaaagggagctctggagagcatatgacttcatcaattaaatgctaagcttaaaatgtcacatgttgcttttgtacaaactcatcagccagagtcacacgtcaaagagaaagaaataaaatatttgctctaaggcaaatgtcatccttatcctgccttttataaaagaggaaagagaagctaaggcgcttatccaaggttatgcagctagatgaatggttgaggcaagatttgactttctgacttgactcttcaccctctctgttacagatggaagtgtaaacaggtttctacagtataaaagaagattaaaacgcaacagcattttaaacaaaaattaaagctcaaaagaactgtagggaatgaacaattctaattgggaggtgaaagatttaaaaaagaaaaaaacaaagccttgtggaagacatgtggcttgagttgaatgatgaaagacaggaaggacattccaggaaaaagtagagggaagtggaggcatagagagggaagaacagaggataagttgggacatgaatgacagtgtggctggagagagagagggaacttgagagaaagagatgagtagagacagagcaggaaatgaggcaaaaagtggactggcaacagacaacaggttttattctcctagctgtaaggagaggcaaacagggtattattccagaataactgaaacccacaactagaaaatgcactgaaacacaaacccactcaataatgggtcaaaagccttatcttctatagaatcacagtagtcctagagttctacagagtgcttggcacattgcagatgtttgataaatatttagagcgcattgaatgatttccagaagtgtatatgaggtttagagtttgctccgaggacaaaacagaaagaactacgaaaaatctaagcataaaggaagccctgcaaagaattttctaggttgaatttgtcactgaagacacagaacatcaacatactggcaaacatccaagccaataagaagatgcaaactgtgtggtcaaggtttaactagtcttgtgatgaaagggactgccatatgggattgtttttatttgttgtgggtaattttctgtggaagagtatccttctaacctagcataatgaagctgattatttgtgcttagaataactagcaagaaaaacaaagaaagagagagagagagagagaaattcattcaaaaacattggagttaagttacatccttggcagaatttcatcagtggagccctcctgaatggatgaccaaaaagctgtcaagggctggcttgtcaaatacattgaccaagagctcaaaaaaattgggttttatagacacaaactctaagtggagagagaattctgctctgggaaacttggtgatctccaaccttgaagatagtcataaaacctcctgatggatagcttccttgaagtgggtcattcttttcatttcatgcccagatgaattctgcacactaagaagaaacttagaagacctaaacattggataaatagtgctcagggaagagaagttattttattaatgaagggtcttgtctgttgggctgatgatcttggaatatatcctgagactagtggtgaacattccttaaaaggggacactcaaattttattttattgttttattgtttttttttttttgagtcagagtctcactctgttgcccaggttggagtgcagtggtgtgatcactcactacaacctccgcctcccaggttcaagtgattctcctgcctcagcctcctgagtagctgggattacaggtgcatgccaccaggcctgactaatttttgtgttttttagtagagaccgggttttgctatgttgaccaggctgatctcaaactcccagcctcaagttatctgcccgcctcagcctcccaaagtgctgggattacaggcgtgagccaccaaacccagctaaattttagaaagatcactaggcagctgggtggaggatggatgacgggatagttttgcagtggcgatggcactgaaggttgatagcaatagaccaggtgagaaataacaaagatctcaattttagtagtaatgataggaatatagaggagcaaacttatattaatttgctaggtctaccataacaaaataccacaaactgggtggcttaaataagagaaatgtattgtcatacagttttgaaggctagaagtgcaagccaacagagttggttttttctgcgggctgtaagggaaaatgtattccatgcctctctcacagctctctgtggtttgctggcatcccttgtcttctgctgcattaccctgatctctgccttcctcttcacatagtgttttcctgggtgtcttcacatcgtcttccttctttgcatgtctgtccctatgtccaaatttctcctttctataaggacaccagtcatattggattacaggccctccctactccagcatcacttcttcttaactaattatatctgcaaaggctttattccaaataaggtcacactgtgatgacctggagtttaggaattcaacataggaatttgggggttacataactcaaatcatgacaggacctatttcaaaagtatgttggagttatagttaaaatgacttgataactaattgaatgtgcttggttatttatgaattaagacagtttgcagatgatgtatcagcatataaagatgatatttgccgtttaccaaaggataaacaatagcgacaatgtccttgttatgagctaaattgtgtctcccccaaatgtatatgttgaagttctaacccttagtatctcagaatgtgactatattaggagattgagtcttaaaagagataattaaggttaaatgggatccttaatgtaggtcccaatacaacgtgattaatatccttgtaaggaggagaaattagaacactgacacacccagaagaaaggccatgtgaaatcagagggaaaagacaggcatctataagtccaagagaaagaactcagaaaaaaataaccctgctgacaccttgatctcagacgtcttgtctctagaacggtgagaaaacaaatttgtgttgtttcagccacccagtctgtgatactttcttaaggcagcccctaactgatgaatacagtccttaataatctaatgacagtcatttgagtattgtggggaccagtgcaggagacaaaactttggacgcggaaaccatcctgtgtctccatgtaacttgattcttatgtatttagggacaaatttcatgttgccttttggaatctgatgatttgcaaactccggtgggcctgaagcccagaggaagaagcatttataggacactccactgtaacaagtcctagtatcctaaacaccaccaagttgtttgcccctggcacccttacccggtgggttttcagacgtaatgtctgctcgacattacatctgatgaaagaatactttatctttcatcaggagggaaaataagttggatagaaaagaggattagacagaccaggcatggtggtttattcccataatctcagcattttgagagtctaaggtaggaggatcacttgaggccgggagtttgaaagcagcctgggcaatatagccagaacccatctctaaacaaaaaaaaaaaaaattttgttttgattagctgagggtggtggaacatgcctgtagtcccagctacttgggaggtcaaggtgggaggatctcttgagcccaggtgttcgatgctacagtgagctattattgtgtcactgcactccatcctgggcaacagacctagtttctgtttctagaaaaaaaaaaaaagaaagatgtatattttgaaaatggaggttgttgactgttctgacattgctaactactgcagaagcagagaaggtctcctcaggagatatgattgagcagaggctgtttgggaaacctcttcagctagttgagggaaatctcctacacatcctccaagacccatctcagattaccctaactgaggaagcctgcccagataagctgcatggtccaccctaaattcagctccttgaatttgacctcccctcatcccacacacaaaaccttcactgcttaggtgcctttttctccaactaaatggtgagctcttctaaaacagaaactcagttgttcacctttgtagccatggaccccatcatcatgtcttggagtgggcaaatactcagatgggtcgaatagggaaaaaaataactgatggccaaaagcaatttctattgaagttcattacctataaacttccagttaaggaaatttccactgaactcaaatatgtgatgctttcttgcttatatttttcaacatgcaacttatttttatcaaggccttatcaggctaaatggccagcatcaaaacaacagcttgaagcaagaaagggaaaaacaaacaaacatttggtccactgttttcttgtctttttattttttttccaacacaatgcccagtggtccattttgtagtttacacgatttttctcattgatggattaatctgagaatccactgacctcaacagtagcttctggactgactcagctccctgccttctcatagtgagtgcttagacaaacatctgctggagaattaagacctgtaagaaaatatgtatttaatttgaataacaaaataggccgggcaagtggctcacgtctgtaatcccagaactttgggaggctgaggcgggcggatcacctgaggtcaggagttcgagaccagcctggccaacatagagacacctcatctctactaaaaatacaaaaattagccaggcttggtggcacacgcctgcagtcccagctactcaggaggctgaggcaggagaatctcttaagccccggaggcagaggttgcagtgagctgagatcatgccgttgcactggagcctggttgacagagtgggacttcatttcgaaacaaacaaaaaagcttaaataacaaaatgaaaataacctctcttcatgtcatacccagacttgtaaattctgttatgaatttctaggctataatctctgataggtaaaaagtcacccaaccaattgaaaaggctggtaagtccaccctcattcctcttatctgtacacttccaagttcagaagatgtaggatatctgtattctttgtcccttttagcatagatgcctgttccccaggaacactgggcaggtgactatttgcaagcctgtaaataaataaaagttgcaaatctggaatggagggtgagaattactttctaaaaatgacttatggtgatgcgttgagaaagaagagaattggaggccaatgagctgtgaaatgattcaaacggagggtgatattctaaagtattccagagtttgcattctagacaaggctctagagtcatagaaaaaatagttatccacaaaaattgacacaacccaaatttaacagtatattttttagatttctgttagtttgtttttgcttttttttatggcagtcatttcagttcaagtccacaaacaaatattgtggacctactatgttcaaagcacaggagtgaaaggcatataagtgattataatataattttggtatcaagatgttaacagagtagtatgcagccataaaaaagaataagtgcatgtcctttgcagggacatggatgaagctggaggccattatccttagcaaactaacacaggaacaagaaaacaaatactacatgttctcgcttataaatgggagctaaatgatgagaacacatggacacactgaaggtaacaacataccctggggtctatcggagggtggagggtgagaggagggagaggatcaggaaaaataactaatgggtactaggcttaatgcttaggtgatgaaataatctgtacagcaaacccccatgacacaagtttagctaagtaacatacctgcacttgtaaccctgaacttaaaataaaaattttaaaaaatgctatattaaagcttgaaaatgaaaaaaaaaaagacaataaattgtgtttataatagggatagtcatagttacaacttattaatgcttaccatgttcttctagaaaaatcagtagtgcagagtggcaagatgataaacacaggaggcaataagcctccaattaaacttcagatccaccatttaactcacggtgtgactttgagagatttcctcaatctgtctgcatctcagttgctcgtctgtaaatctgaagtaaccaaagtattaaaagagttattgtgaaaatcaaatgggttaatacacataaagtacttagaaaaatgtagttagtgctgtgtgtgttagttataattgctattatctctatgtgcatgagatacatcacatatattgtcttttggggcaaactgctattatccttatttcatgggtgaagaaagaggtcagagagattaatgtgttcaaggatacagagcaagtaatggttaaagcaaggatgcaaatctcaacctgcctctaagattcatgttctcaccaccacatgtcactgcatacaaggtaagaaatattaatataacacaaaaggaaatatgtgaaaaaggaggctttgggtaaaaactctgggaatgcaaggggaaatggatagattcatagaagaggtagcattggaactgagcttggaggaaggatttgtccactgactaacctaccttgtatccccaggataggcagccctggtgtgctttggctttgaccatctattgtctgatttttgtcagcttggtgatattgcttgtgtgtattagtcagggttccctagagggacagaactaataggatagatgtatgtatgaaagacagtttattaaggagtattgactcacacgatcacaaggtgaggtcccataataagccgtctgcaaagctaagtagcaagatacccagtacgagtcccaaaacctcaaaagtagggaagccaacagtgcagccttcagtctgtggtctaagatccaagagtcccaaagctgaagaacctggagtccaatgttcaaaggcaggaagcatccggcacgggagaaagatggaggccagaagacccagccagtctactctttccacattcctctgcctgcttttattctggccatgctggcagctgattagattgtgtccacccagattgagggtaggccttcctttctcagtccactgactcagatgttcatctcctttgacagcacccttgcagatgcacccaggaacaatactttgcatccttcaatccaatcaaattggcgctcaatattaaccatcacactgtgttagacaagctatgttttttttttttttttgagatcgagtttcagtctgtcacccaggctggagtgcagtggcgcgatctcggctcactgcaagctccgcctcccaggttcacaccattctcctgcctcagcctcccgagtagctgggactacaggcgcccgccaccaagcccagctaatttttttgtatttttagtagagatggggtttcaccgtgttagccaggatggtcttaatcttctgacctcgtgatccgcccacctcggcgtcccaaagtgctgggattacaggcatgagccaccgtgccaggcctagaaaagctatgttttatacatagtaagtactcaataattctcattagaatgaagaataaatgaacgaataaatgaataggagaggattggtatttcaggtttttagtggaacttcaattaagcaagtcggtagcattcaaccagcccattagccagtcttctgattacaaagtagttggagcctgttttgtttagaaagagattggtgcttttcagaatgcactgtgagcagagaaagcctttggggcttaattaataatccctgtttaaaatgaaaaatacactaaaactacaaatgtgttgtgtgacaagatttcagccctgtaggtaatctgttcttttttcaaacatactttcctctctatttactgaatccattatgttaattaaggaaaacaccagcttccaggaatatcccaaggatttgtttttgatttttgtagtaaagcctctatcattttaaccatatttattccctgaaaggatagatgtacccattcttagaatcttttttttttttcagtaaatgtaactgagataactatatgtcaggagcacttagaactgcaaagacttcaaagaggttcagcaagaactctccccacaaggaatctgaaatgtggttgaaaagatgagatagatgcacataacaaagttaaataaaacatcaggcaaatgacagtaaactatgtcacaagaaaggacagaaagctgtgtgtgatcaagcccaccttggtggaaaatgacacttgttccagtgggggtttttgtttttataactttacattctttggaatatgactggaaaaggcacttttcaatgagtcagctaatacacaaactatcccaaccctttgaaaattacttctgctgggctcagccttggcaaaaacctgaggggaaaaaaaagagtacatcctacagcctctgatgttatcaagccaggttcattctgcccacacgcagcaagccaatcactgaggtgacaggttttgcaaaagagtgaagatttgattcacaaggctgctgtgctgggagacagaagaacaaatctcaaatcctctccctgaacatagggcttgggggtacttctgggataggaagcaaggtggtctaaagtgtgaggaaatgtgattgtgtggtaggaaaggtgagggaatcaggtttctgtgcaagcataagtgagctgtatggctcttcacaggactcatgtgaagaaaatgatggctttagcataacttgagggtggagttttggacctctgctgtcaaaagtcactgttggggcacccttgtaggcccagttgaagggtcagctatctgaactggcttgaacagaacaagagctgccccctagtgtcagaggtgttagaaccagagtgactccgtcttgaatacagactgggtaaaataaggctgaaacctactgggctgcattcccaggaggttaggcattcttagtcaacaggatgagacaagaggtcaaaagatacaggtcacaaagaccctgctagtaaaaaagggtgtcgtaaagaaaccagccaaaacctaccaaatccaagatggcgactaaaagtggcctctggccattctcactggtcattatatgctaaccataatgcattagcatgctaaaggacaatttcaccagtgccagggaagtttaaaatgccatggcaatgtccataaattaccccatatggcctaaaaagaagaggaaccctcaattccaggaatccctcagccctttcccagaaaactcatcaataatctaccctttgtgtaacatatgatcaagaaataaccacaaaaatagtcaatcagcagctctcaggggctgctctgcctatgacgtagccattcttttattcctttactttcttaataaacttgcttttactttactctgtggactcaccctggattctttcttgcatgagatccaagaagcctctcctgtggtctggattgggatccatttctggtaatactagttcctgaaaaccaactttaggcacctgttactatagtgacacacagtcagagatgttatccccccaggaagctagtgggagttgagtcacgtattgtttggccacgtgatttgctagtgggagtttttaagatcaaccagaagtaaatgattaaaagcaagcaaggcagtgaagtttgacgggcttaatcagggtaacctttggtttcaccaacagttcaaagcaaagtcttaaatgggggcaggcaagagagcatgtgcaggggaactgccctttataaaccgacatctctcatgagacttactcattttcatgagaaaagcacagggaaaccccaccccatgattcagttacctcccaccgggtccctcccatggcacattacgggagctgcaattcaggatgagattcgggtggggacacaaccaaaccacatcgttccagaaaaattagggatctttggttcacaaaaaagattttcaagtttttactcaaaaaaaaatgtcatggaaacatctggggggattggttgccatggttactgtaagatgatatggcttcaaaaaagatggacattaaaaggctcccctcccactctaccctggggagaaaagagatttctgtgatgatgatggttactaattactcagcacttatctattccagcctgaaatctaagcactttaaacatattaatatgcccaaccactcagtaaaaaagacattatcaatattccaattttacggatgaaaaactggaagtggagagaggtgaccccttttgcccgaggctgagcagtcagtaagcagagaagcccggatgagacccagcctggccccagggcccgtgtgtttaccctcttctgtgttacctcccaagccataaacaactcggttactgtgattctactgagaagatcctgatagcttgcaattccctctgctgtgaactcccccactgaattctgggggcccagagcatttctcaagtcattattgatatcagcttttttcccccagatgatccttgactcatggggaaagggatccaaggtcctatcagtgaggacagcaaaaataatcaaaggcttgacaattccaagtggtggatctaagagaaggcaagtctaagttcctagcactttttttttcttttttttttttttttttgagacagagtttcactgtttttgcccaggctggagtgcagtgacgtgatctcagctcactgccacctctgcttcctgggttaaagccattttcccgtctcagcctcccaagtagctgggattacaggcatccgccaccaggcccagctaatttttgtatttttagtagagatgaggtttcaccatgctggccaggctggtctcgaactcctgacctcaggtaatccacccacctcggcctcccaaagtgctgggattacagatgtgagccaccgcacccggcctcagcactttttataccatttcaataactgtgagaatatctgcaaggcattcaccttgtgtgacccttagtttgctcatctggaaagtggcaatgaaatcattttcttaagattctgggaggtttagacgaggttaagtatgcattgggcacataggaggtgctcaaacagtatcagttccccaatacccatcattgtggcgtttgtatcacagagacctaacagcatctacctattttctatctctaacagtagctagcacactcttacatatctagtagtgctttgatagctatttgaacaaatcttaaataatcattttattttgtacataagacattaagctacaaaaataaagaaaaggagagagcatagctgacactttggagagaaaatgtccttacagaaatgtaactgaaaaattagacatatcattgttattcggtatttctcaaaaatgtatgggagtttgctgttgcaaatagggggaaaataatcatttcattatgactactgaaaagttttggcaaactgtgaagactatgtaaccgctggagaagaaccagaagtaagcagtgaaaattcattaaaaggtcagaaaataaaaggcctatgtgaaaaggttaaaaataattgggattagttagcccagaaaggaaaagactaaacggcaacttaattactgtctttattcctttgcaaaatgaggtccgctccatcccagctgtctctgataatgagaaaactagaaaaagtgaccctaaaagaaagcaagggaaacgtaggtcattcttgggacattttacgggagagagcaaacatttaaaatcccgccatttgtgaaaatatggatgcccctagaggacatcatgctaagtgaaatcaaccagacacaggaagacaaatagtgcatgagctcacttacaacttaaaaaaagtcttaaaaaagtcaaactcatagaagcagagagctcacataagagcaagagatggaccctatgtctcctcttttcccctagactgatatcaaaacagtgagtagtttccaggggccagggggagaaggacgtggggagatgttgatcaaagggaacaaactttcaattttaagatgattatgttcccagtctctaaggtacagcatggtggctctgttgtatacttaaaatttgctggaagagtagatcttaagtattctcaccaaacacacacacacacacataactatggaatgagatggatgtgttaattaacttgattgtggtaatcatttcacaacatatacatgtatcaaattgttggttatttaccttaaatatatacaatttttgtttgtctattgtaccctaatacatctggaaggagggaagaggttacctgaagtgattctagaattggatattcaggaaagcctgtctttcagatgtaatggcttggaagggggacctaggggttggtggaagaaaccaaaaatggcacaaaaaaatggcagaaactgaaggcaggagacatggcttctggtgacccttcaagttctcaaatctttaataccttgaatgtgagccttggcctccccctcattaaatgtctccgctgctgccagcgtgtgaaaaccaattacaagggccttcgtgagaaatgaggacttggttctgccacagagccatagagggaaataaaaggtcagctctcaaaagcccagctgggagtcaactctgcttcttctgacctccaaactttccattagaagggcagtgatctcagcgatttaccagcatgggcagctgggcctgtgattagataaaatgctgttaaggaactgagttaatactcaggcagccgcgcctcaagaggacgtgcgttctgggagggtcaaagccttcctatactcgttggtaagtttatctccttaatggaggaggggaggtctggtaaattatcagtcttactatcacgcagtcaaatgcccccacagaatccatgaatttgaaggtggtttcttaatggtatgtgggtgggggtggaaggttcattctgaatacttgggggctccctttcctcagaaggaagcctctcccatttgtataccctctaattcccagtcttcatccatggaactctaatcccgttaatgccttctgtttctgcaatagagcctcatctgcttttctctttggctttagggaagagttgtcagtcatttgattccatctatttggtttgctgctgtgttgggaatcagggatagagtttaagctcgtttattgaagggggagaaggaaagagaaagcaccttgccattgactggctttaaaacagagcagagacatccagatttcaaaatgtcaagactgacgccccctttgcatgtctcctagttattctgttaacagagtctcttctgctctgagcttcttttctaaatgtcttttctattagcctaaaacctgtgtgtgctttgattaaaaaagggacattggtggccgggtgcggcggctcacgactataatcccagcactttgggaggccgaggcgggcggatcacgaggaaatcgagaccatcctgcccaacatggtgaaatcccttctctgctaaaaatataaaaattagccaggcgtggtggcgcgtgcctgtagtcccagctactcaggaggctgaggcaggagagtcgtttgaacccgggaggcagagattgcagtgagctgagatcgtgccactgcactccagcctggtgacagagcaagactctgggaaaaaaaaaagaaaaaaaaaaagtcattgatatattccagatcccgggagggataatctgggagtcgagaaaattaatccaactcacatggcaataatgagagcaagaggtggggtctgggaagggagtggagaggacagagatagcagagaagaaatatatttgatttcacagggacctgaggaaaaataaaagcagaagataaaagcagttgaagaaaaatacacgcaaactgtgcttagaactccatttctgtctgttgggaaagaggaagctgaattgtagagaaggaaacgtaaacaacaatatggcatccttctaaaatgaaaatgcttaaacctgccaggctcagagggacacaaaactttcctcactgtcaggaggttcctggagtcaccaaatcccaagaatggaaatttgtgcacctacttggcagacacacctgagagcaagagtttaacttaagcatacctgagaatgaccctatcatctaagaatctgtgtttggagttctaagtgaaggaatccaagagtggccaacctagagatccattccctatctatgaggaacatctaaatcccccagcctatcccatggaacacaggccatgcatggagatcaatgccctttgttttgggttaaatgatggttgctaggtgtaggttgctaaggggagggtgctaagtgaaaatgctctatagactgcatgttttctataagtgattgtgattcccctgtccagtctgcccccactggactgccctgtatgtaagtcttcaatgaaccctatgtctcattcactggctctgggtctcgttagcctgtcaaacctggtgccgtccctattgaagtcaccccagcttaaaactgggatgacttaagcatgacagcaccccagcctcagagctctggtttcagatgtgttttgacctgaaactatgtgtggggccgtagccatataattcccaacccaaagggatgtgctgaaaaggtaacccaagatgactcaaaactttcccttccaaaaaatgcagttacctctactctgtatttgcaaatgcaaactcagctgcctccagggcctgacagataatgaaagtgatggagcttcttagatctgaagagtgcttgcctgttggcaagaagcagccagtagttagcctcaatagcttccaagtgggagcacattgccagatcttccaagtctccaagaaagggcagaaatataactcttctgttagacctcctagttttgttgttgatgtttctttgcttgttttggtttggtaaaaggatgagaaacaaaataaatctttttccagctgtagaaatctttctggaagagacacagagacacctgaatcttgatgtgtctgcaaatgttaacaaggaaacaattttttttttgatatggagtctcactctgttgcccaggctagagtgcagtggcgcgatcttgtctcactgcaacctccacctcccaggtacagtgattctcctgcctcagcctcccaagtagctgggattacaggtatgcaccaccacacttggctaatttttgtattattattagagacagggtttcaccttgttggccaggctggtctcgaactgacttcaggtgatccgcccaccttggcctcccaaagtgctgggattacagacatgagccatctcacccagcaaacaaattcatttaaaaaaatcctgcaataatattgtacttcagattttcaagatgttactgttggggactaggtaaggtgacttatgcctataatctcagcatttcaagaggctgaggcaggaggatcacttgagccccagagtctgagaccaacctggccaacatagtgagacttggtctcaacaaaaaaataaaaatttaaaaaaggatgttactgttggatggctggtggaagggtgcatgggagtgtatactaagtttgcaacttccagtgagtccatacctatttcaacattaatagttaaaagaaaacaagctgctcaaaacaaaatactttgcacaccaaataaaaataggttggcagctgactgtttcctactctcctttagtttgagagacttctttccttcatcagagccataactcactgaggggcaaaagcagaccagactcacaagacggcccataaaaggactttccattacacttcttttattttgagacaacatactgttttttctgggaaagttcactggacaaaagtggaaaacaatgtttcaggaatccaactgtaccaaatataatgaacatcatctgtgttgaagagattttattgaggttgatggttcaatgtgacttgggaccagggaaatgaagaaattctaactaatcttcggagaactttttctaggagaggaggtttgggagaggatgtcatatagaccaaatgaattcattttagagtcagtgcatctgagtttgaattccaatttggcttcttactgaaagactttgggaaatacttgtccattttattatctgttatctataaaatggggatggtacaatttccacttcccagagctgagataagatcttaggaagtaatgcaccgtgcaagccctgataatctttaaagtagcaatccaacataaatgacagtgattgttttcgttactacgtgctgggacatacccctctgatcaattttatgtccttgtaatcaattctgcatgttcccaagcccctatgtttttatttagtttataggggctcattttaaacaagaaaataaaactttcatttattgccttgttctgcgacttctatgacacacctgggaaagattaacattaacaaaatggcacgcatcataaaccatccactaatctaatgcccctttattattcttcttaggcctctctttattcttttttctcccccttgacattattttctgtctcttatgggatcatctggacatcaatcttgtttaaacacagtttccttcttgtacaaagtagaagtccagcctagaagtccagtaacttacttccaaagtacttcttggcctggcaaggcaataattgtcatggaatagccatctcccaggatctgtgttttacaaaaccatcttagaaggaagctcctcacccctccccttcaccaagactggtttgtttccttttcattgctgttaaatattagaaaatatggctcacgcctgtcatccaagcactttgggaggccaaggctggaggatctcttgagcccaagagttcaagaccagcctgggcaatatagacagaccctgtctttacaaaaaatatgaaaattagccaggcgaggtggcacgcacctatagtcccagctactcaggatgctgaggtgggaggattgcttgagcccagagggtggaagttgcagtgagctgagatcacaccactgaactccagtctcagtgacagagcaagactctgtgaaaagaaagagagaagaaggaaagaaggaaggaagggagggagggagggaggaaggaaggaaggaaggaagggaggaaacaaggaaggaaggaaggaaggaaagaagggaggaaggggaaagtcttgcaggtcttttggaaatattttcatttttccagcacgttctattgtctgtgtcctttatgttctccaactttatctactagtcttgattgtctctcactatgtgtgagcaacaccaaactgtttgtagagagctgctcagaaggttgtgggtcctcatctctacacctttgcaacagctgcaccagtgttctccacctggttaacccttgtgcattcttcaagattcagtgccaccatgtctcctccagaaagactcccagatctggaaaaagatttctctttcttccctccctcttccctccctcttccctccatcttcccttcccttcccttccctcctcttttctgctcttgctctgtcacccaggctggagtgcagtggtgcaacctcagctcactgcaacctctgcccccctgggctcaagtgattcttgtgtctcagcctcccagagagctgggaccatgggcacacaccaccatgcctagctatatatatatatatatatatatatatatatatatatatatatatatgttgtatttttgatggagacaggggtcttgtcttgttgcccaggctggtctcgaactcctgagctcaagcagtccacccacctcggcctcccaaagtgctaggattacaggtgtgagccactgcactcagcctggaaaagatttctttttcatccttttgcattttaattcttgttatgtgcttgtctccctcctatttataagtttgtcaaggcacccacagagtcttgtggatccttctttgcatctccagcacctaacacaatctcagcacaaaggaggttctcaagagatgtttgctgaaaaacagttaaatttgaatgaatttagatgttaagctttgtggagataaaggttgtgtccttttctgttcattactgaagcccaattcctataatagtctttggaacctagtggtcaataaatatttgcagaaagaacgaaggaagacacaaaggaatgagcatatattggcttaaatattagtgatagtgaaaagaggctgttattcttagaggtgaatttgaaattattttgttcactaccctttcctttgaaatgtttggtcttaattcatagcgctatgagattattaggtaaatttgaaattattttgttcactaccatttcctttgattgaaacttttggttttaattcacagtgctatgagattaatctagggacaatatactgaagcagtaggttaaactcatgggttctacttgaagccagacgacctagactcaaatcctgactttaccacttaccagttatgtgactttgggaggttgctaaacctctctgagcctctgttttcttacctttaaaatgggggctaataacattacctccaagactagtaagaagttttgccctcatttgagagtcaaagaggcatttagaatattgcctagtacttttttttttctttgagacagagtctcactctgttgctaggcctgagtacagtgctgcgatctcagctcaccgcagcctccgactccctggttcaagtgattctcctgcctcagcctcccaagtagctgggactacaggtgcccgccaccatgcccagttagtttttttgtgtgtttttagtagagacggagtttccccatgctggccaggatggtctcggtctcctgacctcgtgatctgccagcctcagcctcccaaagtgctgggattacaggtgtgagccaccgtgcctggccgtgcctagcacattttaagagctcattgtattattattatttatattaactaggagcaggtttactgtaacattcaatataatgaaaaacatttactgagtccctaatatgcatttgacactgggctatgtcctagggaggcaaagatgttggaactaaaaattcttgcccacaagtcacttgtagtctataagataaaaaattgaatttggtattatgagttcagtgaggccaataaagcagggtcagcagagggggaagtgaattgctttcaattgctgcagtgagaccaataagatgtcttagagaatgagattttgagctgggggttagaaggattaataggagttaagcaagagagcatatgtatggcaaggcaacttgttgagactgtgtgtgtatgtgtgtgtgtgtttctggttgtgggagaatcagaaaggataagatccatgctgggcgcggtggcttactcctataatctcagcactttgggaggccgaggcgggtggatcacttgagaccaggagtttgagaccagcctggccaacatgatgaaaccctgtctctactaaaatatacaaaaaaattagccaggcacgctgacacatgcctgtagtcccagctgcttgggaggctgaggaacgagaatcgcttgaacctgggaggtgaaggttgtggtgaaccgagatcttgccactgcactccagcctgagtaacagagcgaaactccatctcaaaaaagaaaaaaaaaaaagtgaaagggacagggtaaaactatgtgtggggctgtaaaaaaaaaaagagagagagagaaagaaagaataaaatccatctgtattttgttttctatattttctctccacccctgcttaaagatggcatcttggcacatgtgagcctttggcttgagaatgttcacccagaagctgaagacaccaccctgtccctttcacattttcattctgaaaaatccattaaagagattttctgaattgtgtcagggagctgttttgagtcccagtagtcagaagctgcaggaacaacaggggggttcctaagtctagaaagtggtggtttggggttccctatggattgcggatttgcgttctacacattcatagtgttccaaggaggtggcaggaactctgagagcaataactgataggtggaaaggctggtcacatgttggcccatctctggctgcacagtgtggctgaaaggtggagcagcttacccagcaatgcggggcagacagggacagacagagcacctgctagacccactacagatgctgcacatgtgggcagatccaagctaccaggagtgtccagcacccaggcatttgcctttttagtctcagtctaatctccatggaagttggaatcattttctttgggagatagacatgcattataatcagcaaatcatggaataaacacagaggaaccaagaatggccaggctaatgagactcggagaccatcaactcgccagctgcatactgcatacacacaaaaaactcttttttttctatcccacatgttgaaagatcgtcacagaaatgtgattactgtagtgggtaaacatcacagcacctaataaggtcttctgaaaaaaatgcatttgcaacaaaaattattgcatgcccttcatttgaacgcatgatggacttgagaaaagacatacaaaagtcattaggtgagggtgacgatcatgtgctccaaagtcacttagagagaaacctgaaaaggaaaaccatttcaacaaacacaggcccagggtgtctatcgttagtcacagaagcattacttccagggtgggtttagaaatcacctgtccacatgaacctcttgctgccagacacatacaccatcggacttactgctttgagccttttgaaagtctgccagaggtgagttttcccactcatttggagaaaaattttcattggagtgctttccctggaagtaggtttggaggtgtcctatagagagcatgcacatgtaccctggtcttttattccagtgcaaaaggccagatttcctggtgatgggagggtaattttaaatagtggaacacgccttcaaaggccattatcgagtctgacctaagcactaggttggccctgatcattatgcctcttagctgtgccctacgctataataatccattctcatgctgccccaatcatcacaaagacaccctctcaagctgcacaagtcacagactgggtctgtcaacttcttcctgatgcccagaatgagataagaggtgaacggaccgtactcttctgcagacagttatataacaggaagccatctgtggccctgccccaaggcagagcctacatgttcctgatatgtcctccctactcatttctcattgatggctccagatgttgaactatagtgatttctgaggtcgcctattcagaatatccaaacattacagaatatcacaggaaaataagccagtattattcttcagagtgaataccaaacagaacgtttagttcaagagcttttctaaactttcctggatagtctcaaatgtcaaataaaaattagcactcaatgccagtaagtgtgtggctccgtgggtgccctttgtgtatccaggtgataagagtgtaaatctatatattttggaaagctgtttggcaatgggtttcaagcatttgaagaatatgtaattttttagcccagtactgtcacccgtattctattaaaatggtctgaaattcagacagagctttatgaaaaaggtggtcattactgtgaaaccttggaaacaaactaaaatagccaacatttagggaaccagtaagtccttttagctgaattcctcaatgaaatatttcaagccatgtgaaatgaagtttacaaagaatttgtcctgggaaaaatgctaatgtcctaatgattcccttaaaaaatagagtataaaattaaatatacaatatagtctcaagttaaaattttaaaatgtacaacaaagacagcaagaaatagaccaaaatgttcaaggaatagaccaaaatgttcaggccataagattatgagtgatttaacttattctcttctatctttttgtcattgtctaaattttctatgacactcacttattctttctatacattagaaaagtgttactttaaaaatctaatatttggggataaaagtcagaagagtaacttcctgggggtaaggggaagctattgattggaaaggagcatgagggaacttcctggagtgatgggaatactctatatcttgatttgagtggtggctagatggttgtatacagagagaatccactggattgtaccatcaatgtgtgtgtactgcattgtaggtaaatttttcttcaatttttaaaatacagcatatttgcccttccattcctttcattatgtaaagcccccacttgcctttcttccatgatattcacggcaaaccccatttccatatggctcccatcactccttttaaaagttgcttctacccatatgtcccaccttcaccattatattgtagacatcttctggggagaacctcattgtctcttttctacaaagctctccaaagacaggtctgggcgctgtggctcatgcctgtaatcccagcactttgtgaggctgaggtgggtggatcacaaggtcaggagattgagaccatcctggctaacatggtgaaaccctgtctctactaaaaatacaaaaaaaatagcagtgtgtggtggcacacacctgtagtcccagctactcgggaggctgaggcagaagaatcgcttgaacctgggaggtggaggttgcagtgagccaagatcgcacccctgcactccaacctgagtgatagagggagactctgtgtaaaaaaaaatacacacaaagctcgccaaaggcaattcctacttttagtccatgttctactacttacttgctgaatgacctcaggtaattaacttttcctttagttttttgcatcttaaaacttgagggtagggttaagaacacctacctcgtagggttatattgtgaagattgggaattacatatataaagtacttcccaacaaggtctaaggcatggtgagcatctgataagtcgaagtgaatattactcttagccaaactggtctcccatctcccactgatctatgctaatcccactaattcttcaaagcataagtaactcctctagaagccattcatggccacttcaactttcatgggtctcctcatttttgtagcctaatttagcccttcatcacccactgctgtgtagaacttgctgctatttcatggcaaataaaaatgatatttattgatcacctgctatatgcagacacaattataaacgatacacactgtctccaaccattttacaacagtcctatgaagtggaattattatctccaattttacaagacagaaaactgcagactcagagaaggtcatggaatttgtctaaggtcacacagctgaatttgaagccagctctgtctgagctcaaaatctgtgttgttgttttgttgttgttgttgttgttgttgttttcttctttaacatgtgctagcgatctgccctattaggcttgaaaatttcttgaggatccgatatggcggcaggaggcataggaatcatgcattcattcatttaacaaatacccacggagaactgtgaccgatgctatcagtgtcccctctttttcctcttagatcttggtacacataacccagctcccagtggtatcatccacaactgttcacctaaagactttctccggccaccagagcctgctctgcccctggacatgccagagtgaacgtgatggagaatgcctgcttcccgggaacagccctcagtgatggatgggaatttgtgtatagctgccccagccctatcacttctcagtggtggtacgtctgaggtgcgtgttccatgctggctcttggagttccccgggaggattattctccagctgccccgtggtaactcactggataacacaccctttatggtctgcctttcctcactgtcctgccttcacctcccaaatcaaccacttgcacttgaatccctgactcagcgtctgctttgggaagaaaccaagcacagataagcacacacatctatcaggtacctatctatgcaacctgctccctattgggagagactaagtcataaataagccaacagcaaataaagacaattatagatcctcaaattcaccaggaaagatccaagatgctgtgatagagaataaggtggagggattacttttagatataatgggcagacctggtgatcatgaaaagtggccttcaaactgaagatcggaggacctgaagagcaaggagccaaccacataaagggcaagagagagagaattctagcaagaggaatcatggaggacaaagatcccctagttgggaaaatgctttgcacatttatgctctcaaaggaggacagcataatgataacagagtaactgaggaatgtagagacataggcatgtgacagatccttgaggactgtggacatgtcaagaagtttggaatcctggcaagtcgccgatgtgatttaaaggaggtctttgccctgtgcataactttgagccatgcatggaagttactgctttcattcttctcagggcttcggattcaaattcattcacctggcttcaaggagaaggggaagggagaaggggtacagagagactgcttttgcaaagaagtatgtcaggagatgctgaagggaccctttgtttcatcaagttagttttccctttgattccccaatacctctaattctgcatgtcaccaggaaataggtgtgctgcagctcggtgacagccttctccagtgtctatggcaacctggggctggggccatttttccttcaatgaatgggctggcttcccgaagacaagtaaagcccaattgttattctcaactgttacagagggagggtgcacaggggtaataaagaaacaactgaatactgctaatgatattgcataaaataacatgaattaagtaaatcatttctctccagcttaattatagatgcttcagggtgaaaatgcaagaaagagcctcaaactgaggctttgcttcttattccagccattatttccagtgttctttttttgttgccacggtccatataccttattgtctgacaactctgaaaagagctggcttccaggtttgtgaattacaaccacttggctgtgttcctgagagaaacaacagagctaaacaaaggtgggtaggtggaagatggagcattatttgacaacaaaagtctcccaacttacagatcggatgggtgttagtctctgcatcctcttcctactactttgggcaagggttatctttccaaagaaaagctgatcacatcattcaatagcataataatcttcagtggcttctggtagactgcaagataaaaacctaagctatttggctcaacctcttcaacctcagctctcatgttgcctctttgtacttactccactgagctattactaggtcttccaatacaccaagctgtctggggcctctgatcttctgcttgagctggtttgccctcttccctcttaaagaatatactctcatcttctaaaggttggctcaagaatccctcacattgtatagcttttcttttcttttctttttaagacagagtctcactctgtcacccaggctggagtgcagtggcgcaatctcagctcactgcaacctccacctccttgtttcaagcgattctcctacctcagcctcccgagtagctggaacaatacgcacgtgccaccatacctggctaatttttgtattttgtatgtttgtcaggctggtctcgaactcctgaccttgtgatctgcctgcctcagcctcccaaagtgctgggattacaggtgtgagccaccgcgcccagccttgtatagcttttctagcatccccagggaaaaccgtttgtttttgcccttgcaatatggggatatgtgtcccaggctccttattgcaaactttgggatcgagatacattgattgcattcatgaccccaattaatggcctacctttatccacaccttttgcctgtaattctgtaactccctggcttggaaatgtgagctattttgtaagataagacaatcacaaacttcatacaaaagcttgcaaacctgtgtgagttttttcttgccttctcaatgcaactggctttgctcactcttgaatccctgccatggtcatgagaacaagcctgggctagcctactggaggatgacagacacatggaacaaagccaaattgccccagaccaggccatcctagaccagccagcccccagacaaccctccagctgcctgaagatgcaggaacgagcccacccgaattggcagaactatcctgatagtccatagactagtaaaacataataaatggttgttgttttaagccactacattttaaactactttgttttatgcccattgttaaatgatataggggaccacataggagaaggcttaggtctggttggttgttgtctgatagctgcatggaagactgcagctcacctcactcccaatcaagagtaagagatgagaaaaagagggatccactgtctttagaacatgaattctttccagtacagaggcttgtccgatctatgttataataccctcatctcatacatcaaatgttataataccgtcatctcatacatcaaataataccctcatctcatatgtcatttaaagaactcctccttcttcgaagagtaccagtgagaggtaaggagaaggcagacatatctacttgatcctttctagaggacagaaatttctcttttatgggctagctgtaaggagatgagagggaaagggctccccctgcaggacaaatttaaccaaccgtgcacaattataaaaggttgaccttttgagaatcattgtataccttgttttcctataacgtgggtttgtttcggaacatgaaggagatactatgtcaatgtaaattattaaggaaaaaatggagatgaggatataggcagaaggaagaagagctaaaagatgcaggcagagtaggagaagcactttacgaaaggtgtttgccttcactgacacctctccacttctcactctgactcacacgcatggatcctcttgtcaacgtattaaatatcgtaatagaaagtgcttgatgagtgcttgctacatgccaggaattgtgcaaattcacctatctctcacaataattctataggttggtaccattgtcgtcatctttgttttacagatgagggaggaagactcaggaagaaatatgcccgaagtcacacagatagtgacaaaatggcgattcaaatataggcagacttgctctaacacctgtgcttcacctggcctctacaaaagaagccagactgtcccccgaagcccattatgtggtgttaggctttggacgtggatcaatagaaatggacagaaggaaggagaatcatcttttctatattccatcttagactttctccaaaattggagataccagacctgtgctactctgtccctgcttactatttacttctattcatgtggcttccttcattacaaactcattagcggagggaagggcagtctcatggccagaccatgtgaagacttgcctgagtgttcaccccactctatttagtggaatgctatctgtgtccttggccaatctcactattgcaatcacaaaagcataatcagctaccttcttttttttttatcatatcccctaagtcattttctaattctactattttagtttattcaatttctacaccagagtatgcccaaatatatataaccacataattatacctttatacactatgtatccaaaattcattttatatacataccttagtatttttccttctccagaatgagatttcccttctatgccctatttcacatcatcccctgcctcagcctctgtctgaagttatttcccagtaaatgaagcagccttcctctccattgtcccaagtcattctctgccaattccaccatcccataggatatgtctcttatttcttccacagaaagcaaagtcaaagtccattttgtcctccactcccaattatattggcttcaagtgcaccttcaatgttttgcattcaccagggatttatgtagaaaccagtaaaaaggagtccaaagaaaaaaagtgacacaaatgttcacatggtggatgagagaagagagtaaaagtgctcattgtcattgctgacagcctgtgtttaggaagcatttgcctggccccggctgaatcctaatatgcatgtggaaattgataattatgttcattcaaccctttacaaagtgccttcatgtgttaagatgcaaaaacatgaagctaagtgcccaattctttattaattcggtgtggagttttgcagttaacggtgccaggtttgcatctgcaattacccctcagctttttagtggatctaaaagggcaagtgaaccaccctaaccgcagcctccctcccccagtacaatgcatcattctcctgtttgaagaaatgaagggaagttgatatggagctagccactctgttgatgactgtgagtttttctctaagatttagctggagaaacctaagccccgtaagtagaaagtttagagatatttcttgtggcctggaattggaatcagactcacttaatgaggagataaaacgtggctaccttgggctaaggactctcaggacctggcaggtgtcttgagaaagacaaacaaatgctgttctccattgtcctaggagagacatacactaaacaaaatcattttagatgtaaggactgctaagaagaaaatcaaatggaattgaaatctggctagtgactcctctttgccaatttcttgtgaatctgaatgacttcgtcactatgtccgggacacatgacgggactttctcatctcatccttctaaaatgaaaactggaagccgttagactgtgcacttcaacctgtttcccactcgaatgctagcctctctagctagctagaccacctctccaactcccacctgctgtatttccccattattgctgacacctgagtcagcttaataatcatgttttttcctccaccatttattttccttacgatacctagtacaatattttggacagagaaatgaatgaatgaatcgttcactggggcaattctgggatgccgatgtccattctttaatgccactgcgtcatgaagaattaatcatatccaaagtgaggtccagtctttgcccttggctactgggatgtaatttccaaactcctggaatgtcatgcctgatagagtgtctttgtttgcctgagggtcttggccactggacagtttaacagtgtgatttatgatggaggctttaggccatacgttatcagttctacctccagaaaagctgaagactaatgatcagcgccatgttgtcaactctaactctgaagaagctgccattcaggcaatgtgtgatcaagccccagtaaaaactcaggacaccaagtcccaggtaattgtccaaagctggggatactccatgcttatcatcacatgttgatgccaggaaagtaacaccatccatgactccatggggaaaggataacacaaaacttcaggtttggaacttttccgggactctgcccacaggcctattcccttggctaatgttaatctgtattctttctctgtaataaactgtaactgtaacagcttttggtggccaggcacagtggctcacgcccataatcccagcactttgggaggccaaggcgggcggatcacctgaagtcaggagtttgagaccagcctgaccaatgtggagaaaccctgtctctactaaaaatacaaaattagccaggtgtggtggcacatgcctgtaaactcagctactcaggaggctgaggcaggaaagtcgtttgaacccgggaggcagaggttgcagtgagccaagatcgcaccattgcactccagcctgggcaacaagagtgaaactctatcaaaaacaaacaaacaaacagcttttggtgagttctgtgagtcctaggtaattatcaaaactcagggtgcttttgctcccctctcttgaacttccagttcagaagtgagagtagtcttgcctggactgtgttccctctaactgtacagtcatcagactctcacagccacatgtctgccccatagcaccacctatataggaaaatcccacacacacttgcagctcacagcctaagttttgaatgactccctttaggctgattctttatgcagacgccagctttgtgtagcctttgaccattccaccttctgcttgttctctgttgttctttctgtattacctagagccattttaccatccgtaagattaatcccacttgcattgagtttctttgcactggctactcagccaccaacaaacacagtccccagaactttctgttgccaccctttatgcttaggagtgtcctcaaacaggaactgaaggctcaggtaatttacgtgagaaacaagaagaaaattaaatgaataatcacatatgagaaatagtaaatatggctaggacctctctaggcaagaccttaaaaataattcttccaaagtaaaatatttttccttccttcctcccttccttccttccttgcttccttccttccttcctttcttcctcccttccttccttcctttcttccttccttcttcaattatctcaatgacaatgtctgacatggactagaaactctgtaaatatttgcagtattgttcaatgagtggatgaacctatattgagcacctaccatattgtatacaccatgctaggcatttgggaaacagtgaaggataacatagacattccaagtgcgatgtaccagtcaacctatcaaaccaagcagtatctggaggaaacacaaaggagaataagaataacctcttatggacactgactgtcatgggtcaccttcctctttcaacaaatgtggctctcaggggatcatgggagatcataaaaattattgagactccacaggatgagtctcgtgatcactgatttggaccagtgtctgtatcagcaaatggaagcaaactttatgatgctgtaacgatgggagcagggtcaagcattactgaaaaccttcagtctcagataaagcggagggaaggggaaattactcatttacagctagaaattggtaatctagaaaaaactcgatcaacaatggctgaagaactagtaaaattaacaaatcaaaatgatgaacttgaacagaaggtgaaagagatacccagacttagaatccagctaagagatttggatcaaagatacaacactattatgcagatgtatggagaaaaagcagaagaggcagaataaccttgattagatcttgaggatgtaaaaaaaaaatttataaaactcaaatagatgaacatttaagacagaggctcagttaacttgtgaaaattgaattctcgtcaaactgaatgtaaacatttaatatctgaatatttattgtggacttccaataaattctcgggtttttttgttttgttttgttttgttttttgttttttgttttttttttaagacggagtttcgctcttgtttcccaggctggagtgcaatggcgtgatctcggctcactgcaacctgcgcttctcaggttccagagattctcctgcctcggcctcccaaggcatgcaccaccacgcctggctaatttttgtaattttagcagagatggggtttctccatgttgggtcaagctggtctcgaactgctgacctcaggtgagccacccacctcggcctcccagagtgctgggattacagatgtgagccactgtgccaggccaaatgcttctatagaatgagaaaaaaattattgaaactccaaatgaagattcctagatatttgtaggatgtgcccgtaccttacaagtcacgtgcagccctggtgtagccttgacttagtgacagaggattttgacaaaaactttataaagcaaacattcactcttcctctggtgacatggggggaggagggtggtatagagatctctcaataccaccttcctcccctcaagtcatcatgcacaggacaagggtagaaggatacaaagggagtggtatcagtagaagcaagatacagtactgaataacttttatcttttgcctggaatgttctagcctatttatttttaatgctcttatttttcagggggaccttatcacctttgttattccaaatcagccttagtcaaattattgggcactctaggacccacctcaaaaacagatatcactgaagattttttatcagatgggtaaagtatgcatatcacagagagggaactgtgcatttctgttcaccttttccagcctggctcttgctaacaggaggctgtaattgaccctgtatatcatgcctggagaccttaatggaagtgttgtaacacaattaacttagaagcaaaggacaaaaggaaaggcatcatgccgttatctggccattagaagctactctgccttgagataaggggtatgggaaaagaaacaagtgtgtatgagtcctgagatatttttatagtcagcatcaagctttatatgattatgaatatttttttaacagggacactcacactgtcgcctaggctagagtgcagtggcatgatctctgctcactacaaactctgcctcccaggctcaagtgatcctcccacctgagcctcccaaagtgctgggattacagacacgagccaccacacgcagcctatatggttattagtattatccctaaacatatccatttgcatattcaatggacagtgattgagtgtctactgcatacccatcaatcctggattcatggcaaataccagaagaacaaatatcatccctgtcctctgggagatgggggtctatatgatatacaaacagaacacacacatgcaacctcaaaatgaggctgctccatgaacacctcatggagaagaatggtatcatcagggtcacatcataatgatatcaagactcattatatatcagtcatttactgtgtgctggaaactttatgctcatttctctaatcctcacaacaagcccccccgatccatcatattagctccactttacagaggaggaaccccaagatcagaagttatgtgagttgacaaatgtcccacagttggtaaatgccagaatcaggcctggcactcaagaatgtgtaattcctccaaagcccatgagttttctagtagtttgtgtttttagggacaaccacagtgcctgtcacatatggatggataggttcgagtagaacttgtttgatgcttaaaaggatatgatagagcttatcagttggatatcttagaacaagggtgctcatgaggatccatgggtctaactctaaagcagcccaaggttagtgagattcatattatgggcagaatctgccttccttctctctggtgtgacttgtcctaggtcgactacagctggtctggatttgtaatgatgcagaatactacggttaggtcttgtggcaaatcctgccccacattcagagaaactggacttgccttccagagtcatcaccttctgccaaccagccgctcagtatggcatgagcacacccatccttgtccttcatcgctccttgttaaaaccactttcagctttctacttgtgtcttttgctgtctcaggcagtaatccatttctcaacatgtcatttatccaatagacaacatatcaacgagacagttttgatttgctcaaacatctttggcaaatgaaggtggcacccttgcagagatggcaataatattaatagaaactcaagcctgcagttctgacagctctcccaacctgtgcacacttgcctctcttgggcaactcttagtgtcctcaaagactggctgaggcactgtcctggtggctgaacccaagacacctagcccttcaggtttagtggttctctaaagagttatagacttacagccaagcgcagtggctaacacctgtaatcccagcactttgggaggccaaggcgggtggatcacctgagctcaggagttccagaccagcctgatcaacatgatgaaactctgtctctgctaaaaatacaaaattagccggacgtggtggcacaagcctgtaaacccagctactcgtgaggctgaggctggggaatcgcctgacccctggaggcagaagttgtagcgagccgagactgtgccattgcactccagcctgggcaacaagagcaaaactccctctcaaaaaaaaaaaagatttatagactttctttttttttttttttaattttttttttttttttgagaccctctgtcacccaggctagagtgcagtggcatgatctcggctcactgcaagctccgcctcccaggttcacgccattctcctgcctcagcctctcgagtagctgggaccacaggcgcccgccaccacgcccagctaattttttgtatttttagtagagacggggtttcaccgtgttagccaggatggtctcgatctcctgacctcgtgatccgcccacctcggcctcccaaagtgctgggattacaggcgtgagccaccgtgcccggcctagacttactttcttaaggaagtattcacccaggaagtattcacccattcaataaagaagaattgttgcatacctagtattttccagtcttattaatctattcatgtagcactttgggaggctgaggcaggaggatcacttgaggacaggagttcaagaccaggctgagcaacatagtgagacccacatctctgcttaaagaaaaaaaaatagctgggtatggtggcatccacctgtagtcccagctactcaagagcctgaggtgggaggattattcgagcccaggagttcaagatgagcctgggcaacatggtgagacccctacctctaccaaaaaaaaaaattctttaaaaataaataaatagagtcaaaccacttatttaatctcattcaggttggagaaggaagaaaaagtaattcagacaaaagaaacagcatgtataaaggtaaaaaaagttcaggaaactaacagatcactcaatacagaggcctgaagaaaacaggtgtgagagatgagggtgaaggattaggtgaggcctagatttcagaggatattatgtctcgttaatgagcttaatttcattctattgttctgggaccatctaaggtacaggcaaaactgcaatgtaggctgggtgctgtggctcacacctgtaatcccagcactttgggaggcagaggcaggcagatggctttgaggtcacgagttcgaaaccagcctggccaacatggtaaaaccctgtctgtactaaaaatataaaaaagttgggcaggcacagtggctcacacgtgtaatcgtagcagtttaggaggccgaggcggggggatcacctgaagtcagaagttcgagaccagcctggccaacatggtgaaaccgcgtctctactaaaaacacaaaaattagccaggcgtggtggcgggcgccagtaatcctagctactcaggaggccgaggcaggagaatcacttgaacccgggaggcagaggttgcagggagccgagatcgcaccattgcactccagcctgagcgacagagggagactccatcttaaaaaataaataaataaataaataaaaaataaaaatacaaaaaagttagctgggtgtggtggcacatgcctgtggtcccagctaccagggaggctgaggtgggaggatcacttgagcctggggggggaaggttgcagtgagctgtgatagtgccattgcactctgttttgtctgggtgacagagtgagaccctgtctcaaaaaacaaacaaaaaaccctgcagtgtagaaagttcactatagctttcatgtgaaggatagattgggaagaaagagcatggcatgacccgtgaggaagctattgcaatagttcaatcctgaggaaagtgaggatgggaactaagtagcaggtgtggagagagagaggaccatgtgggcaggagaggcagcgtgcaggtggaatcagcagtacttggagaaagagttcttgaaagttgtggaacacagagaggagtctggaaagattcctgggactgttgtggctggagggcttcacctactctgaagagttgctcgggagctctgttgccttctcagttgcagaaatgaaggaattaaacgtcacctattgagagtgataatcttgatcttggcttggtgcttctggtagccaaggtctaaaagaaggaaaaaatagcatttgtaagtcatgaataggtacaaaccaggaagctctgttgccttaaagaaagagcttccttagcagattctttatttcatcatttccagtttggcagcgccctcatggttgtggctgggacaggactgctggctgctcaggaaatatcgagcaaatgggctaatcagcaggcaaagaattgattcccgtgtcacatcccttccccttaggccacaagtctacaaaattgccaagtggcagaggcttctgaatccctgccgttggctccctggaattgcagaagcttgttaatattgactttcatctaattgcttcactatttagttggcaggattgttctttaaaaattttttcctagttacgttatgcccaaaggcaatgctaattaacagaaagatccaggttctctcagactcaaactgcatcctcttttctcctcattccactacttgtctgtcatgagaattacacagaagtttcatctcttaagctttccatgcctcagttaccttatctttaaaatgggcataattagattaactctgtgactttctttatagagtaattgtgaggattggaggaagctttccaggtaagtgtgctacctagcacttagggtttaattaagggtagctctaaagaataatcacctcatctgcagggagatgttgccaaggcctccctgacctgttggaggagtttgagaatcacacttggtcgatgccaccattctttcactggcctgtcttaccatgggtttctcatggatggctgctaagctttgtgcaaaatcagtccaaaacttacaatcctgaagccccaaaactggtgctatttcctccaactctggttctccctatcagcctaagtgctcagatgctttgaatgtgtattttgattttgcaacttgagtctgaactagagtttcttgtctaaagctaaagcccctttcttggaatttcatgtcaattttgttttggttcaagctgaaattgcctccctctttcccaaaaccactgatttgctttccctgattagagcaaccggaaattttcccgtttactaccactactacctttactacaaatatacagtaaagtaaataaaaatggtggctgaagttgagtgcttactaagtactgggcgctatcctgaggaattcacatagttagtagcccttggtcctcataaaattcccgagatatgttctatttctatgcccacccccaccccccaccttttacagttcagaaaaataaagacatgagtaattcattaaatcctacatctagatagacttccataaaccctcaaacagatagacagctttttctaatgttgatatttaggggcctagtggattaaagattttcttaggaaggataatggagacattatcctaaaacataccttttaccaaagaaaaggctactatttgccattaaccttgtagcagggcttctatacctcagtcttattaacattttggaagaaataatgatctattctgggggtagggggctgggtaggtggaggaaggagcattgcattactcctgtgatttgcagagcatttagcaacatcctcagcctctacttgttagatgccagcagccctctgcccaaactctggcaaccaaaaatgcctccaggcattgccagatgtgttttggggacacagtcaccccagttgaggactgctgctttgaagcacagaataatgctagaaatcatccctcaaatgaagttgaacgtggggcaggttcattttggcagaactggaggtcaaaggaaaagtccaataagatttcgtccacgaggctaggatttctagtaggttgtggggcatggatttgaaaagatatcaccttaagccaggttgactggggagaaacaatacccataagggcatgagaatcacaggatttggcataaggagaagttgaactgcaatatagaacaaagatatcaaatggtacctgttgtcttgctacctcaggaaggagaaggggaaggatgctagggagaaaagtcaacaaatctccacagagcctcagaaagctgagtcatttatctcaaggtgatacacctttgaaggcagatccaggttcaagccccaatctgtctgactccatggacctgtctctctcccccctctacctctccagaaagaaaaagctgctgcaacgatttagtgtagaggctggccaactatggccaatgggtcaaatgtggcccactgcctgttttgacaagtagtttcattataacacaggcaaatccatttaggtacatattacttatgactgccttcctgctatagccacagagttggctagtagtaacagagactgcatggcctgaaaggcccacatgatttgcaatctgcccctttacggaaaaagtttgtgtgatggctaatttttttggcatcagcttgagtggattgggggatgtgcaccattaaccattacccctagtgacccactagcaaaatttgtacttcctgttcccacaatgttatgttctgctggcctagaggtcttagttccagaaggagaaatgcttctactaggaaacactacaatgatcccattgaactgggagttaagactgccacgcggccacttggggcttctatgcttctgagtcaacaggctaagaagagagtgatggtgctggctgggatgattgatctggacaatcaaggggaaattaaatactgctccgcaatggcagtaaggaagagtgtgtctggaatacaggagatccgttagggcatcccttaaaattaccatgccctgtgattagggtcagtgaaaaactacaacatctcaatccaggtaggactacaaatggcccacactctttaggaatgaaggtttgggtcatcccaccaagtaacaagccatgaccaactgagttgcttattgagggcaaaggaaatacagaatgggtagttgttgttgttgttgttgtttttttaaaaaaagtaattataaatgtcagctacagccacatgaccagtttcaaaaatgaagattgtaactgtaatgagtatttccacctattttgttaaaaatacatttgtgcatatatcacatatgttaagcaaatatctttattttctttcttcttttattcctttatcatgtaacataatgttgattaactttgtatcagcatttaagcattgttaattttacattatagcatttaggtttactgactttgtatcagcacttaagcattgttaattttacatcatggtacttaagttataggatatcaggagaaatgtaaatgtcactcaagaactttacctcctcttctgggaatgggattagtgcagttttggttgtactcaggatagttgtatcatcttaagtggaattatgaccttgttatgatctttatttggaaattaagtatggcttaaagagatgcatatggctgccacgttgacaaggggtgggcttatgctgattaatgttttatgtgttgacttgactggattgaagagtgcctagatggatggtgaagcattgtttctgggtgtgtctgtgagtgtgttgtcagaagagactgacctgtgaatcagtgcactgagagaggaagactcgccttctatgtgggggggtagcatccaatctcctgggggcccagttgggacaacatggcagaagaaggaggattctctctttctttctctctttttcccactcccccagagcagaacacttttctcctcctaccttagacatcagactctaggttcttcagcttttgaattctgagcctggcactagccacctcctgggagttctagggcatttagactcagactggggactgtaccattggctttcctggttttgaggcttcagggcttggactgagccacactatcagcttctctgcttctccaacttgtacgtggcctatcatgtgatttcttcaactccatgatcccgtgatccacttcccctaataaatcccctctcatatatctgattgtttccatctctcggaagaaccctgacactcacaatttgcccatccatgatttagagaatggatctctaatgatattctccagaattgcctgttggatggagccaaggggcagcaagatgttgagcttgcctcatttccctccttcgtccactcccatgtaggatcttgggccaccagccatatttcttgctttcttttctattcacctaacaccaggttcatttgtctcccctagaagaagcctgtggttaaaaagtggaaacacttcaggaaggaatacttgcaaaacaaatttcatgtgtgagtgctcctgaaatttacccattgtacatgtcgctatccttcatggtgttttatctcctttcaaaagaactgaaaaacttaacagcaatggatattacaacaaaactcatctcagtcttaccattagactgagagggttttattcttcctgttcttctgtcagattttaaatggatatagttttattccctttctcatctaatattggaacctatcaatctgcagcaagatctcattttaaaagatgttcttatatttcaagaggccttttaaagggggaaaaatagatccactccacagaaagcttgttgctggaaaccaaatatatttatctccattgattcaacaactattgactgagttctggacccggattattggtgcccagggagaggggcagggagatgaggttcagagaggagacctgacttactcagagtcatacagccaagagtgagtcagggtgcctatgctttttcttccttctcatatgtttatatccaataaccacagatataaatgtgatgcacagacttatccatccatttacccaagcatccatctgcctccaactttttaaatataatacttccatactttcatttcttcctctaattctatcctatgtttctcttttattggcttttaccattttatcctaaatatcttgctctactcagaagtaataggaggtccattcctgcaccaagtaataagagaactctaggaggtgaatctgtagactggtcctcaaagaaatcttaccagaaagaagcgtccaggtgtatgactcacatctgcaatcccagcactttgggaggctgagatgggaggattgcttgagatcaggagtttgagaccagcctgagaaacatagtgagaccctgtctgtctctatgaagaaaaataaaatatatatgtattcttttttgttttatatatgtatgtgcattatatattgctttttatatatgtgtatataaaacacatatataaaatatatgtgttgttatatatataaaacaacaacaacaaaaaagaggctgggcactgtggctcacacttgtaatcccagcactttgggaggctgaggcaggtggatcatttgaggtcaggagtttaagagcagcctggccacatggtgaaaccccatctctactaaaaatataaaaattagccaggcgtgatggtgggtgtctgtaatcccagctattcaggaggctgaggcaggagaacagcttgaaacctggaggtggaggttgcagtgagctgagatcatgccactgcactccaacctgggcaacagagcaagactctgccaagaaaaaaaaagagaagaaagtaaggtaatttaaggtaagagagagagagagaaagaaagacagagagagagagagagagagaaagaaagaaagaaagaaagaaagaaagaaagaaagaaaagaaaaagaaagaaagaaagaaagaaagaaagaaagaaagaaagaaagaaagaaagaaagaaaaagaaagaaagagaaagaaagagaaagaactggaattctgcaaatacataaagatatgtggggtgggcacaacctggcctttgagcctcgacctgtgcagatttcctatcatctcatcttcttctatcctataaaatccagttctgtgctcatccaaatgactctggctcttgttctcaaaccttctcccacccatgcttctttgccccttggagacagaggcagtcactcattccctcacatcccacctgtgcatccagaacatcttcctcctcagggtaatcacagggtaagattaattatgctaatcagcctctacaggctgacacaattaaccagagtatgagataacttcagaaatctatataggaggtatctacctgctgggttgaatttcaccattaagcacagtaattaaggggaggggtgggtgggaagtttgctcttttcaactaaagagtacatggtaccattctccaatagaagctgtatgaagttttccaggaagtgtttggccacttattgtcatctcttgggatctgctattgaacatctccttcttggggctaggcaccaatattgtagccagttctctcttcgtgatggaatcaaatgaggtgtttgtattttgatgcatttttaaatccttttctttcccctatttactcttctacacctttaaagtttttaatatttttatttattcaaaaataagaaaagttgcctctcagaataggagatttgaaaagaaaataagagaagttataaaagctttagattagacatccctcacatgtgtgttatgaagtgttaattctgaaagttgctttggggaataaaagtttgcaatccaaggtagagaaactctaatttcggtattcttcttttgaatttaatatctatagaatttaatgtatgaggagtgtattagtctgttctcttgctgctaatgaagacatacccgagactgggtagtttatgaaggaaagaggtttaatgggctcacagttccacatggctggaaaggcctcagaatcatggtggaaggcaaaggagaagcaaaggcacatcttacatggcagcaggcaagagagcttgtgcagaggaactgcccttcataaaaccaacagatctcatgagacttattcactaccacgagaagaaaatgagggaaactgctgccgtgattcaattatctccatatggccccatccttggcacatggggattgttacaattcaaggtgatatttgagatgggacacagccaaaccatatcaaagaatcatacattaaaggctctgaaaattctgtaacaaagaaaacatattaaccaaacacagttaatccaatattttccacatttattttactacacattgaactgtgttaaagtccttgtctcagagtctcatttcaggggcaaaaaaacaccgtaaatcttagttttcttgcccccaaaatgagacctgaagacaaggactttagcacagttagtttgctgagagaagatttcaagaaacagaagtgaggaagtgggaaaaatgaggcaggataggaggaaagacaatcaaagtgtattaatgaaatagttactgctgtggacaactggggttcagtcttgctggaaccctaaagatccatctagaatgcatcacagaattgtccttctggaggatagaaaggctgaggcatttatccacggactcacatatcttattgtttgtttttctgtgtatgtctgagttgatcagctgatggagagaaaacacaacacacccttaatatggggctgacagtgcagcatggaactgtccgccacagcagtcctgaaatatggaggactgaagggctgtgttgtggtcatcacaagttcttgctacattgtataacattttttaaatgttttaaaatgctaatttattaacatccaagcaaacttgcagtctatgtccatcatttaggaaacaccactctgttttaaattattcgagtttttctagatccgactctctcctttttcctcatgggaatataagcactgacaaatgctagtcagtagattaagaggagatgagtgtgtgttccttccaagctgaagtggaaaaagtctctgcacaactctccctctttgcttcccctgcagtgacaaccttggaatgcatcaattgaggtggccacaggaagaaagtagatcagatccctgagcaaacatgaaagagaatgccccagggagctacctgacctgcagtggactttgagcaagaaatcagcttttatgtgtcaatccaccagaatttagggctttctcttaattgcagcaaagcctagcccaccgtgagtaacacagcagccttagagaacacagccacagataagcaaaagtcactgtaatctaagatattccttacacagaatatcagatacaggtcagctagtgttatagcaagaaaaacaaggagaggacaaagaaagactgaccattgcctgttcttcttagtgtaactcacagagaatcacaaagacaagggaggaaagggtcagtgagtgacccaagctctacatggaagtgtcttgtttctggagaatgagatggtctagaggagcgtgttccattttatgggagcagatatgagtaaactcttcttgaaaaggagagcttagtgctgtgttttcattccctgttctgactctttaagtgggctcattgatctggaaaacatatacttgctggcccacagatgtgaataattgaagcaatgtcacccacccttgcttattctaatttgctttcactacaatttcctatctaaactagctctgaaattttggctctggcaactcttgttcaaatatttttctcctctgtcccctcatttggggaatccaattaagcatatatttgcctgtttgaattcatcccttcatttagagcttattaacgctctgctaaattttttttttttttttttttttttttttttttgagacggagtcttgccctgtcgcccaggctggagtgccgtggaacaatctcggctcactccaagctccgcctcccaggttcatgccattgtcctgcctcagccttcccagcagctgggactacaggcacccgccaccaagcccggttaatttttttgtatttttagtagagatggggtttcaccatgttagccaggaagatcttgatctcctgacctcgtgatccgcccacctcggcctcccaaagtgctgggattacaggcgtgagccacaatgcccggcctctgctaaaatttttaaatgatcttttctcttttaatttcatttttgatagtttctcttgctatgtcttcaagtcttttcttctgtcatgtttaatctcccattaattccatctactgtttttaaaatctcttacattgtagttttcatcttaagaatgtccatgtctttttactatttcccacgtatttattcaaagttttgatatcttgaatacagttataataacgattttaatgtccttgcatgttaattctaacatctaggccagtgctggatcagttttgattatttaattattctcctcactatgggtcatatttttctgcttctttatatgcctgttaatttttgattagatgccagtcattgtaaattatgccttgttggattctgactaactttctgtctctgtaagtattcttgagttttgttatggggcacagttaaattacttggaaaagttttattctatcagattttgcttttaatatttgttaggcaggactagaacagtgctcagtcttgggctgatttgggctattttccattaccaaggcaagatacttctctttaaagtaattacttcacatgtctgataaggtttattttctttgttctttttgttccttttactttttcttttctttctttctttcttttttttttttttttttttttgagggggtatgtttcaggtgagaaagtaaacctagtccctgttaatccatgttgactggaagcagaactgtgactgattttaattcttatcaaagttccctttggaatttgtgattaaacatgccttcttggatttggcccactgagttgaataattgatttttcctttttctgacctttcccagagtccctgaaatacccacccttcctcagtttcttctgtcacaccaacactcttcattaagctgtcaactgtctaatgcagtctttctccagaagatactgccaattgcctacctaacagttatccctcccacttgtttgctaggtaataaaactcttatattgttcagggaagcaattttcctcagctaagtcttacctctctggacttcagtaaatctagtagtagccacaggaaagttgtttgtttgtgtgtgttcttttttaaataacacagctattcttgcatctgattttttactgtttggaatttggatgcaatgcctggagatgcaacatcattcttgcaaccagaagcacatatatgatacatattgtgtaataccagatagtgctatttatatacagtaagaaatgaatgtgccactgcctgatgctgtgcaatgtgcagtatatgtggccatactcagaagccctaacaagaaggatgaagatgcaggaagatagaagggccctgggtgtgagcactagactgacttcttgctgtgtgagaaaaaaataccccttgcctgtttaaatcatttttttcttggtttctgttacttgcagctgagcataatcttgacttacatccctcttcttctttcctctacaggtaacagaatattggcatgtagcactcctcaaaacatagaaagcagaaacaaatcaattctgcctggaggacctccccgatctcaacacccagtggttttgacagaattgatatagaaatagaagcttcaaggtgggaactttttatttaatgcaaagtaatatacgatttaagaaactatatttgttgcatgttatgtatgtgtcagatagtgggttaagaagtgctttacatgaattataccgtttaatcttcaaaactacagtaagatgcagggattgatatatttatccaaccaatatttatgaattattagaactgttctaggtactgtggacctagccatgaattacaaggtactttctatccatggagttacagcctggtgagggagacctgtaacatcaaacaaataaataaaataaaaatagaagactgtgaacaaatctctgaagattattaaatcatctgatgtgataaagatagtgactattttagagcagctcactggggaaggcctctctgaggaggtgccttttaaggtaagaagtctgaatgacaagaataagacaaccatgtgaaaatcagggcatttcaggcaggggttacagtgagtgcaaaaggccttgaattgaaaagatcgtggtgagttgaaggaacagcaaaaaggtcctgtgtgtttggggagtgaagatgaaaggggatgaagctgtaggtactggtagggggacagtcataaacgactgggtaaaccaagctcaggagttttattccattctaagaggagtgctgtgatttgttttatattttacaaaatcaatctggctgttctttagtgaataaatagattatgggtaggggaaaagaatgaaagtaagaaaatgaattaggaagctttgcagccattcagaagatgaaaggacttggctgggatggagtgataggaaagatgaagggatggagatgaatttggactgtgttttggaggtggagttctcagagcttatttagggattggcttacaggcgatgagaaaaaggaatcaaggattgatgttagggttttgcctaaggaattatccccatgtcaaaaatgaggaaacatatatatgcttaatatatatcacatatatatgtttcacatatatatttatatatatatgaaacaattatatatgaaagagattatgaagtttgccaaaggtcatacaggtatcccatgactttcatttattatgtatttatttattcatttgacaaatatgtgtcaggcatagcagaaataggagtgatcaagacagtaatggtcactcatggaattgaaaccaactcaatagtcccatagaccaatagtccccaaccttttatggcaccagggaccggtttcatggaagacaatttttccacaaacccaggttgttgggggatggtttgggatgattcaagcatatcacatttattgcggattttatttctattatgataacattgcaatatataatgaaataattatacaactcaccacaatgtagaatcagtgagagtcctgaccttgttttcctgcaactagacagtcccatatggtcacgatgggagacactgacagatcatcaggtgttagattttcataaggaacaggcaacctagatccctcatatgtgcagttcacaatagggttcgtgctcctatgagaattgaatgttgctgctgatctggcaggaggcagagctcaggtagtaatgccagctatggggagcagctgtaaataaagatgaagctttgcttgcccactgctcacctcctgctgtgtggcccatttcctaacaggctacagactaccacccgtctgcagcctgagggttgggggagacccctgccattgacagtttgttttttttcctcccagtaaacatagaaattgacccttctggtcttaaagcttgaagcttacatttgttttatcagagttccttcctcaggaaaggatccccactcccctgccccagactttcaaaaagtatcaaagagctgaaactcaccagatcatcacatccaggcaatgagaagccagaccacttattcatcctgattgcttccttacccctcccaagttacatttccttcctgctatataaacccctaattttagtctgttagggagatggatttgagactaagctcccatctcctcagctgcagcacccaattaaagtcttcttccttagcaataaccattgtcccagtgattggctttctgtacagagagtaacaggacctagactgaacccctggtgtttgagaggatattttactgcattattaaagtgcttaggaggatttgaaattcaaagtcagtcatggtaagtcaaagttcatactttggcttatgtggtgtttgatggaatttcctgctgtttgaaaggggacacccagggatcaggactctacagaccctccctcccatcccacttagcccctcttgttctttgactgaattttgtcattcagcctcaagcacgcctgttttgtgttttttttttttttttttttttttttttgagacggagtctcgctctgtcgcccaggctggagtgcagtggcgtgatctcggctcactgcaagctccgcctccctggtttacgccattctcctgcctcagcctcccgagtagctgggactacaggcgcccaccaccacacccagctaattttttgtattttttagtagagacggggtttcactgtgtccaggatggtctcgatctcctgacctcattatctgcccgcctcggcctcccaaacttgggattacaggcgtgagccactgcgcccagcctttttttcttttgaacaatgttcttacgtggtccaccagtgattactgcaggagtcttggtaaacacttattgcatacctacaaggtgtcaggaactggacttgtcgctggagaaataaaaaatgagtaatagatctccctgtctacaaggaccccattgtctagttggaaaatataatcataaacaattatttcaatgcagtagacttagggctgtgatagaggcacaggacattgttgggtcacatgggaaggtaccttacacagactgggcaaaagttattagaaaagctctctcagagaaagtgatagagaaaaaggaaaaggaaatggattttgccatgcaaaaggaaagaaaaagaattctaaggcagacagagcaatccatataaaatcacagaggcttgaaacaacatggcaagtgcagggaactatgatgtgtttggaccataaagtgaaaaaggtggtggggggaggtgagcctggagaaagagatcccaacctggccccaaaggcaagtcatttcaaagcctctttgcaccacacattttctctctcctttccttcttccacaaacaaaacgaaagtatttcccaatgcagaatgccaactgaaatgtgcacttcaaaggctatattgggccaggcgcgatggctcatgcctgtaatcccagcattttgggaggccgaggcaggtggatcacttgaggtcagcagttcaagaccagcctgaccaacatggtaaaaccccttctctattaaaaatacaaaacttagccaggcatggtggtgtgcacctataatctcagctacttgggaggctgaggcaggagaatggcccgaacccgggaggtggaggttgcagtgagctgagatcacaccattgcactgcagcctgggaaacagagcgagactccatctcagaaaataagtaaaatgaacaaaagactagactgtgttggttttctctccctcttattttctggggacctgctacattctgatcatggatcctgttttgtttgagcgacatcgcattttcctctgaaatcctttctgtctctcttccatccggttgtttctttaactgaaaaaggaacctgccggggaaacatgttggggtcttgacggcatctcatgtctgtgtatatttcaaaacacataaaagagatcctgagtcactgaggggcatcctcctgtttcttatgctttctgtttcaaagattgtctccaaagctcacctcttagtgctgagagttttgggcttctttatggaattgtctggaatcttaagaaaaaaatatacacttgcaaatcagtgctgtgttcacaaagcaaaagatcacaccctaagaaccaggctttccctgttgtttaggtcaaatcccttttgacctaattcttagggtcctataagtctggactcctctgggccagacttgaactctatagtttaccccctagaaacactggacttccttgtgcatcagttcctgcagctgtaaaatgcaagcattgaactagatcatcctggaaggtctgttccactctaatagtctaggattttgtaaaaaatttatttatgatttagttagtacttctgccaaacatattccataaaccttcacccagcttttgaaaaacaacagatctttctggatttcatcttcttacatgagtattactaagcctttctacatcggtacaggctagataattggaaaagaaagggtgttaagaatgcgggctcgaaggctggacttggatctaatgaatcctaatatctgggagtggtgcttggggacctgtactcaataagccacctgggcgattctgatccaccattagtgcatctgatgtttctgcaggtaacacattgtattagtgtcctattgctgctgtggaatattaccataaactttgtgtcttaaaacaacacaagtctgtcatgtttacaggtctgtgtctgtttagaagttctaaattattttcatggggtgaaaataaaggtgtcatcatggcctcctactggaagaatcccattccttgccttttccagcttctaacagctgcttatattcctcggcttatggtcctgcacggcgcctatcagtttcctttgtctcgtccctttcactgactctgaatctaactctccagcttccctcttttaagggcccctgtgattactgtgagccctcttggataatccaagataatctccctgtctcaagattcttaactccatcatgtctgcaaagccacttttgccatgtaggtagcatattcataggtctgggtattaaggtaaagacatgctttggatgcccttattcagcctatatcccatactgccttgattttgctgaggctgatacaaggggccccagaatttgttgctgcaaattttcttttataaaatccaataaactgactctaggagatgtcactgaaacacttgctaaaaataatctatattccaccaggtaatctgcaatcacctgcatcatttagaaccctccatttcatcatgcaattaatttatacatatatatatatactttcattattcacctgttaactccataacatgctaatcacgagctagtttgcagcagttatattcccttcctcacggctgcatgaggatgcgattaattggaaaacagggagaccagagacatgaccagaaatgacgtcatgcatcccatgccatcgcaatacaattgtcaggttcactggtggtttggtaaagctggttcagttctattccctttgtcagggattcccatgtgtgtgaaaattggaccaacagtggtggggttccatttcctggttccatttcctatgttcttctcagaagatagaatagcgtctgttaagacaagatggcttaggaggcggactgacctgaattcacgttctgccttggccacttactagctgcattggttttggcatattacttaacctctctgtgcctcagttttataatctgaaaaatgggatctcatagctattaactaacagcaaagactagacccctaggcctacctcttctcactcctgcacccatgttttgcttggtgtgcggtgtagtgggcttttttattctctaaaataccttaatttttgttttgagcctcaattctaacatgcagagaaaacaaggcttgggctgtttagggtttttattctctcttttctcaaggggttgaggccaagttctggggcatgtggagtgacatcatgccgaagacgtcattagcagtcggtgccagctcctcctgagaactgctctgtttcatctggtcaaaaccaggaccactccaggcctcggtcactcttggcctctcttgaatacaggaaatatttggtagttctttctctaggcttggggaacagggagagaatgcactccccactgtgtcagcgtgcaccttgctggtcactcagaaccttgaggttcctggcacatctatctcagaacaattggtcagggcaaccccacttccatttttcctctgctattccctgatgacacaggaaggggcatgctagggtcttgccatttttcacctgtgctttttctaccacacaatgttttgcaccctctgaagcaaaccctatcagcctctcatccaagctgctttggaagctttctttcataggcagccagagataaggggctgagaatggcgcaagaaaacaccaagagtagagctcctaaaaccagtgatccctttgctagaagacaagctatatgtgagtccatcccctgcaaatcactccttggcagaagaaactcagaaggcggtggaggggttgtagacaggataaaacacttatgtttaattgccttgggagggtcagaaacaagtctgttcagttttgtcaagctaatttgttagaaaagaatgtgctcagcatataaacaaaagccttttttctataagcaattaggaaccaccctaatcttactcatttaaacacacacccaaccacaaagctggaaagacaccaaagagttggaaagacaccagagttggggctgaccaaccgcttttgctaagcctcaaacctttgcaattaaagactgatcttcctttctgaaaagcttgtctttgcgaacctctgagcgttgatttccaatttgtttttggccaggcagtattctctgtgtactttatttacatgatttagaattttcatgacattcttgcattttttcccatcacccaagtatttatcatatttatcatttctatatgttgggtacattgaaggtcttctagctatttggaaaaagtacaactcattttgttaactatagtcactctgctgtgctagcaaacgttacaacgtactccttccatctgactgtatgttttactcattcacttttaactttagcagtgatggtgtcaggctgtcctcaaccatgctgtagaggtgcatcccctctgcttccaccacagcctcctctcctttctccgtctcacattcacacgctgttttgtaactgacagcttatgtgtctctgccctgtaaacactgtgagaccagtcttatgtctaccactgtgtcctcagtgccttgtaccatgcccggcacatagaggctactgggtaaattattgttgagcaaatgaatgaatgaatgagtgaatgccttctctgggagggaaggtcaaaggtgtcagaggtcattgccacagtgatgaggatctgcaaatctgcaaagcaaataacactgaaaatggaagctatctttcccccaaatttctatgaaattgaatttcaaaattgaagtggaaatgaatcacaagatggtagatatctcattaagagagatctcattaagagaactcatacatactttgattgaataatcagggccaatgttttctgaacacttattacatgccaaccactgacacagcactctttacatgcattccttcctccattgggtacttgagctgaatgtcttccactggcccttccagatccgcatctgtgctttttccatccctgccctggtgctggaatgctaacctgtagagactgactaggtcctcttgctctccagcttctagatggattcaaccattgggaggcatcagcagaagtcagagaagagggtaaaatgcagtccggctatttagtctgttggctgtttccctgccaagtcaccatgggtgatttaactgtatctactgaagaccacagtgcctgtcttgcagccttctccatacaattaccttttctggatgccagtaaccacctcttcctcttgcccttgcaggcttagagacgtatcagctgccttctgttattaccccagcggtattcaccatgccatgtgggtttccttaaatcctgtcacccttttctcataacaacagttatgtcattaatagctccattttaaagagaggacactaagtcttaaagagattaagagacacttcgaggccaggtgtggtggctcatgcctgtaatcctagcactttgggaggctgaggcaggaggatcactggagcccaggagttcaagaccagcctgagcaacatggcaagaccccatctctacagaaaagtaaaaaatttagcttggcgtggtggcacatgcctgtagtcccagctactcagaaggctgaggcaggagaaccacttgtgcccaggaagtcaaggctgcaatgagcccttttcatgccactgcattccagccttggcaacagagcaagatcctgtcactaaaaaaaaaaaaaaaagagagagagagacgtgtccaaggtcaccgagtcagtaggagcagatcctccaacctagatctgtctaactctactgctaatgcttcccttctgtgatatttaaggtgagagtgtggctggtgccccaaggctgagatgtaactcggagaaaaactaactggagcaatgtttactgggagccaagagcagaattctcatttcagacctccgcttccacagatgggcacttagagtttggctctgaggggtggtggtggttcacagagagttcaaaccccatcacagacacatgtgggtgaataaagtgtcagggtctttgctttttccaagtgcctgatacaggcttgcagatgcgtgggggtgtgaacaagagagcctcaagtggatttcactcttggatgtagcctataaatatgtatgttgggcaccatgaatcatttagggctggattggttgcagtttttcattttttaagggatggtttcatgactcagagatactggcatgcacccccaaggtcagagtggatccgaacactttacagaaattggaaggaaacaaaatatttgctgcctagctttattctgagaactttttctaagtttaaaaacatacaagggagcagagaacgggtcacaaatgagcttcattcagggttgtggtgttttgatatatatattttactggattttgaccacaatccatggctcatagcttccatagcctttttccagtcttttattagaatgtcaggtgtgccaggcctcaggaaacagaagctcgctgactttccccagccctcctctccctctaatccttccccggtctttctgattgtgggtcttaagaccacccatccccagagagagtcctgctttatatcctggcgaaaggaatgttgaggtcatgaatcttccctaaaaacacaagagaactgggtccagagatcttctggataactgaacatgtagaggtttctgaagggtggtccccagggagagcatggaagctctgtgtcccttctcccatacctcaccctacacatctcttcatttggatcctttgcaatatcttttacaataaactgataaatgcatttccctgagttctgtgagatgctccagtaaattagttagattcaaggagggattcttgggaaccccagtttgaagccagtcagaaatttcagaggcctgggctcacgactggtgtctggggtaggggtgagggggcagtcttggtaactgagccgtcaatcagtggcatctgatgctatctccaggcagatagtgtaagaatcaaattagaggacacccagctggtattccctgcttggcgtgtggaggaaaaaaacccatatatttggtcacagaagccttccatgttgatgattgttgttgtggtagtgtgagactagaggagaaacatagtttgagagtttttccgaaacaagtgtgataaaagctttggaaattgtatagcttttataatttttttcaccccttgtacaattgtaacttcacctctccgagcctcggttcccacatcagcacaatgggcataagagctcaatgagatgtgtgcctctacagcaccagtacaggacatggacttcacatgcataactggtggtcttcctcctcttcctctcaagtagctccaactcacagccaaatctgagtgcctagcatgcttccagccagccctcagaaattagcagttgttaattggtgaatgttgcctctctggctgtatagtaagtgtattagtccgttctcacattgctgtaaaaaactacctgagactgggtaatttataaagaaaagagatttaattggctcacagtgtggcaggttgtacaggaagcatggttggggaggcctcagaaaacttacaatcatggtggaaggtgaagaggaaggagacagctcttacatggctggatgagcaggaagcgtggggaagagttgctatacacttttaaacaaccagatctccggagaactcacctgctatcacaagaacagcagcaagggggacgtccactcccatgatccaatcacctcccaccaggtttctcctccaacactggggcctataattcgacatgagatttgggcagggacacagaggcagaccatatcagtaagctcctgcatggtatgtgtatcagtcaagtgatgctgcagtaacaacactaagcctcttgttcttttttttttttaactttaagttctgggatacatatgcagaatgtgcatgtttgttacataggtatgaatgtgccatggtggtttgctgcacctatcaacccgtcatctaggtttaagccccacatgcattaggtatgtgtcctaatgctttccctccccttgccccgcaccccccgacaggccctggtgtgtgatcttcccctccctgtgtccatgtgttctcattggtcaactcccacttatgagtgagaacatgcagtgtttggttttctgttcctgtgttagtttgctgagaaggatggcttctagcttcatccgtgtccctgcaaaggacatgagctcattcttttttatgggtgcatggtattccacggtgtatatatgccacattttctttatccagtctatcattgagggtaagcccttgttctcataccatattgcttccctttttccttttttattgatatataacaattgtacatattttgagggtacttgtgatatattttgagggtacttgtgatatttcaatacctgtataaaatgtgtaattatcaaatgagggtaaatagaacattcatcacctcaaacttttatctgttctttgtgttgagaacatttcaattcttctcttctaggtattttgaaatatacaataagttattgttaactctaatttccctttgtgctatcaaatgctaaaacatattgcttctgtgtttttgtaccccttaaccaacttttcttcatctctccacactgccttttcttcccagcctctggtaaccagcattctactctctatctctatgagatccactttttaagctccagtatatgagtgagaatctgagatgtttatctctctttacctgacttacttcatgtaacataatgacctttggttccattcatattgctgcaaatgacagaattttgttattttttatggttgaataatattctattgtttcactcccatactgtctgcctagacaccctttctccacgtcatccagagggttaccctagaggcttccatgttagaaacaggggaccccattcctgcacggagttgattccagatggttcatggatgggcatctgatccaggcagaatccttccctgagaatggggatctagaactcagaaagagacttggaacatgttggtatgtatgtatgctttcacatggaccagcgaaatggtgaaagctagactgggtagagagattgaaaataaaacagccattaagataggagaaggattgagagaagagattttcatgagagcactcagaagtccttgattccaattagacctgaggcccagccacattactgtcttggcttccaagaataatcctagtaccctacttctctgaaaatccttcggtttctgtcacttgcaaccaagagtcagcatccaggtggcagactgacatctatcaacttggtttaacttattattttgaaataattttagacttctcgccaacacatttttactccatatcatttctgatttgtttttgctcacttataaaatggaaagaaatattttctggaaccattcttttttttagtagaatgcatataaaaatctactctagagcctagcatagcaaatgcttagtggggatctgcaataatcctctctataccttctttctctttttattttctttgagatggatttttgctcttgttgcccaggctggagtgcaatggcatgatctcagctcaccgcaaactccatctcccaggttcaagtgattctcctgcctcagcctccagagtaactgggattacaggcatgcgccaccgcacccagctaattttgtatttttagtagagatgaggtttctccatgttagtcaggctggtcatgaactcccgacctcaggtgatccacctgccttggcctcccaaagtgctgggattacaagcgtgagccaccgcactcagcccacttctttcccttaaagatatttgcttcttggttctgcaccaggctaggctaagtagttgccagcccatttttctggttcctttcctgaatgaatggtttccacctctttcttcattgcttgtacagtcatcccttgctatctgagagggatttgttccaggaccctggcagataccaaaatctgcagatgctcaagttgcatatgtgaaatgacataatatttgcatataacctatacatatctctgtgtgttaggccgttcttgcattgctacagagaaatacccgagactcggtaatttataaagaaaagagctttaattggctcacagttctgtagggcgtacaggaagcatcacataagcatctgcttctggcgaggcctcaggaagcttacaatcatggcagaaaatgaagagggagcagttgtctcacgtggtgggagcaggaaggaggcaggggctgccacacacttttaaatgaccagatctttcaagaactcagacagagaactcatttatcaccaaggggacggcccaagcctttcatgacggatctgcccccatgatccaaaaagctgccaccagaccccacctccaacatttgggattataattcaacatgagatttgggtgggacatccaaactttatcactccatatactttaaatcatctctagattacttataatactaacataatgtaaatgctatgtaaatagatactatactgcattgtttttaagtttccattattttcattgttatattgttatctgttttttccggatatttgctactgtggttggttgaatctgcaacatgtaacccttggatacagaggactagctccatgtgcatttgggccaagacagtttgggttgggccaatgcaattatttgggaaagtgctggatggcagggacactttggaatcagaaaggagaatctcttttaaagcaagggatctcactcaatgagacaaaagagaacttttaacaaggtcaatacttgaacttgactatatccaaagtagtaaatgctagtgctcattcaaaccctttcatctgatgtttcaggaagataatggaccaccaggggggtttgttagccagtgaacttggcctccacagtcatccttccccactctttccacctgagcccctaatggctttacctcccgaccattcttccccccagattaaatatatatggtcaaaggatatcaaaattcctcaaaatgcaaaaaaaaaaaaaggaattagttataattttatgtcaaagaatgtgaaatgtctatttaaggacagtgttttagttattaattatgaactgttattgacccactgtcatacttcaacataaatgctgcatttttctgtgtcatctgggaagctttcatatgaagtcttctttattctcatgactaatagctgatcctataagtaccctcttacatatacattactgttgcatatacaatattcccataagattatagtattctctttttactgtactgtttctatgtttggatatgtctagatacacaaatacttaccattgttacagctgcctacagtatttcatatggcaacatgctgtacagatttgtagtctaggagtaataggctgtaccatatatcctgagtatgtagtaggtgatatcatctaagtttgtgtatgtaaaagttacagtgtttgcacaatgatccaatcacctaacaatgcattcttatttatttatttatttttaattttaatttttattttttggagacggagtctcactctgttgcccaggctggagtgcagtggcgcgatctcagctcactgcaagctccgcctcccgggctcacgccattctcctgcctcagcctcctgagtagctgggactacaggcgcctgccaccgcgcctgccaccacgcctggctaattttttgtatttttactagagacggggtttcaccacgtgagccaggatggtctcggtctcctgaactcgtgatctgcccgcctcggcctcccaaagtgctgggattacaggcttattttttttgagacagagtttcactcttgccacctaggctggagtataatggcactatctcagctcactacaacctccacctcctgggttcaagcgattctcctgcctaggcctcctgaagtagctgggattacaagcgcatgccaccacacccggctaatttttttgtatttttagttgaagcagggtctcaccatgttggccagcctggtcttgaattcctgacctcaggtgatccacccacctcagtctctcaaagtgctgggattacaggtatgagccactgtgccctgcctaacgatgcattctttagacttgtatctctgttgttaagcgatgtatgactgtgtgtgtatatattttttttctcacttgatccctgatatggcttggctgtgtctcaactcaaatctcatcttgaattgtagctcccataattcccacgtgttgtgagagggatccagtgggagataattgaatcatgggtgcagttcccccatactgttctcatggtagtgaataagtctcatgagatctgatgatgttataagtggtttcccctttcacttggctctcattcattccttgccttccaccatgattgtgagacatccccagccatgtggaactgtgagtcaattaaacctgtttcctttataaattacccagtctcaggtatgtctttactagcaccgtgagagcaaacaaatacaatcccccgtgaatgctatgagatagattctattatcttcattacataaatggggaaactgaggcacagagtggttaagtaacattcccaaggtcacagtgcaggtaagtagcagatctgggattggaacaaggaagtcagactccagagcctacatatgtacaccattgcctgtgttgacactgcagtggacagtgtaaaaagaggcatgcatgggataccaggggtctggttaaatcaaatgaaattggcaatattcaaccactttaacctaaaagatgtcaatttcatatggtaggaacatagtagacatacaagatagtaagtcaaaaagggcatccctgggagatgtttggctgcagctgagtttgtgaagataaagaggcaaagaaagtttaggaacagatgatgttggcagaagccatagcaggagcagttacgagggcatggaagagcacaacacaatatgctgactggaatgttgggtgtttgtcgaacaatggtgggaaatgagggccgggcacagtgacgcacacctgtaatcccagcactttgggaggctgaggcgggtggattgcctgagaccagcctgggtgacatggacagaccctatctctacaaaacaaacaaacaaacaaaaacagaaaaattagccaggtgtggtggtgtgcacctgtagtctcagctccttgggaggatgaggtgggaagatcacttgagcccgtgaggtcaaggctgcagtgagccatgattgtgccactgcaccccagcctgggcaacagagcaagagcctgtctcaaacatacataaagcaaatgaggacagaacctgaagcccctttgggtaaactgagtctgagtctttcctctggaaacgacaggctttctgattctctgcccaattttcttcttggtgcaatgtatgtattgatccactcgagctctttgggatgttctgtgtcttcttcccttctgtagtgtgccaggcaaagcacttagcacttagaaggtgctgatcggccaactgactgctgatgataatattacatgtcagagaaaccaaccaaaggttaactttatttcaaacaggttgtaatatattctctgcttttcactatttgggagagggaaatgttcttattttttctttaattataaaggcccttttaagttttcctgtggaagcagccctaaaatcaaaggctgtattgctgcaagatgtatattgaagttcaggttcaactaattggtgttaagcacttataatacacccaatactttcatgtaactatgttcactgaatcttaaaaaccctgaaaaataggctctattgtctccattctttacataaagaaactgagaaagatgcattaacagacttgctcataaacggtgaagtcagaatttgaactctgctctctttgttctttgccatggcttttccctctacaaagatgctactgggaatccattggtgataatgacgatgacgatgatgatgatggtaacgaggatgacggtgccagtagccacaaaactagaaaacactgattaccatgttgtgtaacagaaattgtcctaagcacctcaaggaataattatttacttttcagagccttttttttttttttttaaccttttggagactttcctgatggtgaaactgaggctaacaagtgtcaagtaacctgttgagattacgtagcttactcataagagggctggattttttgttggtattgagactgaatctcactctgtcaccaaggctggagtgaagtggcaccatctcagctcctacaacctccacctctagggttcaagcaattattctcactcagcctcccaagtagctaggattacaggtgcacgccagcaggcctggttcatttttttgtattcttagtagagtcggggtttcatcatattggccaggctggtctcaaactcctgatctcaagagatccacccgcctcgacctcccaaagtgctgggattataagcatgagccactgcacctggcctgggatttttaaatatttatttattgaccttttttttttttttttttttttttttttttttttttttttagagataggggtctctctatgttgcccaggctgttcttgaactcctgggctcaagcaatcctcctgcctcagcctcccaaagtactgagataacaagcatgagccaccatgtctagctaagggctgggattttaaaccagagctagtgaccttttgaatagaagtatctgcctgttttagattccagaccccacctttgtccctacccacctcactcctcctgcaccaagaaggaagaacaaagaaaaccttcccttggagcatcaggcaaggctctctgttccggtgtcaccatgataaccagccctagtcaatttcctcacaaggaagggaaaagtaaatgtcaaatacagcttccccagcaacattctgtgggcgagcactggggaaaatgtgctggagcctctgtgttctcacttaaataaggtgaatcactcctggaattggagctgggaagcaggccatgttcctaaacaggtgaggttaacggtgttcttggagagcctctgggtcactttgaaaattaatcctttttacttcagaatctgagctcctaaatgagcagattagaaatcaaagcggggaaacaaatgggtgttcttggcaagggatttttagaacattacagcatgctttttaggctgacatcatcttatctcacctctactgcccaccttttgttgaggtcttgtctgtttgaagactgtcggctgccaaaagcatgtagactccaagaagccagggccatgtaagccattcaccactgtatccacagtatctaacatagcacctgactcagagtgggaaacttactaattattgttcaactaatggactgattgcagctatcacaaacaatactttggttggggcaaaatgcttttgtttccaatatttgatcatttaaagcagaatgttttgacctttctggcaggagacatttaagctgagatttgaatgacaagaaacagcgagttatatgaatatgaagaaagagcattgcagggtaaaggaatagcaggttctggggttggaaggagtttagtatgtttgagaaacagccagaggcctctgtggctagagagaagtggagaatgaacagagtgtgcagagatgagattggagagatagaaagggccagctcctgctgcaagaggatagatctgaattatttttctaagtgttatgtaaagctattggagagttttaagggggaaaagtggaggagaagggaatgtgtcattcactctgtgtccctattgcttggcacataacaggtgctcagaaactggatgaatgagctgagataatgcatatcaagtgcttttgaaacaatgaagtgtttcagaaatgacactcatcatcagttggaggagaataagacactgcccccaataccattcttttagatcacaaagctattacagatttctgggtaatgagggtggaaatctagaggcacctgattttttacagtgccttatttctgttaaaataatttcaaaccacaccaagatgcaggattgcaatagcactggccagactccagacaaaattcccgtgaagaattcactcttggctacctgaggcagaacagcgaggtcaggaagggaaaaggtaatggtttttcatgacccctgatatctgagacacacggggctctgataggtaggaggtacgttctaatgaggtcatggctcttttattgacccaatgccccaaatactgtgtttcttactacttttcacttggagactgtgatggctggagttgtgacatggtggaggatgcaacagaaagagaaaacagtggatgcttattgcaacctgagagccaagatgtgagaactaagtgggaggaatgaagaagagagaaggagtggtagaaacagtgttccctgggtaagatttcattcacctctatgtgctaagtgctttgcctggcatattatagaagggaagaagacacagaaggtctcaaagggtttgagtggatcaatacatacattacaccaggaatataattgggcagagaatcagaagagctcatagatcccagaggaaagttccagactcagtttaccccaagggccttcaggttctggtctctggtctggagattctgatggctggagttgtgacatggtggaggatgcaacaaaaagagtaaacagtggatgtttattggaacctgagatgcaagatgtgagaactgaagcgggaagaaagaaggatagagaaatagtggtaggaacagtgtactctgagtaagatttaatgcactggtgctgatgagacaagagctagacacatgttaaacaatccatgaataaattccctttgtatcatcagtggggcaactatttctcctctgcccacactcaaaacatagccagcaggcttcagaagtctgtccaacagcagaatagattaatcagcctttcatcaaaggtctgagggatgaggatgcaacaggatacaggtgaacaattggggacactaaagaaccccagaaacccaaaactccacccaatgtgttgatagacaaacaccaagactgcctaaatgttttatctttaaaaagaaggaaaaaattaaaacaaaaaaccaacaacctggaatctgagaaacaacttccaatcataaatgaaaaggaacgttgcactcaaaatgcatagaaagtacacacattttaaagaattcgttatgagaaagagaagaaaattctacaaggcatctggtatgctgccagtaaaattaaagaaaacatgaacttataggggaatggttaaatgaattgagatacatccatatggcagaatattttacagccattataaaccatgttttcagaaactaaataatgacgtagaaatatgcttacaatagaacgctatattttaaaagggggatttaaaaccagtgaataccagaaaatccctatctgtgcatgaatgttcatagaagctttattcacgatagcaaaaaactgagaacaacccaaatgtcctttaataggtcaatggttatataaactctgttctgtctatacattgatacatgcaacaccctgcatgaatgtccaggacgttgcgccttgcaaaataagtcaatctgacaagattacatactgtatgattgcatttatgtaacattcttgaaacgacaaagctatacagaggagacatattattagttgttgccaaggtataaagacggggtggaaatataaaggggtaacatggggtacctttatgatgatgacatagctctgtattttgagtgtagtcgtgattccatgaatctctatatgggataaaattgcacagaatgatacacatatgcacacatgtggtaatacatgcatgtaaaaattggtgaaaactgagtaagatctgtagtgtagaaaacagtattttagtagtggtcaatttcctagttttgatattctgctaaagttacacaggatggtacctgaggaagctaggtgaaatagacattaaactctatgtcgtattttcgcaatttcctataattatttcaaaataaaaattaagaaagataatatataccaaagaatcccaatttcatttaagaactataaagaaagaaatccaaattttgactagaagaaaatactccattatattggcagtgacttttcttttctggttaatgggataatggtcatttttatattcttctatgtattattctgtacttccaaaactttctgcagtaatatatgttacttttgtaatctgaaaagaacttatcatttctgattttaaatatttggtgaatgtaaaaagtaaacatttaaaggaaaaagtatataataatattataaaagagaattgagaaaaagaagggcaaaaaagaaaatgacttggtaagatatgaaaacatggcaaggaaatacaaaatgtaatagcaaagttaaatctacattgaaacagtacaaaacactttagaaactaaaccgatggtatgtaggacaaacacacaaaccctgcccagaatgctgagtcaaagatcaaagacatgaaatagagacaaaataaaagatgtggagaaccaaacataaagattcagcataccactagctggtgtttctaaaaaagctatcctaaaaaatgggacaaaagcaataatcacagagacaaaatagcaaaacactgtccagatttatggatgacctgaatttgtaatgcaaatagatacactaaatgccactgtctggaaatatacatgataaggtttcagcatttcaaagatcaacttttatattctgcatgtagccaggcagaaaacaaaacaaaacaactcaaaaaatgttttacctggaaagatgaaaacatcaaactagtctcattttttttcctccataacatcaagttttgagaaggaaagattatgacctaagcatctctaccaaatttccaagttgttataataataataaggtaatgaggtaatcataattgctacttatgattaagtaacaataaggcacttgataactcaaccgtcataactaattaaaatttagtacaactagaataagatgaaagtgtctcaaaataattatttagccatctcaagtcaatggtcaacattatataaagagagttttcatttattaataagataaggaaaccactattatttattaccattatggattttctagtaaatccaataggtcatgagaaaaaaaaataaggaagttcatcactgcttccataagatacgattgcttacttagaaacaaaatgagctggaaaaaaattggaaacaataattatcgtctggaggtgatgagttacaaaatcagtatgtctacatttttcctgtgtagtatttgacataaagcaattagaaaatacaaaaaaaatccatgcagagtagaaataatagaaataaaaacaaaacatccagaactaaaggttaaaatacacacacacgatcttggccaagagatgaagatatatcagtgtctatctatatataaagatttgaagagctcaatatgccattttcctaaataggaaaatttagtattattaaaatgtcacttcttccaaagttaattaatgcgtttaattcaatgctaaccagaattctaaaaaggattgcttcaaagcttaatacaattattctgaagttaatttgaaaatataagcagatgagactgatcaagagatatgaggaaaaacagggcaagtaaaaggaacatcttgtcctgccagatattacaatttttgttgttattcatctttttttaaattttatttttaattgacaaataataattgtatatatttatggggtacagtgtgatactttgatacatgtttacgatgtggaatgattaaatctgtctaacaaataattgtatatatttatggggtacagtgtgacattttgatacatgtttacaatgtggaatgattaaatctgtccaacaaatatctgtctaccaaatctgtctaaaagcaacccaggtatccatcatcatatgaatcaataaagaaaaggagaggggccggatgtggtggctcacacctgtaatcccagcactttgggaggccgaggcaggaggatcacgaggtcaggagtttgagaccagcctggccagcatggtgaaaccccatctctacaacaaatacaaaaaattagccgggcatggtggcgcatgcctgtagtcccagctactcaggaaactgaggcacgagaattgcttgaacccggcaggtggaggttgcagtgaaccgagattgcaccactgcactccagcctgggtaacagagtgacactccgtctccaaaaaaaaaaaaaaaagaaaaaagaaaaaagaagaggacaaattaaaattttaataagatacttcataaaatatcctagcagacaagttgacagacagatacatgaaacataaaagatgcaccagttaccagtgaaagaaaagataaatggtgctgggacaattaattatctatttgttacaggagaaaacaagctttaaataccaaaataaattccaatcagattaaaataagtgcaaatacgtgaataaaatcttaaaatattaaagatttagcatctgaagagggagaaatttgtgagcaatagaaaaaaaatcacaaagcaaacactcaacaaatttgacaatatagaatctatttaaattacaaacaaaataaaacaacaaattaaaaaaatcagataaaagtttaatgtatttagcatatgaatccatgggaaaatattaacattcagcagaaaaaatagacaaaggatgtgaaaagacaatgtagaagaaaaggaccctaaatgacaaattgataccaaaaaaatcagtttcattattattcagataaacaaaaatttttttaaaaggctgcctttaaaaatcaaacaaatagaaggaaagctttaaattgttacccctcaatgctagtagtgtaaagacagtgacatggtcaactacatacattgcagttggagtaaactttgcagtaaacaagttggaactaagtttcaaaagtcttaaaaatattcagtttcctttacacaataattcttccagaaatctaccttaagaaagtagtcacggctgggcgcagtggctcacacctgtaatcccagcactttgggaggccaaagtgggaggatcagctgaggtcaggaggttgagaccaacctgaccgacacggtaaaaccccatctctactaaaaatacaaacattagccgagtatggtggcgggcacctgtaatcccaactacttgggaggctgaggcagtagaatcacttgaacatgggaggtggaggttgcagtgagccaagatcacaccattgcactccagcctgggtgacagagtgagactccatctcaaaaaaagaaaataaaagaaaagaaggtagtcatgaatttgttttcaaagatgtccaatgtagtaagatggaagacatccaccagggtattactccttggttgtgccaaggaaaggggagaagtcagtctggtttgtgaatttagcagacactgatctggcctgtcctgccttctttttccacctccttttggaaagaatctgccttcttgctgagaggatacctatgggtctgttctccagacataaggtgagaggtctgcccctgagcaggaggcccgaggtttgccagcaatgctcatgcctgccctggataaatctgtacacttctggggtacagtatcagagaactctgtttccccacctatgcagcatcctctaaagtagaaaccaatcagtaaccaatcagtaactaagttgacagtttgatctccacctgtctgaatttcctgtatctaaacctcattgtgctctgaagttgggcaggaacaagaaaagtgttattttatcaccacccaccaaaaataggaaaatgacgtagttttggcaaagaaagagatggattaaatcaacattatcttacctatagggtggaatagtatgcagattctaaaagcggtgctctgtaagaatacacaaaggaaaatgagtgttatttaagattaaatgagagaaagcatgtaacaaaaatagtatgtaaataaatacctctacaaattgtgagtacatagagagaaaaagatcagaagaaagcacttcaaaaagccagcatttgtctctgggttctggggttatgggtgattcttatcttcttcttaatgcctttttgtattatataaattctctataatatatttgtactgttttataataaaaaaacatttatttttgaggaaagcagaatctcaaaggtcacagtgactgtactgtttgtcctctgcacatcaggaagaataaactctttgatttgggcccagggcactttgaacatatgagtgcaaacccacgaaaggtttattctgagacaattcagcacaatttctctgagtcatggagaatgattctcagaccttttgtccttgcgcaggggcagtgcatctatccgtctacttacccaaacaaagaacaatggttgagcaggaacgatgtgcctggtactgtgctcatcttcacacatgcagccctcagaggcttgatcctcaccccaaaggagtgctgcatggcagggacacagacaagcaagcaaatatagcagcgtggtgtgatagatgcttgatgtggcttggctgtgtccccacccaaatctcatcttgaattgtaatcctcaggtattgaaggagagacctggtgagaggtgactggatcataggggcggtttcccccatgctgttcttgtgatagtgagtgagttctaacaagagctgatggttttacaagaggctcttccccctttgctgctcacttttctctctcttgccgccatgtgagacggtccaagcttgctttcccttcaccttccgccatgattttaagtttcctgaagccttcccaggcatatggaactgtaagtcaatttaacctctttcctttataaattacccagtctcaggtatgtcttcatagcagtgtgagaaaggactaaaacagtgctgctctcgaggaatgtacacagccccatggggaatatagaagaaccagcgtaaagtttctgcagtattaatggaaggaaatagcagttaatctgggtcttgtaggatgatgggccaggtgaatggtaggattttccaggcacagcaatggaagtgagagaaagagaaatagagagagaaggaaaaagacagagtggagtgtggggggaggcagagggagagggagagaaggaggggcagggggttgggggagagagagaccagagacaaaaagacagggattatgtaactactggtgtcttaaataattgtaaaccatgtaggaggatgtaccagttagttattctttggccataaatcatagaaactgactctaactaactaagggagaaaggaagcttattggattaatatagggcagctctaagaagcaccaagacatatgaactagaactcccaatgtgcagtttcaggaagctttaggtaactaaattcctctggaagttgcaggaggatggatcacctgttttcaatccaatgttttacccaagaataaattccagagagggagcactataggagcctaatgtcagtcacgcagccaccccttggctggaggacgggtgcactttcattgacagtagagagtgctcaacaaggacaggataaccttcccaatgccaaaccccatactcttaacctagaactgtagttttcaaccaagggtgcatttgcctcccaggaaacatttgggaatttctgcagacatttttgcttgtcacaaattgagggtagggggaagtgcaactggcatctagtgggaagaggaaaggagactgcaaacattctacaatactcaggacaccccctacgacaaagaattacttagtcctgaggttgaaaaactctgatctagaggtgaacatatgtgtgaaaacagaaactacaaaagtcatttaggaaagagagaaaaagggaggatggagccatgaaaggagtataagaaagataaactttatgccaagggcagtgggagggtctttgaaaggcatttaagccagaaagaggtgtgatatattcatggcaagcatgagcatgtcagtacatatgacagcaccctcttcaccaattttacagcaatattctccatttgtaattacatacttttaacatttttgtttgtcttttcatggccggccacacatcagtaatcttcattagggacagaaccacatctgctttatttactattgtatgcttgtgcctagaatggtgcccggcacataaaagaggctcaataaatatttgctgaaagagggcgggcacggtggctcaagcctataatcccagcactttgggaggcgaggagggtggatcacctgaggtcaggagttggagaccagcctgaccaatgtggtgaaaccccgtctctactaaaaatacaaaaattagctgggcatggtggcacatgcttgtaatcccagctattctggaggctgaggcaggagaatcacttgaacccaggaggtggaggttgcagtgagccgagatcgcaccattgcactgcagcctgggcaacaaagcgaaactccgtatcaaaaaaaaaaaaattgctgaaagaatgaacaaataaatgaacagatggatgaatggaaggatggaaggatggatatatagataaatgaatgggtggatgaaataaaggaatatattttaaaatactttgtatatcagagagtataatatttttaggtcatatttgtaaagattgcctacatagctgtcagattcccacctacaaaataaaccaaagcaagcatttggagaaaaagaaaggaatcaagatgattcacacccatgatatctgcattttacaagttctggctgagtacatatcatgcaggatcccacactaacatctgtctaatgtgcaaagggaggaaaatgtccacgtgccagacgtagccttcacctaggaaggcagagatacagcactagaataactttaaggcaacctattaacagaggctggaatgcatggcataccaatcatttatttattcaacaaatatatttattgtatacctaccatgcgtctgggcacagtactagatacaaaatatccattgtttaaaaaggcagacctggtctttaccattgcggtatttaaaatgcattaggaaagacaggccgggcgcggtggctcacacctgtaatcccaacactttgggaggccgaggcagatggatcatttgaggtcaaaagctcgagaccagcctggccaacatggtgaaaccccatctctactaaaaatacaaaacaattagccaggcgtggtggcatgcacctgtaatcccagctactcgggaggctgagacacaagaattgcttgaacccagaaggcagaggttgtagtgagctaagatcacgccaccacactccagcctgggtgacagagtgagacctgtctcgaaaaaaataagtaaataaaaaataaaataaaataaatctactgggaaagacagataatgagtcaacagagaaatatgcaattgcaaattataacagtggtagtaataaaacaatcagaatatagtgataaattaaaaaacacagtttggtggctgacttaacagggacgacatggcagttctcaaagggaaggatatttaagccagaaggatgaataaaaacctgccatgctaagaataaagaaaataatgtctcaggtagttggaatgataaagcaaaagtcttgaatcaggaaaaggttgatgtgtttaagaatctctaaggagcctagtttgctgggagcatagtgagtaatatggaaaatggcatgacactagtatagcgatatagacagtgctcagatcatgcagggtcttaaagtccatgataagctcttggattttgttttggttatctattgctgagtaacagatcacaccaaagcttaagggcttaaaacaataataatttattattttttcatgattctatgaattgcttaggtggttcttttgttagcattacctgggctctgtcatgctgatgcattcacctggatattggatggagttgtaatgtttaagacatggctacttgggcttcctcccagcatggcagctggattctaagaaggaacattccaaagaggcaaaactgagagctgcagatatcttaaggcccagctttagatgggcccctaccacttttttgggctacattgtactgatcgaaataagtcacagggccagcgttcttgatggaaggagtgaccaaaaaaaaaaaaattgtaactgtatttaacccaccacagattcatcctaaatgaaatggaaagtcattgaagattttaaggcgtggatgtaatataatgagatttatgttttccacatgttcacagtaaaactactatgggaataatgaattgcagaggggcaagaatggaataagggatgtagctttacatgttggaaagagcccacgatagaataaacaggaaaggtaagttagaataaaccttgaaatccaagcacaatataaattatcaaaaagaaggaaggctccccctcaggtggcatatattccttaatcaaatacctgcaaagtagatattaaaaatcatcagagcaaatttgcagaagcagcctagtgtgtcaaaatgagcattggctttagagtgcaacatattcaggtttggatcctggtcttgctgcttactagttagtttcctgatttgtaaatcaaagacctttacctttagcccttggagttttgatgaggagttgcataattcacataaagcattgtattgcaatacccaaattgcagtaagatcaacacgtaaggtttcattaggatatacaagagagaatttacaagcagaaagtatacaccatttatgcgtcatttaactgaaatgaccacaactaactgattttcttttcggagatttccaaaacccataaggtccctgtaaagaaagtggcctcacttggaaaacacgggccagcattgctcaagctcctgggaacactgctcgaagccaaagccaaaaataatcccattagtcacattcaaagtgctaagcagaaacaaaaagaaatcaaaattaatttcaatacttacagtgacagcagcaattaaggtgacaagattatggaaatcatcaccatcaccagagatctttgcctaagggagaaaaataaccagtaatataaaggactaagaaacagaggaatttgagttctgttcacaacaaatgaaccactagccctcagaggatttcaactgggcattgctccatgccataataatgtattctgtgcccattatatatcaacatcttaaagtaattacctctagtactcacatcatctctataagaagtattattgttctcgtctgtgattcaagaaactgagtcacagaaaggttaaacaaattactcaagatcacgttgatgaaaagtatcagaaccttgatctaaggtcatcctcacttgggaccccacttccatcccactgccctatctttgtagataacagcctcaggccccaaaagaaatgggattctttcagctccctcttatctgtgactacgtgccaggaattagagaaaggctgctcggtgtggtttgaatgctccataggttgtccattttttcctctttctgctttcttgtttgtctcactgcaagtgattgctaacaaattccagtatggttatctgaaaaagaccaaagcacgagaggggagcaacctgttctgaaatatcagaaaagatagattgcaccttgctgtgcagaatggcaaaagcaatcattaaagtcaagtgggcctggcataagaaagtccaagcagtgcaaagaagctttttgtggctctgccttctggtcctctctcctgggaatggtgcccttctgggggcttcgtatattcttattgatcacctctatggagacctggggtaatggagaaagaaagctggtctttcatctggattaacaagtggctgatgtgggctaatcatatcactcagtccaatttggagcaaattggaaggtcttcagagcaaagaagtagcaacagttaccaagattttcaagtgtattggtgaggacaaataatagcaatagcagtaattaaaatgccaacaacacccactgctgagatgtggagtggttcacagtctacaatacttcccctttatttacatttttatttgtgagtcagtagttctgttttctgaggttcttcagggggacctggaaagggcagagattcagaaatggttttagttacttgggaaattatgttaacctcatgaggtcaagaggcttcttgggtgagatgactgtgattgttaaagcttgtcttaacagaacaaatcatgacctcctgggtctgggttggttgcagaaacctttgtccccccatgtctttgggcagggaggtgttgacccatctttttctgaggcattcgattgttgttgtttttcataaacaatattcatcaaaaatcattgcccattggcccactggagaacagtcatctgtaactatatctgtacctaactctgtcatctgtacctatatctaggtccctctcagagacacaaagccttgtttggtaagaagaatagaggagattaatagggatttctaaagaattagctaaaccccagataaaacaagaagcaaataagtaaatccttgaacattcaagtcattctgccttaagtaactatcaatctccctggtaaatgagggagtggggaagatttgtcaagttcttttttcattccttcacccaggcatttactcgacaactatatcctgagtatctgccacatgccaggcacagttcaaggggcttggggacatcagagaacaacaaaaagacaacgactcctagagttgtgtgatttccatcccaacagaggtgtgtgggaggtgaggacaacaacaataaggatgatacagaggtaatgatatagcatattagcaggtgaaagtgcagtagaaattgaagaaaagcaggggaggagagacaaggagtgtgatgaggaggacggggttgaaatttcaaagacgacggttgcatggaaaagataacttgagcaaaagacctgatggaattagacatgcggatatccaggaagagggagcagccaattcaagtgccttctgttgagaatgtgcctggcatgtttaagcaaaaacaaagaggatggagcgcctgcgtgaagtgagagaaaggggattagaaggtggtgtcagagagcttatgggaaaagagaaagtgggtcatataggatctgcacaccatcttaaagatctggcttgagacactgggcatggtgctataatcctagcactttgggaggctgaggcagcaggagcccttgaggccaggagtctgagaccagcctgggcaacagagcaagaccccatctctattaaaaattttgttaataaaaaattagccgggcatggtggtgtgcgcctgtagtcccagctacttgggagggtgaagcaggaggatcacttgagtctgcgaggtcgaagctgcagtgagctatgattgtaccactgcactccctgctgggtaacagaacaagatcctgtctcaaaacaacaacagcaacaaccaccatgtatatatatatatataaaatctggtttgatgactcattgattgtttcacacttacatttcaggcaagagtaactttggcttttgttctatagggtagatccaaccataataataatattttttatattattattattgttattactcccatttcagagataagaacaatgagactcagagagtgcaagtaatttcccaaagtcaaggtcatcccaaatggcgaggaacagagtcagggtattagtaggaagttgctgacctgatgtgattagaggcattttgggcctccagatatctgccctgtagaatttctcactggattaagcattggcttctttcttttctttcttttagtggtagagtaccctggagcagcgattgtctaacattagcgtagacaagaatgacctggagctcttgttccagatgcagacttcccagcctcatcttgttttgggaggtctgaaaggcccaagaattgatgttattaagaaggaacccaggtgattccaatgccgggggttcctggaccatgcatttaagaaatgctgcaattagtgccaaaactctgagtgtggttgaatttaccagatgctttgttttgcaacaggaagtcaaacacagtgagaggagacagttgtacagagactgccagccctgattcaggtcgggcatgtctgtgtctgaacaacctctacccagaggccagagcagccaagcaagattgtgctcgtttgcttgtttgaaggctagaaatggggtagtaaatcctgctccaggtagcccagctcaaaaagaagttattttccaaagccgtccgtgccttaggtgcacacactattttaatgatatttcttcttttctgattgcaactgtaatgcatacttatggtggaaactaccaccaagcataaagaaaacacaattgtttctggttcccacttctccatggtaaccaccaataaattttgtatctttccatctagcattttttctctctctctttctcttggtctctatctctcatctaaattctctgagtctttgtttccttttctgtaatatgggaataaaagcacctaccttttagagttacataatggatgcttaataaattacattacacttattattcaactatgattgtgtttattttttccacttgacattctataatgaacattttccatgtgtcattaactactcttcaaaaacatgacttttaatagctgcataatgcaccatcatttaatgaaccataatttatttaactattctcctattattgagctttgaagtgttttctaatattttgctattggaaataacactgagtacttaaatcttatttttttaatgtctgaattttttcttaggatagatttccaaaagagaaatgacaaggacaaagagtttaaacattttaaggttttttatgcatgttgttaaattatctttccagggtggggtgggaagtgtatacttccaatagcgttgccagcattaaaagttacttaaacacatgtcagagatgtacatgtgtcagcatataaattaatgggaatggtgaaaagataaaattcattgtagatttcaaaatccattaagccttttgggtatatacaacgcattaaactctttaagagaagagactcagaaatgtggatgtattttctcatcactgttcactagctaagaaactttcatgaggagaaagacataatttctcattggcaggttgctaatattactccatatcttgaaaaaccttccactcttctggttcctattgctaaattccaatcatcctgaaggggattgataattgtggcaattgtacaaaatgattgctacctgtagaggcaatcacttccgtctcctgcagaactgatgagcaattcattatcaaggatttaattgctataaacctgtgaggaaaagggatttctcatatgatttccaggattttgtgcatccgaccctccttggctccaaattagctttcgtgaataggaatttgaaatcaggctgtggcaggagggtaatcacacagtggaggtgctgtggaaatatttgcataatctgtcttgaacttatgatgttacctttaaataggatgctgcacccatgagtggggtagaatcttcttgaataattatgacaattccggcagcaagcccacagctggcttcagtcagaaatgcaaaaaaaaaagaaaaaattagttaaaaataaggcatattaagagttatgatgaggcttagaagcttactggttagagccagaactctggactcagactgcctggattcaaagcatgcctccatttcccagcccttactagatgaacctgaataaggcagacatgtcctgcacaattctcagtaggaatggtgctgataacagtgcctgcctcacataattgctgcaaagattatcttagaatacccatgtaaagcctcaggcatggagcccacataaagtaatattattcctaaggtatcttgaaagtttctttcattttccgaatttgaatttgcccatggatctcaagtattttcaccaggaaaaactatatttttaaaattatcaggtctctctgcatggactccttgttttaagagattgcaatgagaaaatgtggaatatcacttattaatgacccactgtgtgtcagaaacaatatattatgacatttaatttttaccgactactttttaagataggtgtcattttgtctatttttatgtgatactgttgtgagccaagcttcaaatcctggttctctattgattacccatgtgatttagggcaagtgacctctctaagcctcattttcctcatctgtgaagtgggaataatagtagcctccacctcaccttacaatggtggctggcacacagtaagtgctgagattatgccagatcttattattatttgttagtgaaaaactgagactagcctcagtgtctcacacctgtagtcccagcactttgggaggccgaggtgggcagattacctgaggtcaggagttcgagaccaggctggccaacatggtgaaatcccgtctctactaaaaatgcaaaaaaattagctaggcatggtggcaggcacctgtaatcccagctacacgggaggctgaggaagcagaatcacttgaatccgggaggtagaggtttcagtgagccgagattgtgccactatacaccagcctgggcgataagagtgagactctggctcaaaaaacaaacaaacaaactgaggctcattcagataagcgaagtaatattcccaagatcacaaaacttattagtggctgagccgagatttgaatccacatctgtctaatcccaaaatgatctgttttactatatcacgttaacaaactctactgtgatagagaaacatccataataattcattcatcctcataatcttaacatctagtaaaattgtaactgccaaacattttcttactggtccatcacaaccagtgttttcaagttgtgctgaaagcagtgactcacttttctcacctgaaaggagtaggtaataatgctttccttgcagttttttccaggcttagaagtgactattaaaaaataatattttcttgctaactagtagccattatttttgttttataattccagcctatagaaataatgataaatgacgctttattctgtgtagtttattgttgataaatgtgaattttctgggttttttttttgtaaaataaaggtaatagactaagaattgtcatctctgcaatcaaggacccttgtcatctacgtactttagcttgggaaccactgtagtagaaactgttagtaactatgtattagaactgtgcctgcaatttgtgtatgtgccactaggtgacaaatgtctcttcctgcttaggccgattaccatttctccaggcacaggtaactagagaaagcaaaatttagcacatggttcagtttggacgttcatcactacattagccatgtatcttggctaaagaccaaatatgactaatttttataaatcaagagtaactactaataaatcaattaattaagcagattgtagttgcacccaaataaagtcattcataagtagaaataagacccttgtacttctccataaattctttggggaaattagtcactgagatgaaactgtattgctagatatagggaattcacacacagttgtgatattcaaaacattatttcaaacaaagaagcggaaatacccagagtgaatagagacctcagcttaagatcacaaatacaacatgaggagaagtaaatgaatattgtttacctatttcctggctgcatttggcatttttcacacacatattttaaatttaactctcataacagagactgttgcttgaaaccaagatgaaataacagggatcagatttactcctctacctgaaacaacttaaaaatggggtacaataaaggtaacatgtgttttccaatattggacatcagggagtacaagtcagtgatcactgaaagaaagaaacaaaatcagataagccccacaaattgcctctacttattactggaagagttttcaagttacagtatagggagggaggggggattcaggcaaagtccagtaatttctctgaattgagatagaattggaagttcagagagaccaagataactgcagttcacagggaagagtacaaaaaaggagaaggtgagggtgggggcagagagagagagagaaatctgaagaaatccctctcaagtcctagactgaatactgaccaccacatttatgtgaaaaaactatccaagtctaggacttttcctagacacctgagagtggcagagggaacaatcctaagagttcaaaagagccaggaaaagttcctattcctgccagccagagcaaaaaacttcataaaacacagggcactggggagagtacttagaagggaactgcctggagagtggtgcaaaattagccctagattaaggcctgctctggtctccataacaaagcataaaagcaagcctcaaaagattaaagtgtttccaagtaacctaattgcatcttagaacaaagctcaagaatatttatagaaatacaaaattatccaacacccaacaagctaaaatcacagtatctgatacctaaacaaaaattaccaggaatgcaaatccctggtaattgctgcaaaaagaataaaatacctaggaacacagctaacaagggacgtgaaggaccttttcaaggaaaactacaaaccactgatcaaggaactaagagaggacacaaacaaatggaaaactattccaccctcatagatagaatcaatatcgtgaaaatggccatactgcccaaattaatttatagattcaatgctattcccatcagactaccattgacattcttcacagaattagaaaaaactagtttaaatttcatatggaaccaaaaaaaagagagtctgtatagccaggaccatcctaagcaaaaagaacgaagctggaggcatcatgctacctgacttcaaactatactacaaggcaacagtaaccaaaacaggatggtactggtaccaaaacagacatatagaccagtggaacagaacagagacctcagaaataacaccacacatctacaaccatctgatcttcgacaaacctgacaaaaacaagcaatgggaaaaggattccctatttaataaatggtgttgggaaaactggctagccatatgcagaaaattgaaactggaccccatccttataccgtatacaaaaattaactcaagatgtattaaaaacttaaatgtaaaacccaaaactataaaaaccctggaagaaaacctaggcaataccattcaggacataggcatgggcaaagacttcataatgaaaacaccaaaagcaattgcaacggaagccaaaattgacaaatgggacctaattaaactaaagagctgctgcacagcaaaagaaactagcatcagagtgaataggcaacctacagaatgggagaaatatttgcaatatacccatctgacaaagatctaatatccagaatctacaaggaacttaaacgaatttacaagaaataaccaaacaatcccatcaaaagtgggcaaaggatatgaaaagacacttctcaaaagaagacatttatgcagccaacaaacatatgagaaaaagctcaacatcactgatcattagagaaatgcaaatcaaaaccacaagtcagaatggcaattattaaaaagtcaagaaacaatagatgctggcgaggctgtggagaaataggaatgtttttacactgttggtaggaatgtaaattagttcaaccattgtcaaagacagcgcagcaattcctcaaggatctagaaccagaaataccattgacccagcaatcccattattgggtatataccccaaaaatataaatcactctactataaagacatatgcacatgtatgtttattgcagcagtacttacaatagcaaagacctggaaccaacccaaatgcccatcagtgatagactggataaagaaaatgtggtacatacacaccacggaatactatgcagctgtaaaaaagaatgagatcatgtcctttgcaaggacatggattaaggtagaagccatgatcctcagcaaactgacacaggaacagaaaaccaaacactgcaagttgttgctcacaagtggaagttgaacaatgaaaacacatggacacagggaggaggacaacacacaccagggcctgttgtggcaaagggaggaagagtattaggacaaatacctaatgcatgcagggcttaaaacttagaaggtgggttgataagtgcagcaaaccaccatggcacatgtatacctatgtaacaaacctgcatgtgctgcacatacataccagaatgtaaagtaaaataaaataaaatatttttttttaacaaagtcatgctctgtcacgcaggctggagtgcagtggcatgatctcggctcactgcaacctctgtctcctgggttcaagtgattctcctgcctcagcctcctgagtagctgggaatacaggcaggcaccaccacactcggctaatttttgtatttttagtagagatggggtttcatcatgttggtcaggctggtcttgaactcctcacctcgtgacctgcccgcctagacctcccgaagtgctgggattataggcttgagccactgcacccagccaattaaattaaatttaaaaaaaggaaaaagaaaaaatttaaaaaaagaaaatgcaaagcatcaggaaatataatcaataagagaataaataatcaatcaaaccagactcagaaatgacacatatggtagaattatttagacaaggatattaaaagaatattataagtgtatctaatttgttcaggaatgtggaaggcaagttgactacattaagtagagacatggaagatatataaaagacctaacctgaacttccagaggttaaaattacacaggaggggatcaacagaagatgagacactacaaaagaagattagcaaatttgataacagcaatagaaaccttccacagaggcaaaaaagaaagaataaaagcaaaagagcatcagcaagttgtggtcaactttaattggcctaatacatgtgtgattagaggccccagagaatgggtaacagaaaaatatttaatgaccaaaaattttatgctaactataaacccattgatccaagaaaaatgaagaaaaccgcatcgatacacgtcgtaactaaattgcttaaaaccagtgaaaaagaggaaattatagaagcagctggaggaaaaaaaatacacattatgtaaaaaggagcaaaaacaagaacgacaaagacaatttttaaagaaatctgatgatcaggtatggggaaaatttttaaaataattatagcaatcttgtgagaaacaacgcaagcaaaaagattagtggagtagcttttttaaagtactaaagaaaaaagtctgtcaacctagaattctatactcagtgagaatatctttcaaaactgaaggtgatggagcaaggaggatatgggaaatgtctgcaccccctgctcaatgttgttgtgaaactacaagtgtgctaaaaaataaagtctagtaataagaaaagagtgaaataaagaactttccagacatacaaaatctaaataattcagcagaagtagaatgacactaaaataaatgttaaaggaatttcctcaggcagaagaaacatggtctcagaaacttaaggctacatgaaagaatgaagaggagtaccagaaatggtaactacatggtgtatatacatgattttttcttatattttaaatttatttaaaatgtaattgacattttaaagcaaagctaatactactcacaaagatctgttatgtgggtaccattatccccattttagagctaagaaaactaagactcatacgagtgtcatacttccccagggtcacagatatgtttgacagcaaagtccttgcctctcaaacaagttatatatgaccccaacagtgaaatttgtcaactttcctcattatacaccaaggtcttatagataggaagccttgtcttatctattttaaatcttcttccctgtagtacttaatatagaaacacaccataataaatacttgtttaataagttaattaagaagaaaatatattagtctctagggaagaatttaccaccttattttggaaacatgacacaaaaaacaatttgagaaaaatccaagattaggaatattaaaaacagctataatatactgagagattgtcaaatgtctggcactgaacttagcatgtttcacacattgtcatttaatcctcataaaaactctatgagaagagaaagtacaccatagattagatacacaacacctttaatggactggataacctatgtctttccatattccatcagttgcctgtgacttatcttaccttccaattgcatggtaggctgctcaaaaacctttcaaagttctgcatgttctgcatggagacatccccttctgcagaggaagtgtctcgtccaagctgatcttcaacccagataaaccacagagctaatggagggtcagtaggtgtgaacaaggatttggcttcttacagtgaagcaagatggaaaataaatggcttccatgtttgcacacaggcaggattcctgtcttcatcaacaaatacgaggtgaggcagaatgaaggttcataatcaccctggacctagaagcagaaagaacatgtttttaaatttttttcctaagattgaaaccacatttttggagaaaacccctacagaagaaggaaagaagttggagattcaggtccttggtaatcaggaccgaagagagtattttggtccaagatgaactgaaaaggtatttgtgggatgagtagaagaattatagggccagtaactgggagcagtggctcacgcctgtaatcccagcactttgggaggctgaggtgggtggattgcctgaggtcaggagttcgagaccagcctggccaacatggtgaaaccccatctctactaaaaatacaaaaattagctgggcatggtggcaggcacctgtaatcccagctactcgggaggctgaggcaggagaattgcttgaacccgaggcagagtttgcagtgagccaagactgtgccactgcactctagcctgggaaacagagcaagattccatcccaaaaaaaaaaaaaattacagggaaggagagaaagtcataactgatcacatacatccattatttcatttagttcaataaatgcatgctggtacacagtatgtgtgagtttcaaatatagtcaataaaactgacctgttcactgtcctcatagaatttacagggtaatgagtaggaaataaatatgtattgctgatgtggtgatttgatgttatcccccacatagtcatgtctatccacaaatttagaatgtctgcagatataattatttcagttggggtcatactggtgagccttaaatccagtagctggtatctttctaagaagagaagaggacatgcagagacacacatagagaagaaggccacaaagaaaaaagcagagagtggagtgatgcatctacaagcccagggtcacacaggattgctggtaaccatcggaagctaagagacaagcacgaaattgactctccttcagcgggtccaaaaggaactaccctgaagataccttgatttcagacttctggtctcctaaaccatgagagaacaaatcattattctaagccatccaatttgtggtgatttctggtggccatcctaggaaacgaatatggttaggtcacaaatgtgcacattataaccaggtttcaaagaaagtgcaccacttgtatctcctgaattagcctgaaaatcctcacaaatccttgtcctgaggggtagtggtgaaaattcaaatttagtttaatcaagttaattcagtatgatccaatactttaaaccatccctgaaggcaactcaatttctttcaagctttcccagttttctccccttctccttatatgtcccgttcattgagtatctggatggggatctggaggtggaagtacatggcattatggtggcagaaaagagaaggacctcagattctatattacctcccagttacatggcaggctgctcaaaaacctctcaaagttcttcatggagacatccccttctgcagaggaggtgtcttgtctaagctaatcctcaactcagataaacgagagagctaatggaaggttagtgagtgtgaacagggctttggcctcttcccaccatgcaaggtggagaataaatgtcctccatgtttccacccaggcaggcaccatttacagaatccctgctcttctggtctccatggcaatgccccttattgccgggttgctgagcagctgctggcagtcaaggaggaagccagtctggtgaattgcgctctgtgctctcccagcccagtcaggacctgtgatatgtctctccctgcttctccccaagctgtatatccctctgacgctgaccactcccacttagctcctaggccaggggagctgccctgcaacacactaccatagatcactttgcctctggtgcagcaacacctaaggcaaacttcctagccattctcagctaacctccaaatgctctcggtggttcagaaaaattctggctccttccattccccacaagagccaaaggaggctcaagatgctatctcagactagccagactttacaacagtgtgccgccgacctgaggcagtcaccccatgttgacacatgggagacatcttacaaatccctctcctctcagatgccaaataggaaacaggaccagaaaaacctctttttttgctatcatctttttcctcaatctatcttgctgatttcccctccctgcacttcatcccagagagtttgattaagatgcatgtgttttattacctgctccatcgagctgctaacttgttccttcccaacccacctgaaatgacagaaatgggacttcagctgcttcttcctctctctccccaggatgttccccattctacacccttctgtttccaaaagtagcatctttatttcctcttcctctaaagatgtattgaaataatactcttagtccagtttatgttgctatagcagaagacaacagactgcgcaatttataatgaacagaaatttatttctcacagttcgaggttaggaagtccaagatcaaagggccagcctgtggcgagggccttcttgctgcatcattccatggtgggaggtggaagggtaagagaggataagagagaggaaaaaagggggtgaactttcctaggaaacccacttccacaataatcccttcatgagagcagagcactcatgggctgatcgcctctcattaggccccacctcccagaactgttgcactagggattaagtttccaatatatgcttttgtggagacaaattcacattatagcaattattatttatcacaaaaaagagaaagaaaaaaacctctaaatttttcaaaataccctaattacttgagtaagcaaagatgcaagtaaaacatttgatgagtattaagaataatgctcatcaaataaaacagtgtaaatggcagaaaataatcaaagatttcttaaaatagttaacatattgaaggcatagtaagcctcaataatttcttttaattattgtagttgaagcattcgttgtagcattgttatgggtaattccaccatgaaccgtagcaattgatgagatgtgaattgatgaatgagcctgttcacagctcaacgggtgatgggtagatggcttcactggtgcttcaagaagtatttccaaacataaatgccattgccaaaatgcccaccacatcttcaaaatctgcaccaagcaccatgtctttataaattgtatttcagtagctacagctatagctatctttgtttttatcagttataacataggtatgagtctgttctcacactgctatgaagaaatacccgagactgggtaatttataaaggaaagagatttaattgactcacagttccacagggctggggaggcctcagaaaacttacaatcatgacagaagagaaagaatacacgtccttcttcacatggtggcaggagagaaaagtgacatgcaaaagggggaagagcccttatgaaaccatcagattttgtgagaactcactcattatcatgagaacagtatgaaggtaactacccccatgattcaattacctcctaccgggtccccatcccccatgacacttggggattatgtgaactacaattccagatgagatttgggtggggacactcaaatcatatcaacaccccttcatgaaaatgtactgcaacctaaaaacagtaagctctcttgtctcagtccatggcacctatccagatggaagaaggcccagaaactccagggccatgagaaccacagcaagagccatatctgcaagaaccaggagtaactggatgctgggataatgctggtgacaggcatgaaaacaaatgtcacccacgtgatgtgggaaggttggtatgaggcaacccacatcaagaggaaacagcagcttctgccccactgctaattttacaaaccttggtcagtgagcgcacagatcaatagtaccaaaacaaagctagagctgccatcattgatggtgattgggcacgtaaaaagttctagggggccaggcgtggtggctcacgcctgtaatcccagcactttgggaggccaaggcgggcagatcacgaggttgagagatcgagaccacccttgccaacatggtgaaaccccatctctactaaaaatacaaaaaaaaaattagccggtcatggtggcaggcacctgtaatcccagctacttgggaggctgaggtgggagaatcacttgaacccgggaggtgggggttgcagtgagctgagatggcgccattgcactccagcctgggcaaaaagagtgaaactctgtctcaaaaaaaaaaaaaaaaaaaaaaagttataggggagggaaagcccctaaagcagtccatcatcacaaagacaaaattcttcagcagaaaagccaaggagaagagtaaaggcatatgtatgtggaggggaaggggtctgcgtcctgctggactgaagtcacaagaagtcgactaagtgataataaatgctttgaaagatattaccagcgcaagagattagctgttttccaatgccctgtcacatcttgttttttactgacatataataattgcacatttttatggggtacagtgtgatgttctgacacatgcacacattgtgcaatgatcaaatcattgtaattagcacattcattaccttaaacatttatcatttcattgtcgtgagaacactcagaatacactcctgttaacctaggaaggtcatctctgtgcatgttctgccctccacctctcattttcaattctctgagctccactggttagccactgatgtctcatcagtgaagagcagcttccaggttaggtgtgatcattctgtacaaactgttccacacctgatcattactgggtggaaaatttccagcatcttcctgatctttctctaattaggtgcagagcatgtgagctttcttctcccttgaatcttcttccctgctcaccatgttggtaaaatcctgtatcttcttcaaaattattctgacatcatctcttccctgaaacattctctcatcctcccaaggaaaattagtcattctattttttccaaaacccctatactttatacagtacacattacaatttgcgtctaatgccctgtatcacacatatttatttacacaattgactctgcttgttttcttgagggagccaattttatcctgttcaactctgtcactttaggtcagtggttctccaccctgaattcacaatgaaatcacctggggaggcttaagaaatgcagatgccttgaagaaaccccaggggttctggcttcattagtcaagggtttggcattagagtgggtttttaaaagtagatagcttttgaatgtgacagataatcctaatacataaccaaggttgagagtcacttccctttttcctagcataggacttgatgtattagattctttgccatgtaactgtttcacgtgtgttacgttcaatgctcttaacctttggcaaattttcccctacaactgttattaggataagtcaccaaaatatcacttgtccctgaaaaatttaacaaacctttgaaatggaagtcaccatccatcagtgctgtagggtcataacaacacttaagaaatagctcctcctgaagttaacttcattatttaactgttaaatttattatttttgcatgaagcccacatataccctgaaatatactctgtggtccagaaacggaactctaaaacaacagcaacgaacttgacaggcgcttcccgggaagttcgaattccccacactctgtccccaccagccatggaatcctaagactgttcaaactgctttcctgtaatcccacataagaggagatcattgttagcaagagggctgcattggtatctgtgtgagatttccccttttgtttggttttgacttggagaagattttccattgtgatgctcagatgcaaaggcagaaagaaggttttacatcaggtagaggatggtataagctggaagcctgttgggagacctttggcatatttctgagttaacatggaagaagaagaactttgaacagttttcatcctaatgacatgttcagagtttcccccatcggcccctccccctcagtggtttgatcatctagaaacaaattggggatgctttgctattaatgatgttgacctcatttgcttcctcgaccatcagtgaggagtccccccccgatttccttttccctagtttgacctggaggccagctgtcattccacctgtgcctatttctacatattttaatattcaggcaagggttagacttaataagagcagacagattctgattctccgtctttattattttgaaagccatattaacctggtctaggctgaccttataaaagctgcagtgagagccttataatgtaggccacagccatcccttccttgaaaatgtcttccctgatgctaataacccatcactttaaattagttctttaggatttagggcagctagtttacagccagacacctgcctcatccccattggtaatagcatccaccttccagggtcagaatgaagtcctagaaacagggggaatatgatgcaattcagcccctgttatattacaggtatggacagagaaagggctaattatggttaagcaacatggagtatcagctttggggaggaatgtggagaccagtgctccccaaagaactgggtatcaagggttcttgttgagcattaaggggatagacttgtcatttaaaaaaatggaagacccaggccaggctcggtagctcacgcctgtaatcctggcactgtgggaggccaaggcgggcagatcacctgacatcaggagtttgagaccagactggccaacatggtgaaacccgatctctactaaaaaaatacaaaaattagccaggcatggtggcaggcatgtgtagtcccagctattcaggaggctgaggcatgagaatcacttgaaccagggaggtggacgttgcagtgagccgagatcctgccactgcactgcagcctgggcaacacagcaagactccatctcaaataaataaaataaaataaatgatggaagacccaaagagacaatacacagtattaatagtgtctttggccatttttgcattgctacaaagaaatacctgagactgggtaatttataagaagagagacttaattcattcatagttctgcagagtgtacaggaagcatagcagcatctgcttctggggaggcctcaggaaacttacaaacgttatggaaagtgatggaggagcaggcatgtcacatggaaaagcaggagcaaacaagagcgatgggggaggtgctacacacttttgaacgatcagatctcacaagaattcactcactattgtgaggaccacaccaagggggatagtgctaagccatttatgagaaaccacccccatgatccatgatccagtcacctcccaccaggacccacctccaacactggggattacaattcaatatgagatctaggtgcggatgcacatccaaaccatatcaaatagtaattaaaagtagcagatggcgaacgatttccatggctcttggactgttttaggagctgtatatgcattgtcctctttgatcctcataacaatattaagaggaaagtactactattattatcaccctgatttataaatggggaaactgaggctcaggaaaatgcagaatttacctagagtcacacagtcgagaaatggtgaagctgggatttgatgccaaggaatttgaccccctcccaccccaaatgatgttcttgaccattatgctatactgccttattaacagggacctggttatgcattcttttcttgaaaggtggaatcttagcatccaggacatagtttgaagtcctgagtgccaagagaggtaaggtagcttgcaaaaaacacaagcctcacacattgcccccggctgtcctggtttcttgggctggactccaccaccatcatctgacaataatttgatattcattttaggaatcataaatatggccaagagtagactgcagaagatgtttgcccactggccatatatgtctgagcactgacaaataaaaagtatgcaacccagtcaatcagaggcaaaagtaagcagcgatttcaagactgctttcagcctcttgaagatagctccactggctgaaccacagtgctaatcaagacaagattaattagttcagtgtagtgtttctcaacctcaggacaattgacattttgggctgggtcaaaaaattttttcgaaacagtcttgctttgtcacccagactggagtgtagtggtgtgagcatagctcactacggcctcaaactcctgggctcaagcaatcctcctacctcagcctcctgagtagcggggactacaggtgagtactaccatgcccagctaattttttaatttttttttttttttaagagatagggtcttgctatgttgccaaggctggtttcgaactcctagcctcaagcaattctcctaccttggcctcccaaagtgggcaggataattctttattacgcagagttgtcctgtgcctttccatatgctcagcagcatccctggcctccaatcactaaatgcccatagcaccctctgccccagttgggacaacccaaaatgtttccagacgttgctaaatgtctcctgggtggggtggtagggtatcaacacaccagtgagaaccacaatatagttctcaaactatctcaaactttagtgggcatcaaaattataccaggggttgataaaacagaggtttctggccctatcaccgtagtttccaagacgttgattttaggtcagttctaagaatttgcatttctagtaagtttcatgtggtgctgatgatgctagcctgggaaccaccctttgagaaccactgagctaatccattttgttatgtcgtcagagctacacatattattaatcctggaaagggacagtagagatagtgtgaatgaatcggatgccatctttcacttgctaggaaaagaaaggctctgtcttagactttctgtcgaagagtccgggagtggaaaaaagctgcagttacattaaaaagacatgaatttaagcccataacaaaaaactggatgagttatttaaaatctcaaaccctcaatttcctaatctatgaaatagagctaagaacaagtgacattttatttacactggattgttggtggctcaaagaaataatgaaataacaatcccaaactttgatcaccctcaaaacacattacaatttcttaccacatccacccaccacttgaaattaatacttctttaaactaattcactaaaataagtgggaaaaaaatcttaattatctactttattataagaaatatctgtaaaaatcatcattttcacttgctaattatgttttccctaatatgcattaaaataactattaaaaatttccatgtatcagctacaattatctatatctcctgtggttcacgttccacactttggaggacactgagatatttatgagggagatttagatattgcaaagtgttgtacaaattcaaggtgtggtcatcaaccttgcctgggcagggcagatgttgtaattgtctagaaagtgagcaaatggtgacatcaaggtggccctccatggtgtaaaccagtgcagcaagcatatgttttccttctgctcttgaagcttggctgtatatcagaattagccactgaacctgttatcctatcacttttggtctttgagagctcttcctaatacactttgataccatttcaaatgggagacagtgaattaaaaggggagagcaaactggagccagtaggagtgtacttaacactaacaagatccacctgagtttcagttatttctcttgttatcaaaacgggtcttcattcagaagagaaccatcaatgactttagcacaatacttcctgaggacttcaccccagagctttgtcaatgttggcaaattaagccttctctgtctgcctgtggtcatgcagctttttagcctcatgtcttcttggaattggctcaggtcctcagccaactgcttctcattttattttctactttttgggacagagtcttgctctgttgcccaggctagagtgcagtggcgtgatctcagctcactgccacctctgcctcctgggttcaagcgattctcctgcttcagcctcctgagtggctgggattacaggtgtgcaccaccacacctggctaatttttgtatttttttagtagagacggggcttcaccatgttggccaggctggtctcgaacccctgatctcaagtgatctgcctgcctcggcctcccaaagtgctgggattacaggcatgaactaccaggcccaggctgcttttcattttaaatctatggttctcccctctacacatattagcctcaccttagaatatttttgaaaaattaatgcatgggccctaccccagaccgattaatgcatggactccacccctgaagatggaacctaaacgtaagtatttttagagcacctcaggtgacccaaacgtacatccatggtgaagaaccctgctttaaaggaaggagaaaaagtccccagatacttgagcttcctgtaaccgaatgacttctttttttagagacaaacaagcaccaattttagttctaagaagaaggaaatgccctttcccctttgacctcatacactgactttttctccaccccaaatggcaacccattcttttccacatctaggctcaaagaaaggaacaaacgaagcttgttgagtacctaatactataacctgccccaggttataaagtgtttacttcaacaaacactgttctaagggttttacatgaaattcactggatcctcatcatgagtaaatattattataagttttcttataaaggagagctattaggttgtccatccagcacaaccacaacttctggaatctccctcagcgtttttggagaacgcctccctccctccatctacaaggttctagtgggagccgccattttagtacaacaccactcccagtctttagacgcagataattgggctagaaataaaatgcacaagatttagtcaggctaattaacttcttcactgagagcccagagttgagaggggcagagagagaaaacgagaaagagataggagaaagtgagagagaaaagatctgcagagtcatgtgactagtctagttaaatataaggtagtggcgtcagcagtcagtatttttcttgtatgtgtaggtagtaaaggaagctagtctgcagtgagtaagaagaatgaagcaaacacactcagagaagttcatataacagataaagcccacacggaattcaagttcctagttatccctgtttgccccgacactcagatctgctcttgggctcggtgagaaacctcagtatcttataataaattccccctttttgcttaaacaagcctgagcgggtttctgttactggcaaccaaaggaacttacattaatatgaccatatgtaggatatggggaaggagttcaaaaaagtataagactttggcagatgctctataggaatggaatttacaattcaggaaacgtgatagaaaaatctaagatttggagtcagacacagggcagctccaaactctcactcaatagactgtgtcatcttggatagttattttacctctgcgaaccacaggcttttcatttgcataaaggataccaatatttcatgtggctgttgggaaaattaaacactagtatactgcctggcacttcggggggcctcaattaatcagaattcctttccctgtcttaaaactagatccccgggaacaaagagaagaggcttctgaaagcttgcccagcaagatcatagacccgagcatgaatgggttttatgtgatcataatcccctcacctttccccttgctcaggagaagaggagacataacatcatataacctaaagagtccatttccacacttctgactccctgcaacccaaagagcatcagagcagccaattaagatgttttattttaaaagttctcagtgaaggaaagtgcaaagaagaggtcacagaacttggagttcaaaaaaaaaaataagaaaaaaagtccactggagcatgtactctgaacgtgtcttattctaaaacaaaaattgttttaaaaactgggttactgaattgaaattcatcaagatcctcattaaaagtatgacctttcctcatatgaatcccaaaaagaaagaaaggcatttttttggaggtcatagaaaaaaaactggggctttggagccaggcagattctgggtttaaattttggctttgcctcttcgtacataaatgacctgcagcaagccatgtcccctgttccagcaccagttaatctccccacggtaacatagacctaaaatccctaattaattgagttgataaaggaattacataagattcttgtaatgtgcctacgtagtgtctagcacttagcatatgctcaataaaagtggtcacagctcctttccataccccataaagttttagtatggccctaaagaacatgtacgtgatgatcagacacagtcaggggcaagttccacttctgatttgatgaccctgtgaaacttacttaactttttagacctccagttttgtaaataaaatataaaatcctaagcttcccagctgactgaacagactccctcttggccaaggggaccccagagaaaacctgaaaaactgagttcccaccatgacagaataggaggtcaaacatgcctcatgacagcccctctgttttgcagtttggacacaattaaccagagtgaatgttcaaatagcaatcgtaagactgatagaatggattatttgtggcaatggatatcaaattataaacaggacctaaatccatgccaggcaaaagttaactcacacaccccaaaaggtcaatctggattgtactgtgtcttgatcttgcaactcaaccctggcatagcatgccacgatgattagctgactttatctcaacttaaacattcctttctgctgactccaagtttttagacaaagctttgttcctttaatcatttgcaaattaaaggacctctaaacccacctatgacctgtaaatctccacttcaagatatctcaccattctggggccaatgcataatctccatgccttgatttatgactttgcttgtaacttctgcttccctcaaatgtataacacaaagttacagtccaactgccttgggaccacttactcaaggctactttggtttgtgttttccctgggctgcagtcacgcatattggctcagaataaacctccttgcaatatgtgacagagtttgtttttttccaccaacagtttccttctttgttaaacagaaaaaacaacaccaacctatagggcatcctgtgtttgcccacccatatccacttccctttctttcttcctcatagaagtatgatgttcttcaggcagtgccgttccctggtaggcagatgcttgtgagaggccaatcccacccacagctccaggtaacctgattgatctggaggaaatcctattctcttgattggttcaggaatgggcatgtgacataactgcagccaatgagacaagagcagaagcttactacagacttttgggagtctagtgcttggccgcctgggtttaaatatcaccttctaactgggtgcagtggctcacacctgtaatccccacactttgggaggccaaggtgggtggaccacttgaggtcaggagttcgaggccagcctggccaacatggtgaaatctcgtctgtactaaaaatacaaaaaaattagccaggcctggtggtgaacacatgtagtcccagctactcaggaggctgaagcaggagaatcacctgaacccgggaggcagaggttgcagtgagctgagatcgtggcactgcactcccgcctgggtgacagagtgagactccgtctcaaaaaataaataaaaataaataaataaatatcacctaccagctctgtgtccttagggagattacttgatctccctgaacttcattttccccatatgtaagattgagatgattataacttctgttttatggggttattgtgtggattaaatttaaatatggtaagcacttaagactgtgtctgacacataggaagtgttagctgttgcttttatagtggctgctgttgtttctatccttgttggtagcaatgacaataagtatgatggcatccgtgataagagctaatcatttttttgtgccgttactgggatacttgggttgactgtgacaacaccacctacctatagtgtaccctaggcaccttgtttttgcccccccagaaccacttccctttttcttccttccttacagaagaagcatgatttccttcaggcagcaccattcccaggtcggcagatgcttgcgggaggccaacctgacctgtagctccaagggtgacctgattggtctggagaaaatcccattccctccattggttcaggaatggtcatgtgacacaactttagccaatgagacaagaacaggcgcttgctagagacttctgggaaaagttttctcaaggaatctcttccatttctgaatgttgtctgatctccacatgatgcctgggactatttcacccacttcatgaccagcctaggggtaaagccaacagtgagtaaagcagagaagaaagataaaaaggagcttcctggagtcttgtattatcattgatgccctgaatcaacctccattgaaacttgccttacctgtgagtttcctgttgaaggcagtaatgaataacctctcatttagtcagctggggttgcaatttcaattattgtacccaaaagtatcctaactaatgagagttaattaagttaccacatgtaaattgcttgtcccagtcaaacctgggaccccagtaagggcaccgaaaatgattagctcttaacacaaatgccatcacaccagcaataataaaaacaacagcagccacaataaaagtaacagctaacacttcctatgtgccagacacatatcttaagtgcttaccatatttaaattatttaattttcacaataactcccccaatcttacagatggggaaaactcagttcagagaggtcgagtaatctttctgaggtcacacagctggtaggtgatgtttaaacccaggcagccaagtactagagtccatgatacgaaaaagaagaagatcacaaagaaatttgatttgaccttctggtttggcctccctttctccctctagctgctaaacaaagtcaaggcaaattagcagggtccctgaggagcgatcaccatgaggtggagaggggactgattttgaagtcagagatgtatgagcaatctcaagtaagatgcgtaatcccaccgggactgaattgcttacctgtgaaatggtggggcggtgtggggggcagggaatactcacctcttaaaattattataaggatttagaacaattcatgttcagtgtgtggcacagggcctaaatgaaagctattaaagatgaattatcacagtactcgagcactttcatacctttctcccatttaccagctgccttctttgtctcatttagtgatgacacgaagaagaagaaatacttaaggagattgaatgccaaccaaatcggcagttaacacttgaatttaaatccccttttctgcctcccctctaaggagtctgatgataactcccttccagggtttcatttcataacctgggccaatttgactcattatctccctgtcagcacgaagagaatgaaaaccagttgtcattaccaacttatccctgctctgaatagaatatgggatggaggagaagtgaatgccctgtataggttgttaacccccaagaacaaattcaaggattctgggacaagcccagccctagatcaggctgcaaatgtccagaggcttctgggtaacctcaggtgataaccttggaaggagggggatacagggataagagcagaggaaacacagctggaggaagtaaactttggcaaaaatgaatggagcatggtgttgagagccacaaatcacatcaaaccagagcagaggttccagactcagactgacctgggcttgaatccaagctgctgccctgtggccgtgggcaggttgatctcactaagcctaagttttcttgccagtatgatggaataatactatgtgcgtgtgtgtatgtgtgtgtgtgtgtgtgtgtgtgtgtgaacgctaactaaaatatgactatcctctgagagcagttattgtttttacctcatgtgccaaaagttgggaaagtgtcccccttgcttcacatggctgccttctgacaatttcttttccttcctgcttccaacatttcagtttctttcaaggccatgccaaaccttcaccatccacagatcctgctttcaaagtcttctgctgatttcccagacactcactctttcattccctgaagattccagcacctggatcactgtcttcctgtcccctgctattcctgtcttccatcctcgtgagtctaatatccacataaattatccatccaatcccctcgcttctcaggtcttttgccccctacctccaaaagtctggttttctgccccacctcagccccttacttacctcattactctgtaggactttgagtgcatcagatccaagatctcaaacctaaacatttcattctccaattacatcctcttatttttccagctcacccttgtgaggccccttcatctgatcattcttctccaccagtgagacatctaatccatggtcccccatgactacctctttactcatcatcccttgtctgctcttactttcttccccacacagtttagattcagagtcaagcactgtatcttacttggggacacctttaacgctcttatctcctctcgttttggttccccaggcaagccacgtctagattaaacccagtacttcacctattctgtgcctgaagcctaggcagctcagaatgattggagaaaacttacaccaagcttactggcctctccttacccttatgaccacagtcctgctgaaaagttctgctgttttccctagaaagtttgcctttctatttttccaagatgactacttggtgtcttctctcccaacctccaatgcttctccaatcttagaaaattgatgaccatcctctcgtataaggacctcttcatcaccccacccccaccaccaaatacacaagcctctgtggggactaattctgaccttccctgttgcattggctggactgtctatctaaagccaacccctccacttatgcaaagccccttcttcttcaaggatatcactgcttcaattgtcccccatctcttctgcatcaatttccccctctttgtggattatttctataagtctatatgcatgctaccataactctcaattttttttttttttttttttgagacagagtctcgctgtatcgcctaggctggagtgcagtggcgcgatctcggctcactgcaaactcctcctcccaggttcacaccattctcctgcctcagcctcctgagtagctgggactacaggcgcctgccactgcgcccagctaattttttgtatttttagtagagacagggtttcaccgtgttagccaggctgatctccatctcctgacctcgtgatccgcccgcctcagcctcccaaagtgttgggattataggcgtgagccaccgcgcctggcctggtaactcatttttaagaacacttcccttaataccacatctccctccaaccaccaccccatttctttttaccatttacaacacaatgccccacattcaagagtattctatctccatatgtctcttatccacaccatttcacttttttttttttttttttgtgacagagttttgctctattgcctgagctggagtgcagtggtgcgatctcagctcactgcaacatttacctcctgggcttaagtgattctcatgtctcagcctcccaagtagctgggactataggtgtatgccaccatacctggctaatttttgtatttttagtagagatggagtttcaccatgttggccaggctgctctcaaactcctgacctcaggtgatccgcctgccttggcctcccaaagtgctgggattacaggtgtgagtcaccatgccaggcccacagaatattgacttatcaagatggctaataacttccaagttgccaaaattaattattaattttcaaccctctttttacaagaattgtcagcaatctttgacacatttgaccacatctccctgtgtgaaaacactgtgtccctgactttaaagatgccacactcttcttcaggggaaactctccttcagtcttttttgctggatcttcctcatatatcaacctctaagtgctgaaatgttccaaggtgtagtcgttagcctgatctgtcttctcccctcttctctttccctttcctttctcctctcctcttatctttgccttctaaaatctttccctagatgaccacatctattcttattctttttaatatcacctatatgttgatgatcccagaaataacattgctcgccaacctttccacaatattctgcttcccggctgggcacagtggctcacgtttgtaatcccagcaccttcagaggctgaggcaggtggatcacttgaggtcaggactttgagatcagcctgaccaacatggtaaaacccccctctctactgaaaatacaaaaattagctcaatatggtgctgtgcgcctgtaatcccagctactctggaggatgaggcaggagaattggttgaacccaggaggcagaggttgcagtgagcttagattgtgccactgcactccagcctgggtaacagagtgagactccatctcaaaaaataaataaataaaattctgcttccaactcaactctccagttcctaagtcaaaatcttcatgtagacatctaatgagcatcttaaatttcttaggtcaaaaaatagaaatcttgatgtctctgagagaacccactccatgtgcaaaatatatgctcaatctggccacttattactcccttcattataactcttatagcctaagccagggacccacaaactatgctccttgagcccaagccagccagcaacctgttcttggaaaacagtcacactcgttcgtttacttattctctacagctgtgtttatgctataatggcaggattgagtggttgtgacagaaaccatttggctcacaaagtctaaaattcttactgtttggctccttgcaaaaaaagtttgctgccccctggtctaggcccctgttgtttcatgcccatgaggctttcctggcctccttcttggtagtctttcttccataattttccttctgcatccagaagccagaataatgttcttaggacacaaatcatatcttacaactctcttaatcaaatagctctaattgttccatcatatttgcaataaaatgcccagtctggttcacggtctgcaagacctagaataatctggatctgctaactacagcttcacttcctataacttttcttcttactcaggcactgagcctttgtactgttcgtccaatagaccaagaacttccatccttcagggactttgcatatttttttctttttttttttttttgaaacgaagtctcaccctgtcacctaggctggagttcaatggcacggtctcggctcaccgcaacctccgcttcccaggtttgagcaattctcctgcctcagcctcccaagtagctggtactacaggcacgtgccaccacccccagctaatttttgtatttttagtagagatggggtttcactatgttggccaggctggtctcaaattcctgacctcgtgatccgtccgtgtcggactcccaaagtgctgggattacaggcatgagccaccgtacctggcctgcgtttgtttttctatctgcctaaataacttttcctctacatatccctgtggctacttcttttcagtatttaaatctctgctgcagcatcctctcctccccagtgagaatggcatttctcctttgacaggaattttgtctctctcattggctgccatgtctatagtacccagaacattgtagactctcagtatataattgtggagtataagaacaaacgaataagccctaacatagagataagcataaagaactgtgaacacacaaagcaagggcacccagcacttctcggcattgcggaatggttaaaaagactagcaaagaagaagacgctggaaggggaagaaggtgtttcagaaagaagaacaaaaatgtacaaagacagtagccatgagagaagcttgcaccatgtgcatgtacaaggcacatagaatataccatagatatagctacagatatagatcagggtgtgggggtggaaataggcatagtcagataataaaagattttaactgtgaaacagttacatcttttctggggtcgttgagaagttattaatggctaaacagaatagtggcatgatcagaaatgctgggatcccacactaatgttgtcctactactcaaaattccacagtctttctccactactagtttctctggactttcagcatcaaggatcttaatttggtgtctggttcttgagtcaagcttaacatgtttcataactctgacataccagctccacttctggaatcccataataaggtaatgacctaaaatcctggaaaacatacatgcacaaaaatgtttaacatagtataatttatactagaaaaaaaaatttaagggccaggcctggtggctcatgcctgtaatcctagcactttgggaggcctacgggggcaaatcacttgaggtcaggagttgaagaccagcctggcccacatggtgaaaccccatctctattaaaaatacaaaaatttaccgggcatggtggcagttgcctgtaatcccagctactcagaaggctgaggcagaagaatcacttaaacttgggaggtggaggttgcagtgagccgagatcacaccattgcactccagcctaggtgacaagaatgaaacttcacctcaaaaaaaaaaagaaagaaagaaaaaattttaagaagaaaaaattagaataaatggaatattttataggggtgtaaggatttggaaaattatgatgtaactacttattgttgtattatgcagtcattaactgatgtattcctagaggaatggaagaaagattcgtggttaccaggcagtgaggatgaagatgagagttaatcacaaaggtttacaaaggaatttttggcggccgtgggacaattgtatcttgattatggtacacgtttgtcaaaattcataaaactatgcatcaaaaaggatgcattgtaccatatgtaaattatatctcagaaacctcaagaaactttaaacctatgtttctgattattttgaatgccatggggaagttttaaaattatgcaacttgaaacaatattaagtaacataaaaattatgcagaggaaaaacgctagaagaaactatgtcaaaatattgtacctatagtaaattatcttttggacagaggagaaaaatggtgttttctacttttttcatcttttttgtatttaattttgatgatgataaaataagtatattttgttttaaaaatatgttagactgttgaagtttctctaaactttctttcaattgtttttgagtttagggttcttcaaacaccacaagctactttgcttgttatctgcgatctactagaaagagtagtgaaaaccaaggacagctcctgaatttactggggtggctttagcatgggcttggaatgggactaaaaagctgtcccctctcatgatcccatggcctcaaagcaatagctcaggtcaggaaacaggttttctctcaaattgctctgtaattgcgtgtcctctgctggcaaaatacactttctagtccctgcctcctttctcgggcttttataaacacaagacatacagaatacttggtaacagtacaagaaaaatggtattattatctaaacacttgaagtagacaatctcttcaaagccatttcataaatcacatcttagagcttgtcataaaatacatacagcaaagaaaaataacaattgtgtcctttggaaaatggattttaaactttcaactaagttcatcagaaccttttttccaaaggcaatgtatgtttttgcttcctagtctaaatggttatgatggactgaagtgttggtgaggaggtaacattctaatgaggaaaagcagagaaaccaagaaacaagatgaaaaagctataataaattatggattttgataaattgccccacactgtagcatttcaattacagaaacacatagtttacacaagtaattactgaagaaattaccacagaagcacatccattcattgaattatgaggcatcaattctctccccttgattgcatcttcagttccaagaatggcaatcacagctccacacaaaactttaataacacaatcttttttggattaaaaaaacactattggatgagaaatatgtaaagagatgataagaaaaggatgtagattcatgttgagaaacagaatgccttcaatgagttaattgcaaagccagaactttgacgattggaaggtgatcactggagaagcctgttctgaacatgagtcccaatgttttctgagggtctttggcatcatgatgagggtcagaagagattatctagtgaggataaggtccagcaacaaatgcattatttttctatttttttgagataacagtctcactctggcacccaggctggagtgcagtggcatgatcacagctcactgtagccttgacctcccaagctcaagagatcctcttacctcagcctcccaagtagctgggaccacaggtgtgtaccaccacacctggctaaattttacatatatatatatataaagacaggatctttatatatatataaagatatatatatataaagacaggatctcactgtgttgtccaagctggtcttgaactcctggcctcaagcaagcctcctgctttggccctcccaaagttctgggattacaggtgtcaaccactatgcttggccctaaccaatgcattctgttgacattagcatgtcatgtgataagtctcagcagaaatttaagggcttttaatctaatactttttgctattattttgaataaaatcatgatttggtttgatttgaatttccaacttttattttaggttcagagggtacatgtgcaatctacatgtgtaaatcacatatcacaggggtttgatgaacagattattttgtcacccaggtaataagcatggaacccaatagatggtttttgaatcctcatcctcctcccaccttccaccctcaagatggccctgatgtctatcattcccttctttgtgtccatgtgtactcagtgtttaggcacttataaatgagaacacgccatgtttggttttctgttcttgtgttaatttgctcaagataatggccaccagcttcatccatgctgctgcaaagaacatgatcctactcttttttatggctgtatagtattccatggtgtataagtaccatattttctttatccagtccactgttgatggacattttaggtggattccatgtctttgctattgtgaatagaatactgtgatgaacatacacttgcatatgtctgccttcatgacaaagactccaaaagcaacagtcttactttcagtccagtgcttaaatcctttcaactcagtgtccagtgtatatgtatacacagatatatgcatgtgcatacatgcccacacacacacacacacacacacacacacataaacctcctatagcagatcattcttggtgctccctcatgttccctcactcttataacttcaatgcagaccaacctaatttgcaactccaaattcaatgcctgaggactttctttggcaccaaagcactttgttcaccgatttggcaggctagaagtgcagccctcagccaaggactatcaggagttggtatataaataccccagctccctttcccatcacagggatagctccgaggtttagggcctacactgtttctcagaaattttcccagtggaattaagcttcaggtgctctccattgcaatgagttataaaatatatactttatttctacctcctctttattgtctcattccccattcccctactgatttttcctgggatcatctctaaaatacctgacttgaatccttatcttaggattttcttcggaaaccaagtttggggaacccaaagtaagacattcctcatccttaaatttagggtaatgatgctcccatagtgagcattaagtgagaaaaatgcatgtaaaatgtcaatcacagtgcctggttcaagtagatgatcattaatatttattattattactgctacccccatttttgttaaagtatatttcatcactatcttctgctgttaccagcttcttgccatctcatttgctgtctctttccaaagctgtggctttgatccccaaccactaaaatgcaggctgaccaaaggaggacagtagccctgaaggtattcattggcatcagtcacttgtggcttctaaacagacctactacccgggtgtcgggattcctcaggaatctttgggaagcaaaatcaatggagaactcagtggcgacaagctgtgtgttatttttctgtattgtaactgtgcatctgtgtttccccctcctggctggagcagaagcaggagccacttcgtgctgttgggtgcaggctctggtgatgatgctcagagagtaaaggttattggtcccagacatgacagtttcctctccaggggccataaacagtagtggctccagaatccaagcaaaaaggtgaatgagaaaaacagagtaatgtagtacatgatgagctggagaatgggaacccagcctaaagaattttaaattaagatatttaaaaactgtgtgagagccaagaaatccatatatagccccacaaaatgtgcacccccgcctttgcctgaacccagccttaacagtttacaaagttttgttgcagtctacaaaccatttacgaagcatttggccctctttacaatcttgtgtggtcagccggaatttattatcagaatctccattttagagtgcaaggaattgaagacctcaacatttaaatgactcttctaagaaaagagcacacagttaaaactcatgaaatatctgattctaaatactgcgttgtttctatgaacacactcaggggtggggtcttcggggacagaatccctttcacaaggttgtggagagctgaatcacccatgaactcaactcttgttgaaaagggagagtcctcaaaagagtgagtatgattcatgggaactcatccatgtgagcagatcagtcactcaaagaggataataaactcacagaataaaggacaagaggatattcgacgtgaggtcaggacttttcattcatggggtatactgggtcgaatgctgcccctcaaattcatgtccagccaagacctcagaatgtgtccttatttgaaaatagggtttttgctaacatgattaaggtaaagagtgaggtgagatcttattggattttggaccctaaacccagtgaatatcctcataagagacagataaagacacacatgaagaaggccatgtgaagatgggggcagaggttggagtgatgctgccataagccaagggacacctggaaccaccagaagctggagaaggcaagaattctgcccttgagccttcagagggagcatgcccctgctgacgccttggtttctgacttctggcctccagaaccatgagataatgtatatctattgtcttcaaccactgaatttgtggtcatttatcacagcagtcccagaaagctataacatgagatgattgcctaggtgcaaggggataaggactcaccatgcaccaggcactgaactttcacaaccatcctaacatggaatcatcaggaagctcctgtgggacagataacatcgtgttcattgtataggtgagggagctaaggttcagagagggtaagtgagtcactcaatatcacacagccccctagagggcagagcagagatagatcaagctcacacctgtgttttcaatcagcgctgagttgaagtgtgattgtgggactcacaaagaataagtatgcccccccctactctatgctgaatgagctatcctttctgctctgttgcctcacccctatttcccagggacaacaaaatgcacatgtgtttcaatccagcctctttggactacaagtggtgtaagttaactcgcttaaatcaaaataagcaactgaactcaaaagggagatttgctggatttgttgactgatgaaatgaaaattcaagaggtattccaccatcagggatggaggttttggggctcgagcagcatcaactgagagcgtttctgtctctttcatcccacaggttggctttactgacaggcaggttccagtggaatcaatggccgtgaacagtattgggtttacacactaccagcttagcaactccaatagtgattttaaccttagtctgtctgatcccagagcttgcctttgccattttcactgcagcatactgatttccaacgttttctccctttattcattccacaaatattttttgagcacctacattctgccaggtgctgggcaagatgctggagatacagcagagaacaagacaggtgaggtctctggcctccttgaaagcattgttatgcctaaaggtagatggggtgtgggatgcagagaaaagaagataattatatacagtacaatgtggtataatgttagatggtcatgatataaactgtaacaacagaggggtgtgtttattttcaatacagtggtcatggtagggctcttgaagaggggacattgtatttacacttcaagagtaactgacacatagaagaccttgaacaaatatttgaatgactgcatttaattcaattctctgcacaaaactatgatgtcagttcattatgatatccattttatggtccagtaaactgaggtccaaggaagttaaacaatctgaccaagaccactcagacggccagcataaaactgggatttgaccccagagtccttgatcttgagcactgtgattttgttacctcccagggccatcactccccacactcccagtgctgtttccaccagtgatgctcaagtgttcatgcacagagtccgtgacaccagggccgcagaagcccaggagtacagacaaacacctcaggcaaagcttgtaccaaaactactgcacacaactccttgcctcccaaatgctgctgcagagcccacagataatgctcgcctctgagtagcatcgacccttccttcccaaaggcatccatggcgtctacacccctgaaaatgctccctgacagtcacctagaaagccctccagattaaagatgaaacattattcaaatatctacctctttttctgggtaactcttgctcagagaattgcagggctaggcttaaaatgttctggctccttgtgcagctgaacaaatagaaacccagaaggggaagtcacgtgcctaaaattttacagggaggaagtagcaaccccatggacatgaaagtgttaagtgtaaagggtatgacatttagagggaggcagtctccattgcaaattctggcttaacacttaacacctctttgagtatctgctaagtacttactacctgactaagaatattatcttatttaactcaatcaatagcatgaggcagtattaaatatacataatactatatatcttatctatatatctagatatattatatataatatatgtatctttatctatatatcttatagataaggaaaccttagcctcagaagggtaaagtaccagttaattcatggtacaaccagaatttgaaccccattctgacagactccaaagctcttgctcttagtttttcggttttttgttttttcgggtttttttttttcttgttttttttttttttttttccccgctggatgttgtatttccactttgcacggacatgactcttgaagttttcagggagattgcacagctgagaagccagaagcaaccttggctgataaattactatcctggctgggatttccctcaccaattgctaagcaaaaggaacacataaattttggagcaaccacctttttaggtgtgagtttggagccttgtagaatagaagactgggccaggtgcagtgtctcacacctgtaatcccagcactttgggaggccgaggtgggcagatcacttgaggtcaggagctcgagaccagcctggccaacatggtgaaaccctgtctttactaaaaatacaaaaattcgctgggcgtggtggggcgagcctgtaatcccagctactcaggaggctgaggcaggagaatcacttaaatgcaggaggtggaggttgcagtgtcctgagatcatgccactgcactgcagcctgggtgacagagtgagactccgtcaaaaaaaaacaatagaagactgatagtgtcaacagtttagcattgatctggtgacatcatgatcatcatccttattttcctcatcatcacaataacatcagaaccactatttgttaaaggcctagcaaatatcaaatcttatgccatgtgccttgcatgtactttccaacttcatcctcacaataatgctgtaatacagatgacacctacccagtttttaccattgagaaaagaaagatccaaagaagccgaataatttgtccaagatcgcacactggtgaagtggtacagctagaattctattcaaggtctttttgaatccacagcactgccagtttcaccaaatggtctgattgttaagaaccaggataagtttccctttaaacaagatcaaaaaaagcagacggaaatgccagcatccaattaaataagaatcctgcatggatgatcaaggagagatgagtggagggacacatatgtctttgagccagtgagctaaaacaagtgggggcttcctacaagggagtctatggatttggctgttgcccctggcaacagacacaggcaattggttgaatagcccctccacccctgagcatgggaaaggctggtcttggaagcagccattgtttcaaacattgcttctgcttgaggtcttgctgcttgtgaaatagttccctctctcttcctgaacattccacctgttgcgtcccctggcaggagccagcagcttagcaaagatgaatcttctctcacgccatggcctgtcacatggacatctggagttctgacctgctcaggatcctctccctcttcttttgtatcagaactctccatgatggcaccacaccggtcccgatccgcttctactatcacacggtgtaaagtctggccaatcagagcagctcattcaatgggccacaatgattggttcagggagaaacatgtgacataagctgggccagttagattccttcctgggacttttaatttggatttgagagagggatgatttcttgccaaactggtaggacgtaaatttggggctgccagtgaccatcttgcctgtcgtgtggatggcacctgaattaacaatgtaggaagggggcccagagaacactaggctcactaattcagccctcttgcctagagccagacttgtctttggagatgtctttgtcctataagaaaggaaatcagtaatcagaaaaaggagttagaaatgtgcaaccctgtccaactttctacaaaattcctcagtgctacaactttagtccaagcaaccaccatctcttacccagaaaagaagattattgttctccctgcttcttcccacccttccatttcattttcctcagcctacagagtgacaatttttaaaaatgcaaatcagttttgcatgttagtatcatcttatttcatactgaagaattcccattagcatttcttggaaggcaagtgtaagggtgatgaattccctcagcttgtgtttgtctgggaaagaatttatctctcatatttgaagaagaaaagctttgctgagtgcagtattctcatcagtagtaagtcattacctatcaatagtaacattaaatgtatacagactaaattctccaattgaaagacgtaaagtagctaaatggataacaacgtgaatcagattataagatttcctgatgccctgaagattagtaaaagtcctttctactgcctatgaagccctacatcagaggtctgcaaactgacctgtgggccaaatccagcccaattcctgtttttgtaaagacagttttattggcacaaaaccatattcacccatttttacatgttcatggctgctttctctgtcaatagaagatttgagtagttgaaaaagaaaccatacggtctgttaagcctaaaatatttgctatcaggccgtttactggaagaatttgctgacccctgtggtatatcatctggctcctgtgtctggctcatccatgcaactctccaatttcctgctgtgctacagccacactgccctccataaagctcatcctcaccctgggccaacattcatctcttctatctttacatggctgactcttaaccactgatatcttaccttgaatacttcggagatatcattatgttgttttaatttcttcataaagcctattactttgggaaatcatgcatttattgctttacttaactaattcatccaacaaatatttattgaatatctactatgtgctcagtaattggtgaatgccagtaatggaaaaaaaaatgattcttgtctttttagagctcccattctgcttagggaagattgaagataaagatgtaagcacattatcagtgggtttttttctagtgagaaaggctatatattagggttctctggagaaaacagaaccaataactatatagagatttgtaagaagagatttatcatgggaattagctcatgagattatggaggaaggaaaagaagtcccacaagatgctgtctgcaagctggagaataaggaaaaatggtgttgtaatttagttcaagtccaaaggcctgagaaccaggatctctgatatacaatggcagaagatgtatatcctagctcaagaagagagagagagggagagaatttgccatttttctgcatttttgctctattcaggccctcaatggtttggatcatgctaactcacattgataaggggggatattctttgcttagtctactgattcaaattctaatctcttttggaaaaactctcactgaaaatttaagggaacacaaataaatggaaagatatcccatgttcatgaattggaagaattaatattattaaaatgttaatactacctaaagtgataaacagatttagtgaatatttatgaaaatatcaaagacattcttcacagaaatagaaaaaaaacataaaattagtatagaaccacaaaagacccagaatagagaaaacaattttgagctgaaaggacaaagctggtggcatcacactacctgacttcaaaatacattacaagtctataatatgcaaaatagcatgatactggtataaaaacagagacatagaccaatagaagagaatagagaacaaagaaataaatccatgcacttaaagccagccaatttttgaccaaggcaccaagaacacacatatgggaaaggacagtctcttcaacaaatgatgcttgaataactaaatatccacatggagaataagactggaccttatctctcaccatataaaaaagtcaactcacaatgaattaaagatttgcatgtgagactcaaaacaataaaactactaaaagaaaacatagaaaacactttacaacgttggtctgggccaggatattttggataagacctaaaaagcataggcaatggaagcaaaaactgaataaacaaaactacattaaatgaaacaacttctgtacaatgaaggaaacaacagagtgaagagacaacctacagaatgggagaaaatatttgcaaactatgcatctgacaagaggttaatatccagaacatataaggaactcaaacacctcaatagcaaagtaagtaagtattctaattaaaaaggggcaaaagacctgaacagacatttctcaaaacaagacaaacaagtggctacaaatatacttttttagatgctcaacatcattaattatcagggaaatgcaaatcagaaccacagtgaagtatcacttcaccccagttagaatagccattatcaaaaagacaaaaaataacaaacactgccagagatgtggagaaaggagaacacatacctttttggtgggaatgcaaatgagtacagccagccattatggaaaacagtattaaggtttctcaaaatattaaaagtagaactaccatatgatccagtaatcccacagctgggtatatatacaaagaaaataaaatgaaggtatgaaagatatagctgcactctcatgtttattgcaacactttacacaatagccaagatatagaatcaacctgtatcccacagtgaatgaatggataaagaacatatagtacatttaggcaataaaatactatttggccacataaaaaagagagaaaattcctgttatttgcagcaatgtggatgaatctggagatcattatgttaagtgaaataagccaggcacagaaagacgaataccacacaatctctctcatgtgtagaatgttaaaatgctgatctcatataagtagaaagtaaaataattgttgccagagactgggagtgtaggaggttagggaaatggggagatgtaggtcagtgggtacaaagttagataggaggaaaaagttctggtgtgctattgcacagtaggatgactatggttaacaatattttatataagaaatgataaatgtattaggtgatggatatggtaaatatgatttattcattgcacaatgaatacgggtattgaaacagcacactgtaccccataaatgtgtacaattattatgtgtcaattaaaaacaaacaaaaaatatatgcatcatggtttgtgcaaagtttagagtgtaagtgtaagatctttcagaaaactaataggttgcttttatatttaagaaaaaaaaactctaatagtaataattttttgccagctatctgcacaccccttaggtcagtcaaggtgacacataaaattaaccattataggttatgaagacaataaaacagagtgatcttttaggaaatgactgtagaagtggggagtattttagatcgtgtatacaaggaagtgttaatattagagctgaggccaggtgtggtggctcacacctgtaatctcagcactttgggcagccgaggtgggcagatcacaaggtcaggagttcaagactagcctggccaacaaggtgaaaccacatctctacaaaaatgcaaaaaattagctgggcatggtcgtaagcgcctgtaatcccagctacttgggaggctgaggcaggagaatcgcttgaacccaggaggcagaggttgcagtgagccgagattgtgccactgcactccagcgtgggcaacagagtgagactgtgtctcaaaaaaaaaaaaaataaagtatatatattagagctgagaactcaatgatgagaaggagtgaccccgggaagatctagaatatttcaggaaaagggaactacagcaagtgcaaagcccccgaggcaggagagaggttggaacagtggaaagaaagcagtgtggctggactagatgggatgagggatgaggcattcacatccccctctctagattttaagctccgtgaagaccttgttcattttgttcacagccctatctccagcccctagaaactctcccattcagttttactcatccatgcagaaagaaagttaaactagatgatgcgtaagtgcctcgccacctcaaaccttctataatttgaactttctaaaataacagaattgagtccactgacttccctttccggaaccagcaaaatgtcctcgtcatcattttaaaaactgtccaagtggcaactcttaaccatagatcagcaaacacacagctaagccggggatttttccagcacgttttcttggatgtgcagtttgttggaatgtaaatgaagcaagattctgtgggtgaaagtctggacccttcaactccaggtcttcctgagaaagtcagatacacaaggaagcttttaaaaatagcttccctaccacatttttaatgcatactcagtttttaaaatgttagtaagtattcactgcgaatggaggaggaacaagtgactaataaaagttttccctctcagtttacatgtctctgtccctgcttctttcccaacttgatttgtgggaagaacacattcttcttcaagaagtgatgggcacaggccaggtgcagtggctcacacttgtaatcccagcactttgggaggccaacgtgggcggatcaaaaggtcaggcgttcgagaccagcctggccaacacagtgaaaccgcatctctactaaaaatacaaaaaattagccgggcatgttggtgggtgcctgtaatcccagctacttgggaggctgaggcaaggagaatcgcttgaacctgggaggcggaggttgcagtgagccgagatcacgccactgcactccagcctgggcgacagtgagagactccatctcgaaaaaaaaaaaaagaagtgatgggcacaaagataaaaatccactgaagatctttgctcttctttcttacacacagacacacacgtacacacatacactcctacaaacacacacaaatgtcccagatgcacagccattgatgctatttactaaaatacacataagcaccaacacaaacttatattcacaaccttcagcacatacacaaatattcacatgcacacacacctataagcacatatgtgggtattcgtatgcatcccgacacactttggatttgtgtttgtaagtacatgagtacatgaatgggtttgcctattcacatacatatatcttacatgtaagttacaaagtacatacatatgggcttgcatgtaaatcctgagatacacatacatgtaaagacataggacacaagcccttacaaacagaagcatatgtgactgtgggcacatgcactgacatacattcatgtacataagtacttacaaacataccacatgcatacaatcattactccccacacacagcaggcagacacaattgctgtgcacaaacatagacacaaaggggcttcatactgctttcctgagtgatcaggtgaaaaaaaagtacaattggtaggccgggagcggtggctcatgcctgtaatcccagcactttgggaggccgaggtgggcagatcacgaggtcaggagttcaagaccagcctggccagcatggtgaaaccccgtctctactgaaaacgcaaaaactagccaggcaaggttgcaggtgcctgtagtcctagctactggggacgctgaggcaggagaaatgcttgaagctgggaggcggaggttgcagtgagctgagatctcaccactgcactccagcctgggtaacagaacgagactccatctgaaaagaaaaaaaaatacaattggtaaagaggtggggacgcattttgcttcagctttgtgttttttctgctagaaaatagaaaatcagttgtagtggaataagtgaagtagtcagaaaataagatgcaggcttctccagaatgagaggtctgtgttcatctctgcagagaaaccaagagcgaggagctcaggctctgcagggagctggatctgctctcctgaaattcatgaaatcctcaccagagggagtctccccggtggttccccatcatcccacaaattaatattaacaacacccttccatttgtgctttcttttgactttggaggaaatgcattcctgtctatgttccgtttgtatttttaagcttccaccgaggtgggaagggcaggtgtcacgatgccatttcagaggcagcaaccaccaagacatggcagtggtcttcatgcaccttctatggtatcgggctttgtggcaagtgcttttgttaccttagctgatttcatccctgcaacaaccctggaggtaaatgtattaatatcgccatttcgcagttgagtaaattgaggataaaaacagcaacaacttgctcgaggtcacaacggatgacgctgctatttaaagccaggttggctttgaaaagaccggcccagggggtggtggagcctggggtgctttagaataatgagattttttttaaagccttatttttaaacagtttttttttaagtgagaatagccagacccacttcacaaggtcaggctagctctcttcacttctaataattggcctctgtcccaagggagcaattctctgtgggaagcagaagttacaaaagccacaaaaggagcaaaagatgaccatgttcaggctgttgactatagcagagtttctcaaccacaggcgctattgatctcttgggccagataatcgtttgttgtgggggcctgttctgtgcactgtgggatatagagccacaatgctggcctctgcaatctagatgccagtagcaccctccatccattgtgacaacaaaaaatgtctccagacattgccaaatgacccctgggggacaaaaacacccctgactgagaaccactggaccacaacctgctttctgaacacctgctatgtgccaagcattaaatgatgtgttttagttcacttgctcttcccaacaactccagaaagtaggactattcatttccccattctgtaagtgaagaaactgaggcaccaagagggcagattacttgactaagatgacacatatttttccaccatcttctattaccacttccaatattagcaactactattgaacactctatctcattctacgctaggcactgtgctttacatgatctgttttaagttttaccgcaaatctctacagtagctaccactaaccactaccattttacaggtgggagaacagaggcccacctagcaaaaaggtaaagcagggattcgatcttgtgtccatgtgacttaaagcctaagtgctcaccaggtctaaaataccactaccatagcagagagaaaagattagattggaactccagaaccgaaacacatgctttcatttgagcatttcctggcttgtgagccaggcacaatgattttgaataactgagctgctatttaaaaaaaaagaaaaaaaaaatcgtgcaactgaattctaaagaaaatttcttgtggcttcattgttaaaccttaaccatcccttcgctgtgaatcaccaccaaactgttcactgtgctttagttagcgccaattaactccttacaattgagcatattttccactattacaggggctgcataaaatcttccaactggggaggcccagaaacatcagaatccaaaccagatgatgatccacatctcattgtgacccaaaataaaccagtcacggctgtaaaggattacaaataaaatcctattaaaatctagcatgcaccaggtcctctaaaatagcacaagaccacaactatgagtgttctgggagaatatgcttcctctattttggggggaaagtaaaaagtataaaaaaaaataactagcatctattcctttttcctcttggtaataaaaagcacaggttttggctgggcatcttctgcctcttacatacagagtctcttcctcacctccaggggtgggctctgattggcttaaaccaagctacatactccaggaagccattctgattggttcaaacctaataaaatgtgagccaatgagagaggagatctagttgctagagattaaaaaaaaaaaaaaacacctttcatgcctacctgagataactacagggaagggcatggggataaggaaacagaggacttatatgctacaagtctggtatttatttttgctataaatactctattataaattaatgaaaaaaatcatggtaaaatctctgtgacacaagaactctcacatttgtttcctttttttttttctttttcttttcttctctttctttttttttttttgatggagcctggagtacagtagttcaatcttgtctcactgcaacctccgcttcccaggttcaagcaattctcctgtctcagcctcccgagtagctgggattataggcatgtgccaccacacctagctaatttttgtatttttagcagagacgtggtttcaccatgttggtcaggctggtctcgaactcctcacctcaggtgatccacctgcttcggcctcccaaagagccaccgtgcccagttcatttgttttcttaatgccccaggttgcatctaaaagaagatgtgggaaatacaaaggactcctgcaagctcctggcagccattttgaatcatgaggggcattgctgttagggtgaggaagaaaagaagaaggtggagagaagagatgggaaacatccctgtgccttgggttaaatcccatttgaggccatatctccttgtggaatattcatttactcaaatcaataaatcccttttgacgttcaaggcaacttgaactggactttctattaacttcaaacatcagatttctggtatataattagtattaactaagaccaggaacctgacttatctcagccctaatttccaaatctagtcagagaggatgaaagtctttagggttgttgagagaattaaatgagcaaataacctatatagactgttagtacagtgcttggttatcataagcactttataaattttaactattattatccctgaaataacctacctgtacaaaactgtatcatgaacacaacattttttctgggcttataaacgttaatcctgacttccatatagaagcgttttttgataatgaataaagatggtataaccttcctcagagctttccaaaaaaataaaagaggaaagacagcacattcttccaccgaaatgtgagaacatttggtagttcctttatataccaggaaaacaaaggatacgtgggggttacatgagaagaaacaattttgaatgaacaagcaatcgaattggtttaaaaatgagcaagagagagaacttgtacaacaagcgtgtcagacaaacccagaggtctgcaaataacatggactgcctggggaggtagcaagttccccactccacccaaagtgcaagcaaacatactgtggccatttgtcatagtggagcatacagcgagtactggccccactgagctttaaggctacctactagactgatactcccttgttctcttcctgaggccctttgtcccacgttacttagatggagggaagtggaaaggtattttgtatttacaggtaaaataactatccacctctcagccccacagtgcagtttggcctggggaggtaggactttggggaatcaaatcttatctaggttcagttcctcactctgctactcagatcttactctatatgctcagtggcaaacaacctcacactgctggttctcagtttcctcatttgttagaaaaacaaaagagagaaaatatggtcgggcttgagattatacagatgtagatgagatgagctatgcaaagcacttagcctaaccagacaaagccactttccgattccaccctttcaaatctccctgagttcctccttcaggacgtgtgtttatttatttctctcaccacacaccatcaatcagttttgtactaaacatgttaaatattaagtcattctgctaaatcagtggtgactcgggtatttttattatttcccatttaacagacgaaaatgtggcacaggaaggttatatgacttgcccaagttcatacaactagtagatgccaggattcgttggaatttgaacacagtctgactccagagttccatgccttaactagtgaatcattccgcttttcacttaattgattaataaacaatcagcttgggaggccgaggcgggcggatcacgaggtcaggagatcgagaccatcctggctaacatggtgaaaccccgtctctactaaacaaaatacaaaaaattagccgggcaaggtggcacgtgcctgtaatcccagctactagggaggctgaggcaggagaatggcgtgaacccgggaggcagagcttgcagtgagcctagatcgcgccattgcactccagcctgggcgacagagtgagactctgtctcaaaaaaataaaaaataaaataaacaaacaaacaaacactcagccctccatatctgtgggttctccctcctcagattcaaccaatcacagatcaaaaatattctgaaaaataaaaaataaaaacaataatataacaacaaaaaaatacaaattttttcaatacagtataaaaagacttgtgtagcatttacattgtattaggttttataagtaatctagagatgatttaaagtatatggaatatacatagtttacatgcgaagacgatgtcattttatataaaggactagaacatttgtggattttgatatatcctggggtcctggaatcaatcccctccagtactgaggggtgactgtaactttcttgggagtgtaccgtttggtactctagtctattcccagcacttaaaacagtgcctggcatatagtaagtgttcaataaatattgaaataatcaatgaagaataagtgaataaacagaatattcttcaacaagtgttaattccctcttccttcctctcccctaaggaggtagaaacatttgaattcaaatctcttgcactcttcttgaatctgaggttttgcataaaatttgcccaaattacatataatcaagtatccatcatagagatgaattcagataattagaccaaaaatacaatctacaaattcccatgcaatgcatttgtctgaaaaaggtatttgcctggaatttcaaccaaacccaatgtccctttaacgccactaaggagaagctcagcctggtgaataacaggacatttgagtactggaataaatgatgattagaagacacccgtggcaaagctgcctcatagcaagattaatttgggggcgagaagagggtggttattaatgtgtccgggagacaactccaggcactgtttccctgatgggagcagaatctcaggttatttatagccacttctcaggaggaacatggcacagggcatccgaggagagaaccacgccaaggtgcgctaatggaactttgaggataatttactgctcaagttcaaggacttttgcaacaagaaagagcctctcaaactcccagcaatctctacccaggaaggagatgaacgtgactgtgcaggtctgtcattcaagattcgccatctcatcaatctcatcttctcccactgtccccctggctcactcctctccagccaccgcagcctcaggcagctcctcaaacatgaaaacacactcccaccacagggttttcatttttgccctttcctctgcatggacacacttttctgacacccttttaaactataggcttccgatcacctgatactagtaattgaagggtgtagtgagctataactgtgctgctgcactctagcctgggtgacagagaccaaaaaaaattaaactaaaagttgaaaagaataaaatataaacttccttttctgcttccctgctttgcatttttctacagctcttaccaaatccatgcttgctttgccccgagtttgctgtgtgatcttgggctaatcactatctctctctgggttttagcttcccatctacaaaatgagggcagtggttgacaattctctaaaatcctttctagcattcacatcccacatctctgggtgcaaataatgtaaataagcttgatgctgtgctggtcaaaatacatagtttcaggcttatttatcaataacaagaaagtgacattgtacatagtcacttcttgttattttcagtaaagtcaccaccaactcccaattagccaatcctgagccatggctcctaagagaaatacagggttgggttcctgcaagcctctgaccacaacatttttatcaatcaatcaatgcataaccttgttttttgtatatatgtgtttaaaggcatcttatgtaacatatactgattcactaacactgagctcacagtcaagagtacagtaacacgttcctgagcaacacttatccaacacatgtatgtccttcttcaggcatgtcacagcctttggaacacaaggtagcacttccacactttatttggggaacaattttaaacagcaaagtcaccaagaaaaagcacacaaatgtgacaaatatggcactaaacagactacaaaaaaagatatttgtttatcgtatgacagctgaaacaagatggcagagtgttgccccgtttcccctaagctaggaatgttttcatcacctgattaacatttttcagggctctgcacatttctgtgaatgattgtgaaagtgtcacgagtattgattcgggggttacaaataaattttagcaagtaagcaaattcacaaatacagagtctgggaataatgaagatcaatttatagtttacaaagataattattatttgccttccccaccacaatgtaagctccaagaaagcaggtgtttttctgttttgttcaccactttctctctagctcctagaatatatacactcttaacaaatattggtgacataaataagcctgaagatatctattttgaccagacacagtatcgagtttatttaaattatttgcacacagagatgtgggatgtgaatgctagaaacgattctagagaactgtcaaccactgccctcattttgtagatgggaagctaaagcccagagaagggtagtgattagcccaagatcacacagcaaactggggtcaaagcaagcatggattttttttttcttttttctgcattttctattttttttttttcagagacattctcgctctgtcacccaaaatggagtgcagtggcacaatcatagctcattgcagcctcaaactcctgggcttaggtcatcctcccacctcagtctcccaagtagctaggattatagccatgtgacaccatgtctggctaattttatatatatattttttctagagacagggtctctctgtgtttcccaggctggtcttaaactcctcatctcaagcaaacctcccacctcggcctcccaaagtgttgggattgcaggcatgagccaccacatccagctgagcatggatttcttaagccattccattttactatatttccagcaccttacagacatgatctttgttattattgggatgtctcagagcatctggctcagggcttagaacagagtggttgttcaataaatgctgacaggctggattacagaaaaggtaggggatattcctagaagatgaaaaggcagactgcaccttcagctaaagtcagtcacatcaactggaaagattgacttgattttcagcagtagctctctcaggaaaaagttaatggggaataaagaggaactctgtttatcagtcaagacttcatgttccaagtaatgaaaagataaacttgctttaaaataaacaagagagagaattcattgacttgggcaacagagaagtccagaattagggtgaatttcaaatgtggattgaaaatagcattggggtagcagttttgcagctctgcttttctgcaaatctcttagctcgatttggtttctctcactagcaaactgtgtacaggagtctaaggcttagtatcttcccaacacagcattcagaagaaaagagcttctatggtccagcactcccacctggagattctcacctgagattcactgtaattagactggcttaagtcatgtggtcacccctgaaccaatcaccatagccaggagggtgtaagctgctgattggctgagcaggatcacatggtctaatcatggagctaagtattggtatcagcacctgaagaattttctatcgaaattcagggatggtagaaagacgggagaggggaatgaataccaagaaacaatggttttccacactatatagacgtatgaggccagacacctccaacgaacttccaatgcaggaacagagatttgagaaattgttaattgttttaaagaatttattgctgcacatattattgctccaggttccatgctaggttctagggatacagaggtgaaaaactcctaatcctcatccacaaaaatagctcacaggtaattcataacagttggttcataagatacatgaaaaaagagaagatctgtccaaatgcactaaattaggaaaaaaaaaaaaaaaagcagaaaggagaagagaagaggctatgtcacggccatgtcagtcccagaacaaaaacattgtttctgtgttatttattcttaacaacttttttttgttttgttttgtttttgagacagggtctctctctgtcgcccaggctggagtgcagtggcacaatctcggctcactgcaacctccacctccagggttcaagcgattctcctgcctcagcctcccgagtagctgggattacaggcgtccgacaccactcccggctaatttttgtatttttggtagagatgggttttcaccatgttggccaggctggtctcgaactcctgacctcaggtgaactgcccgcttcagccagcctccatagtgctgggattaaaagcatgggccgccgcgcctggccttaacatctttttgaatatcatatgtacactagggacagaaatgtgcactcaatgaaccctttggcagttattagtcccagaatattagaagcgtttggctttttccagtgactgtctttgagagaatcagtggtctcctcccgacaaggcactctgcatttcttacataacttgcagcatctccaactaggaagacttggccccgcatccattacaataccccagagagattcccataacttcattctcgtgctgctgtcagagagctactctactgtgaagcattctaagtgagaaacaagccgtgggcaggaacctctccatgttccgttgatagctgtcaggagggagagggtttacagcaaaatcacttccgctacttttacttggggtttgtgccaaagcgtgctgatccttcaggactctgctcagatccagacttcagaatagcgaggtgtggggagctgagggtggaagggcccctggaggaagtgctagctccatgagtctgcggtgccatgcaggtcaaggtagtgacctgtgtggccctacgtgccaggtgatggactaggggaattgcttgcacaagccctggaatagagtagatggtaaataagtgttaaattatgtgtaggaatgtgacagcagaaaagaggtgccagataatgtttccatattggttgcaattcaaattagcttaagaaaaaaaaaagcaaaagacagctgtattggctggtatagctggcaaattaaagataggactagttttaggcaggagtggatccaggggcatcattgagactgtgagagctctgtctctttttaactcctggtttgcttctctgtaggtgatggccttgtcctcaccttccagggacaacttttctccacattgaggggaagatggttgtcctcagtcactgactaacagtcttgcatctttctgacatgaaaagtaaatcctttttccttccagcacctaatcaggaattgcaggggaaattgtctgattaacctagcttgggtaggacagaaacccctggaacaggtattatgaatcagagaaattgggttctatgactggccagccttggagtgcacatccacgctaatgatacagtggcctgatttagtaaatgaaaatgcagtgtaagtatggactaaaaaatgattcattcctggccaggcacagtggctcatgcctgtaatcccagcactttgggaggctgaggcaggcagatcacctgaggtcaagagctcgagaccagcctggccaacacggtgaaaccccatctctactaaaaatacaaaaattagatgggcgtggtggcaggcacctgtagtcccagctgctcgggaagctgaggcgggagaatctcttgaacccgggaggctgaggttacagtgagtcaagatcatgctgctgcactccagcctgggtgacagagcaagactctgtctgaaaaaaaaaaaaaaaaaaaagattcattccttatatgaaattccaattcaactacgtgtcttaccttttttatctagcaaccttacgatggaggcagaagaaggattctatggttggaaacctgccagactcacaggctacggagaagaaaggctaaatccaccagactgttggatgcacctaaaacaaattgccctccgtggcttggtttcttattaatatactcatagaaatgcacaagaactgaaagctcgatagggaaaccaaaaaataaaaattaaaaaaaaaaagctgtaaaccaatgtttcttaaaacatgctctgcagaacactcgtttggtggaacgtaaagtgttctttcatattaaaggagttgcgtgttaatcgtgtttctctgtcataggactctcattgcattaatatgtcagtttccattgtgaatttctcaggagagagaggcgagtctgtgatattcctcaaatgcatgaggtcatggaatctaagagcagaagagcattaggatagcagaacagctttgatagcacaacagctccttgcatgtggtggaaatcacaagttcagggggacattttactggctgtattgtcagtaggatgaatactacacgctgcatcttctgaactataatacggtatccctgagaaacaaaattagaggaaatattgatcacatctcaccatttccagctaaaactaagatgcagagtctgcaatgccccaaaataaatgtgctcattccctgaacacatggggcctttgtcttattttgtcctttgtct

SEQ ID NO: 73 - DNA, 607476 bp, Homo sapiens
taggacttcacattcactcatcacacactcactgattcacctaaacgagttccagtcctgcaagcttcattcatggtaagtgccctactcagttttactattttataatattttatacagtatttttactgtaccttttctatctttaaatatgtttagatggacaaatacttaccattgtgttagaattgcctacagtattcagtacagtagcatgctgtatagttttgtagcctaggagcaataggctatgccacatagcctagagcctaggtgtgtagtaggcgataccatctaggcttgtgcctagatgtttgcacaactacaaaatatcctaaggaagcatttctgagaacctatccccaccattaagtgttgcatgactgtgttagaaaagaggaaaaatcacaaatcaaaaatctaaactcttatctcacgaacctagaaacagaacagaaaaataaactcaaagtaagaataaatatacaaatgataattataagagcagaaatcaatgaagttgaaaacagaaaatggtagaaaacatcaatgaaacaaagagctggttctttgaaaatataaaaaaattgacaacccataggaagaccaacaaaggaaaaaaagagaaaagacaaagttatcagaatcagaaataaaacaaaggtcagagcctttcaactaatagttctggagcaattgaatatctattcaaaatacaaataaaatgaaataagtttgacctaagcccagccaacacctttggcaaaaattaactcaaattaagtcatgaacataaatgtaaagtgtaaaattataatactttttcaaagaataggagaaaatcttgggactccaggattaggcaaagagttattagaactgacaccaaatcatatttccacaaaactgaagatgtttgttcaagccagtctcagtggctcacacttgtaatcctagcactttgggaggccaaggcaggaggatggcttgagcccaggagtttgagaatagtctgagcaacatagtgagacctcatctctataaaaaacaacaagttagataggcatggtggcagacatctgtagtcccagctactcaggaagctgaggtgggatgattgcttgagcccaggaggttgaggcttcagtgaggtgtgatcacaccactgcactctagcctgggtgacagagagagaccccgtctcaaaaaaaaaaaaaaaaaaaaaaaaaaaaaagtctgttttgtgaaaggccctgttaagaggataaaaatacatgctaaagagtgggaaaacatatttgctaaccgtatatctgacaaaggactagtatctaaaatatgtaaagaacactcaaaactcaacaatgtaaaatcaaacaatttaattagaacatgggcaagagacatgaagagtcatttcactgaagatacacagatttcaaaaaatgcttaaagttattatccataagagaaatgcaaatttaacccataatgtgaggtcactatacacctattttaatggccaaagttaaaaatagtgacaacatcaaatgctggcaaatatgcagaggaattggattacagtgctgaatacacacaatgatctaaattaattgccatagaatcatgcagagtaaaaaatgccattctcaagaggtttatattgtacattttttatataacattcttgaaatgatgcagttatataaatggagaacaaattaacggtttctaggaattaaggagagtatgtggtgtctatacaagggcaacatgatacatgtatgcattgtggaatgattacatcaggctaattaacatatctagcacctcacatacttttctttgtagtgaaaacaataaaaataaattcttttaggacattcaaaataccaacaggtatatgaaaaaatgctcaacatcactaatcgtcagggaaatgcaagtcaaagctgcaatgagacatcatcttattgcagttagaatggctattatcaaaaagacacaaaataagaaatgctgttgaggatgcagagaaaagggagctctcataggctgtaggtgggatgtaaagtagtacagccatcatggataacaatatagagactttgcagaaaatgaaaaatagaactaccatatgatccagagatcccactactgagtctttattcaaaggaaaggaaatcagtatatcaaaggaatacctgaaccctcatgtttattgcagtactattcatgatagctgagatgaggaatcaaattaagtgtccgtcaatgagtgaatggattttttttaatgtggtatatatatacaatgaaatactgctattcagccataaaaaaagaatcaaagactggcacagtggctcacgcctgtaatcccagcactttgggaggccatggtagacaaatcacttgaggtcaggagtttgagaccagcctggccaacaaggcgaaacctatctctactaaaaatgcaaaaattagctgggtgtggtggcatgcacctatagtcccagctactcagcaagagaattgcttgaacccgggaagtagaggttgcagtgagcctaaatcgtaccactgggtgacattccagcctgggtgacagagtgagactctgtcttaaaaaaaaatatatatatatatataaaataattttaaagagaatgaaatcctgtcatctgcagcaacataaatggaactggaggtcatcacgttaagtgaaataagccaggcacagaaagacaaatatcacatgttcacactcatttgtgggagcttaaaaaattaatctcatggtagtagagagtagaattatagttatcagaggctaggaagggtgacaggcatgaagcgaggttggttaatgggtacaaatatacagctacacaggagtaagttctactgtttgctagcacagtagggtgactacagttaacaacaatatactgcaaatttcttttttttatttccaacttttaagttttggggtacatgcacaggatgtgcaggtttgttacataggtaaaagtgtgctatggtgatttgctgcagagatcatcccatcacctagatattaagcccatcatccattagctattcttcatgctctccttcctcccacccccaatgctccaacaggccccactctgtgttgttccccctccatgtgtccatgtgttctcatcattcagctcccacttataagtgagaacatgtggtatttggttttctgttcctatgtctgtttgctgagaataatggctttcagctccatccatgtccctgcaaagaaatgattttctttctttttatgactgcatagtattccacagtgtatatgtaccatctgctgcaaatttcaaaatagctagaagagaatattcaaaatgttcccaacacaaagaaatgataaacattcaaggtgatggatattttaaatgcgctgatttgatcattacatattgtaagaatgtatcaaaatctcacatctaccataaataggcacaatatataaataaatctttttaaagtaaaaaaattaattattttagcaattttgaaatatactgtacattatttttaactataatgaccacattgtgcaacagatcctataaatatatgcaattattatttgtcaattaaaaatatatattttaaaggacagcataaagatctttgcggtgatgagaatgttccatattgtgactttatgtcaagatgtcataatatcaatatcctgattgtaattctgcaagatgttaccattgggggaaactggccaaagagtacatgggaataccctgtatttatttatcaccactactgtgaatctacagttatctcaaaataaaaagctgaatttataagaaagacaaagaatgacaggcagaaagaaacaatgtggtgttttaaaagacagactttagggtacattgaaggcaaaaaatggaaaataaatacagtacaagttaaaaaaaggcaaaactatattaatatacaaagtcgattttaggcaaaaaataacataaaggagaattcacaataatgaaagtataaattttaaaagatgacatggcagttctatgtatatttgaccctaataacacatcttcagaaagtcaataacaaatcgaaaacaaatcaaggagaaacacacacatatgattgacaattttgatacacctctcttagtaagtacaaattaagccaaaaaaattaataaaattatagaatatttgaacaacataattaacaaacttgacctaatgaacactatatatataaaacactatatatataaaaaacactaagggtaaatattacagaatacacattaattcaagtgtgcttggaacatttaccattattgatcatagcaaaggccattaagcaagtttcaacgaatttcaaataattgaatttgtacaacattctttctgattgcaatgaaagaaaactacaaaaatttaaaaacataattagaaatacttgtctaggtgcagtggctcacacctgtaatcccagcactttgggaggccaagctgggaggatcgcttgagaccaggagttgaagaccagcctaggcagcaacatactggggccccgtctctacaaaaactgaaaaaaattagccaggcgtagtagtgcccgtatgtagtcccagttactcaggaggctgaggtgggatgatcacttgagtccagaaggtcaaagctgcagcaagaagtgatcacaccactgcactgcactctaacctgggcgacaggaaagcccgtttcaaaaaaaaaagaaaaaaagaaagagagagagagagaaagaaagagagaaaggaagaaaggcaggaaaagaaggaagaaagaaagagaaaaggaaggaaggaaggaaggaaaacagggaaggagggaggaaggaaggaaggaaggattacatataatactttttaataactcatgaatcaaaaaagaaataacaatggagatattttaaaagttaaactaagtggtaatgagtgggtcatatcaaaacgtgtgagatgcagctaaagcagtgattataggggaataaaaagtttcaaatatatgtacacatatatatgtgtgtatataagcagaaataaagcaaaatatacaaaagaataactcaaatttgcttttaacaattaataaacctgataaacttctagtaagtttgatcaaggacaatgaaagaaaacaaaaattacccatatcagaaatcaagaagaggacattaatatagatctaacagatagcaaaatgataagagtaatacaataataaaacaaatttatatcaatagatttgaaaattcagatgcaatgaataaagtatttgaaaaacacaatgtaccaaaacaaacacaaaaagaaataaactggctgggcacggtggctcacaccaataatccccagcactttgggagaccaaggtgggagtatcacttgagatcaggagtttgagaccagcctgggtcacatggtgaaaccccgtctctaccaaaaatacaagcattagccaggcatggtggcacacacctgtaatcccagctactcgggaagctgacaagagaatcacttgaacctgggaggcagaggttgcagtgagccaagatcacgccactgcactccagcccgggtgacagagcgagattccatctaaaagaaagaaagaaagaaagaaatctaaataggttgataaatagtaaataaagcttcccataaagtaaactccagatccaagtaatgtcagtggttatttcattcaaacaaataaggaagaaataacactaatcttacacgaactcccccagaatatagagaaagggtgaactcttatcagcttgctttatggtgccactttaaccttgatttcaaaatccattaaggacattatacaaaagggaattaaaagacaggatatctcatgaatatacttgcaaaaatcctaaacaaaatataaacaaatcagattcaacactataataaaataaaatgttttgttcaagtggagtttgttctaggaaggtaaaattagcttcacatttgataattagttaatattgacagaacagaggagaaaaacgtgaccatattgcaagatgtggaaaggcatataataaaattcaaaacctattcgtgttgttaaaatgtcagcaaattaggaatttaaaaaattaatataataaagtgattggcaagaaaaactccagtaaacagcatacttcacagtgaaataataaaacctttccccctgctcttgagccaattttccccatacaatattttaaattattaccatttctattcaatatcatattcatcttgctagccaaacaatcatcaaccaatcaatggtagatatatttcaaatagagaagtagaattttaatatgcacatatccttaagtacataaaaattctaaagggccctaaaaattattaaaattaataagtataattaacaatttcaccagatataaggtcaatataaaattaattttgtttttatattctagcaataatcaattaaaaattaagataaagagatcatagtcacaatgccaccaaataccttaagtaactgaaaataaatgtattgaaagatgtggccgggtgcggtggctcatgcctgtaatcccagcactttgggaggccgagacgggtggatcacgaggtcaggagatcgagaccatcctggctaacacggtgaaaccccatctctactaaacaaaatacaaaaaattagccgggaatggtggcgggcgcctgtagtcccagctactcgggaagctgaggcaggagaacggcgtgaacccgggaggcgaagcttgcagtgagccgagatggcgccactgcactccagcctgggtgacagagcaagactccatctcaaaaacaacgacaaaaaaagaaggatgtgcaggatttccatattggaaaactaacaaatattgctaagagaatttaaagatcaaaataaatgcagaaaaataatatattaatggatgggaggtctcaatatttttaaaatactgatttatccctgattgatctatacatacaatgcaatcctattaaaaagtccatcattcctagaagttgacaatgagattctagaacacgctggaagaactaagggacttcatatcaggttttatgatgtattatgatgttctaataattaagaagtgctttgttagcacaaaatttgacaaacttgatgcattaaggagaatagaaaattcagaaacaatcacacacacgtagtcacttgacttcaataaatgtgccatggcaatatgataggaaaaggattcttaaattttaaattaatggtgctgagttcattgatatccatatactacaacatgaaccttgaaccttacttcatgccatatacatacaaagaaattccagatggattatagatataaatgataaaacaatacagcttctagaaaaaatttcacaaacatgaggtaggaaaagatttattaaactgaaaataaaaagcattagccataaagaaaaggtttgaagtaattgataaattgaattacatcatattaagaacttcttttcccttttagctgttattgaatatatttatgaggtataacatgatgttttaatgtatatataaatagtgaaatctttactaaagtcaagcaaattaacatctccatcccctcacatggttactcctccttcccctactttttttggtgtggtaagagcacttaaaatctactctcttagcacatttccagtatataatacaatattaataaccataatcctcatattgtatattagattctagacttattcatcctatataactgtaactttgtactccgtgacctacatctcttcatttaacaccccctgcactgctagacacaagagtacaaactgatttaattgagtaagttcaagaacagcaaaattaatgtatagttatagaagtcagaagaggtattacttttgtcagagtggatgcacataggtattgttgactgagaaggtacaggatcctgctcggatgctgagaaagatttctatcttcatctttgtggttgtatttgtgtgtaaaaataaaatcacagaaacaacatataattaagattttgacagtcttatggatgtgggttaaattttaatataattttcaaatattttaaaaatgctaacaaacattgtcaatgttaccgggcagggttctctttaaactaacttcagctaatagcaataggttagaaaacaggaacattttcagttgatgatgttttgccttaaattgccatattcattgattcaagttttctcttaggtgtaaatttagctttatgtgacatttgtggtgggtgtttatgattcattctagtgctgatcatctgacaatattaagaaaggctattaaaaatgtgagagcattagctttgttattcactcattcaagaaacactgtcttctctgtgcctgcattaggttttggactgaggttaagagatagatgacacatcccctaacctacaggagtttgcagtctaatggaggagatggctaacttagaagatgagaattaaaaaagtacaatgtcagaataggcatagagtgccaagagaatatagaaaaaagagatactgtttacatacttagcacctacaacaatagaaccaaaaagtacattacaagatgatctccataatgagaacctttaaaagtctgtggataaatttcaaacatttcctaatatcatgccaagatctagtggatgatggcacaggacatggcaggcacagaccaagaattatgctgcaaagaaggaggccatcaatttggggttaaactatggtagcagatatcaaagaaacaaaagtagttaatggaagtctaagaagataaagctactaaaatctagaagtatcagtgagttggatgagagatggagaaatggagaaaaagattttggctgctggcctctacagaaattgggcctttggataacaggcataaaataccagtttaacaatgaactgattgacttcttagataggaactcattaaaccacccctggagaaccacagctccttttagaaaatgaacaggcctcagctaataatgtacctcatagagatatacctgatgatagtaactgagcaggtagttgagtggatcctaataacagtttttcaacaatcatggatctacatctaggcagcttattaaagctcattcatatcttcacactctatagtatctccaaaagataaattgcatatgttgaataagggatgtattaagggattccctggctgggcatggtggcttacacctgtaattccagcactttgggaggccaaggcaggtggatcatttgaggtcaggacaacatggtgaaaccccgtctctactaaaactacaaaaattagccaggcatggtggcaaagcctgtaatcccagatacctgggaggctgaggtaggagaactgcttgaacctgggaggcagaggttgcagtgagccaagatagcaccaatgcactccagcctgggagacagagttagactctgtgccaaaaaaaaaaaaaaaaaaaagggggattcccttggaccttttctaaagttaatttctcaagctgcaaagaataattcaagtacatagctaaaagctcagtctcttgcccaatctactgttgatgtcctagaagcttgcaaagatgcagattgatggtacagtgttttacacagaacaccagattggcaataactaagaaggtggtagtttatcccatcctttcaatttgcttccagagtgaaccttctgcgttccaacacctgttctctactcttctttttatatctgctggggtatggtggtctttaaattgtgtttttaccctagctggaaataagttgatttttaaaaaatatacatggattttaactccttgtctcccatctagagaagcatgttgaagaacagtgtcaaactgaagttggtatttgaagtatgaagcaactttaacagctaacatgtattgagtgttcactctgtctcaggtaaatcagtctcacatgaggaaggtgatataacctacattttgcagattaaggaatagggattccaaaagtcaaatgataatgtacagttagtgagtgacatgcacgggatttaaaagcaggattttgactttcaagtttaggattttaagccccacactgtactgcctctcagcacaagacagacagacacaacagactttgtgcctttgaccgcctctcttcttttcctctttggtgtccctctgtgccactaccagagcttagcatactgttgggaatatctggactggaggcctgctcttggtccagatcaaacagagaaatgggaagcagcataaaatagttaatgtctgtccaactgtgctactgattctttgatttgtttcctccttcttctgtaagatactctttgctctgagtgagaggtcccaaagaccttgtttttcagtggctactgtacattttatagagttgtattctgctggaatattatgccacaggagtctactgaattgggctttatattaacctcattcatctttggataggttcttgttacaggggacaaatataaccaaagacttcttatcatatagaagcttttggttttgcaatcattggcctttaaagagttttttgaggtagcattttgtttcttttgtcttctctcctctagtcagtattcctgaagcaacaaaagtgaaatgtagctccaagtttagtttaaaataaactgagtttatttttcctatttgtatttctagggaagttggaccagaaaacatgttatgaagttggtttcgtgatttagtacatcaaagcctttttatattagacttacaggctagagaaagacagaaaacagagaacacagaagttacattttacagttttcagatcattttaagactataataaagttatgttaatgcattctcagactttttggtaaaggtatattttcaaaaatctaataatacaatctttaaataaacttatttaatcatagtatatttttatctatttcactttaagtatgaatattaaaattggaaaaatatatatgcatatgtgagtttacataatgacagtgatattatttcatgcttctcttttcctacttaattatgcaaactatcctttgaaacctgaaatgattgtataagcactgcataatagctacacaaaaataatgtggaattttaattcatgaatatacaaattgggaacagaattggacaaaacaggggggaaaaggataaaaagacaatctgctctaagtcttgtctttgagtctgtgaccttagataaatttatttgtattctgtaagatacaggcaaaaactgccccctacctatcttttggagctgctgcaagatttattaaactagggggaaaaatgcaaaacaaaaactgtttagaggtgtgatgagacagagggtacacaaatccaagatagttttgttatctccaacgggtgtccaaggtagaattaactttcataacatccttatgagttaggtagataatcttagccctgtttttaaagataagagggcttatgtgctcctactaacaccacttagattgggtgtatgagaacgggtacaattactggattcagagctaggtctgtatttgttgatacctgaaagtattttaagggacagattttaaaaatcccatcattctgttggcaggcaatgagaatagcctgcatattattctccccagttttctttctgtggttcttcatgaaattgatctgaaatgcaagacaagacactttgtctcaatggtatccaaggggagccaaatattttgagaactattaaaagacattgttcaaacgatgaggcatataaatgtgatttagtgcaaactgaagccaaagtagccatcaaaaatcaagagacttaggaaaaagggaagacaaaaaaccaatgagacagttaacctgtagcttatgctgtaagattatgtggggagtggttataacattctctttaacattacttcccacacacaaaataaaagcaaatagaaatggggagtatatatattcccctcagcctaaaaaaagtgcacacttgttcccaaaattgcttgctcagcattactaaaaatgtttcaagccaattagagtgcctgacacatagaaaatcatcaataagtgttatctgttattagttggatttggagtaaaacagtatttcataaaatcaagaacatactgggaataagaatgcctacgtagaaaccttgtctctttgcactaattgctgtgtgaccctagttacttaatatcatctgtgaagtggggagaatgatagtacttatgtgatataagctttgtaaaaaaaaaaaaaaaaaaaaaaaggcatgagctggtacatttaaactccatagcatagtttctggcatagagtatatatctgatttacaaagtactagttactaagagttgtgctcctaggcttgttatactggtgccacccagctaaccagccattatttattgagcacttaattaactaggcactgaaagaaatgttgaaatgaggttaatgttgaaaataaatgttgaaataaggagcacagggcctttatccacatgtggattttttggaagttattaacaaaaaacaggtttaagtaaaataattaaatgctgtaatatacgcttagaaagatctggcaagagattgatacagaaaatgtggaataaatttcttctgtaggcagaggttcaggaaaagtctctctaaggttgtatatttaaagtgaaggtctcaaaaaagaggagtcagccatatgaagtggggttggacggtggacgttctaggcaggcggaacagcatgtgcaaaggtcacgaattggaaaaaactgggcacatcagcgaaaaggatagcccctaatggttggcgtattaggatgagggtagagaatcctgccaaatgtgatggagaagtgagtacttggtcagccatggtaaggagtttggatattattctgtttgtgatggtaagctggcaggaagtattaagcagttacaataaattatattttttatccttttgaaagactacttttgctgccttgtagggcagagtgtccacacttttttgattgtgcacaccaatcagtatacaatgactaaatgttcatattctttgtctttctgcctctgcttctttctctatctgcttctgtctctctctttatacatatatatgcatatatatgaatatatatacatatgtttatattgtatataaaactgtatataacataggtatattaatcaataattaaatattttagcaaggctaaattttaatctttctgattaaaactaaatatatcaccaaattctattattttcatcttgcacaaaaatggatcacctgagtgtgcttgtgcccttgtacttgtgtcatctttggagatgactattggagagaaggaacggaacagtgcaattatggagtagagtgagcagtaagaggctgttgtggtagtccagatgagaaatgatgataacttagatgaagtcgtggcatatttgtcacgtgcacaatgaaaagactccttattggaattacagatttatgttctctactagcctttgatatcaattactttcctaacaaatgactcattcttattatattatattaataaaaatctattggattgcttagtgggttgttggattgaaaacatcttgaaatagactcccctccatgattagcctatttattggagtcttctagataaggggaataatttaggaaattactggtactttccgcttctgtttgttggcaaaagtaaacggggagcagagccataagaaataaaatgaatccatctatctacatatgaacaatacggcttgcagccaatgtcatccacacttgtgtaacttctgtctcaaatgaataattaaaatcaggcattaaaaacttgcctgctctctatgaactcccagcaaatggactgcaaatgctttcattttaaagggatcattctgacaggtgtgtttgaaaagaggttgtaaattctgggaaggaaaaatctactctacttgtacgagcattcttcaggaagcgcttccattttgaaaccaaaataacataaatggtggtagggcaatgatagactaaagccaggaaatctgaatccactaatgtcttcttttccattttgcttcttccagcctatatttggatgataatttatttgggttctgattctttaatctgcttttcctttcttggaggaattcccatgtacttatccagactggaaaggaggttagcagggcatagaaagaagtcattaagtaaatgatcctgcaaagctctaaaaacctttctgaggaaagaaaaaactaccgctctgggttttgacaaagaacatttgcaatttgaggaggagagaggacctctggctctcctctcctccatctagaggccatagcctgccagacagcctttctgttttggaggattcaggcataaaggagcttttgcttgtatttcttctttaacgacaaacaggacactcttttaggtccttttaggtactcaagtttaatggctgagaagcctgccctccttgcatttgcactttttctgcgctggtcgtaagaacaagaacttaggccgatattttacaacacctctctggattggattgatataacagacgttttcttggacattagaaagaatttcattaattgaagagtaattatcactctgtattactttgaacttggcctcatcgcaaacacggtatacagatttttcagtgaggttattattctagtatgaaaatgaacaaaaatgtaactagaaactggaatcggtactattttgttgtgtcattcatttattcaatcagtaaatattcattaaataatgtaataacatgtacctaagagaatattacgtatatgaagactgcaaagaaatctgaaaccatttcaacccttagaagcaaactgtctactttaaaaaggattggattttgagaaatcctttgccgttttcaaagcccattcacctgctataaatcttcatctgaacttacgaatagtagcagggtgctaggctgggcagatactataatcatacaattatagaattttaggagcggaagggattttaaaggtcatctaatgtgaccatttaattttaaagcttaggaagctgacagattgtgatttgtctgaggtcccaaagcaaaccagtggcagagcaccatcacagacttgctattagggatctcaaagcatgtggcagtagcactgggccaggcaccaagtgacacagaataactataagtactgtgcctcctttcctgtatttatttgttatgcagatatgcattagactcacaataaatatttattgaactaatgactggcagatttcctcccatgtagggtactgtgccacgtactgaggaaaatggtaaacaaaaaacaggtcacttcctccaagttgctcgaaatttgatcttcctgtcctcaatgagtttgcagtctcttagggaaaccaagatatatacgcttaaaaaacgcgtagtggaaagcgttttcttaaatatgattgcatgcaggaagattgggttcaaattcagtgaatgctttaggaggttaggagagaaatctaagcgttaaaattgatgggaaaaaaaatcccccaaactaacacacacacacacacacacacacacacactcacacacgagatcatttaattacatcactctctgctgctgcctttccgggatctccccccaggctgggacacacaggctctgctgcgggtaaggtcaagatgccaactcaggaagcataagagagggaaggagcagaagcccacccatccctatctcctcaactagaaaagaccagaaagacggagaaaaaaggaaacagcaacatagactcatagaaacaataaagcaggaataggaagctcccgacacatcgactgctccgggagcccggggtcgaccgcccccgcgggcagggtgcgcggactcagcgccgggacccgcggccgcgggggcgcagagtgggcggcggggagaggcggcggcagcgcctgcgaggccgaggggaggtcgccggcggcgcctccagcgcccggagacccggtgcgcagcgcagctcggccgcgggacgcggcgcccggagtcccggcagcgcctgccctccctcccgcgtcgcccgccagcgcccgcgcccgctccgccagtgacttcagctcagctccacccccgcgcggcggcggctcgctccgtccggacccgcgctcggcacaagcccagcccgggcaagcggccgccacctgcccggcgccgcctccgcccgcccccaccgcggcgcaacttggatggagttggggtcctgagcgccggccccccacagccgccagcgcagagctcgtgccgccaccttcgttctgggacccctctctccgctgctcttcgctcccgcgatgggaaaagttggcgccggcggcggctcccaagcccggctgagcgcgctcctcgccggcgcggggctcttgatcctctgcgccccgggcgtctgcggcggcggctcctgctgcccctcgccgcaccccagctccgctccacgctcggcctcgacccctaggggcttttcccaccaggggcggccaggcagggctcctgccacgcccctgcccctcgtagtgcgtcccctgttctcagtggcccccggggaccgagcgctatccctggagcgggctcggggcactggggcatccatggcggttgctgcacgctccggccggaggagacggagcggagcggatcaggagaaggcagaacggggagagggcgcgagtcggagcccccggggagtgctaagagatggagggcagcaggagcctgggactcgggagcgggacccggacaaagccacccgcttccggatggaggagctgagactgaccagcaccacgtttgcgctgacgggagactcagcacacaaccaagccatggtccactggtctggccacaacagcagcgtgagtagaatgggactgagggtaaaggggtggaaagatggaaagggttaaagtcggctgtgtgatctgatggagaattggggggaaatagggtttctggacatgggagatgctgcaaactggtctctgcccacttcccccaagagttaacatcacctactaggagaccaacctccccatctctcccaccaacaccatcagagtcctctccaaatgccacagcttcaaactgaggagtcaaatccctatttcctgttgccttggtcgcattggtgtgtggaactgaagaccaggtaaacagaggggttaaagttctcctaatacagagatgaaagggttaaatttccaggcaagctgacatcccctcaagtgactttccctttacttgccagacctatgtactggctcaaagaagattaagaagacccatatatgtaggcgttttattttattttattttaatttcatgcggagctcctaaccccttcttctccacaagggagaactgcagtggagagtatataaggtgttctttagtgtatcctctgctttagggaccaagtggatgcaagtttcagggcaggaactctccagcatcttctaacagcgctaagcgagggtgttttgagaactggggctttccagcccgtgaatgagcggttgttctctggcatggtcagtcccaggaagatcagatatatcccagtgacaacaactccctgttctcccccattgcctgacctcctctaatgaagagcacaaataaagacttaacattccctttatgaaggcaggaaagggattgctcaattccaggaggctggattccaggggacttaggatgcaagtccatgagctttggtcctatcaggaaaggttttagattttcagaaaagcttgcatgtctgcaatctgagggagctattcctgtttaaattgaacctagaaacttcagtgagttgaaatagtagagaaccagctttgattgtaataactaaaagtgattttaaagtgtggaaacttctccagacatagacaagaacataacaaccaaggatgggtaaaatgggggaaaaaaatttcaagttttacagcttcaaccaggtaattgagattgtagtgtttgtaatatgcacaatttacgcagtctggaacctttcaaaacgttttctgttgtgatgtaattcccagaaaccttcccagagaagtgccactttagtgagttgtgctcattgtcagctttttaatgagagttgtgaacattttaaaatactaatctgtcatcatgaattccttgggtacacagatataaattgtattaaggcacatcatgatagataatatttagcattgatgtatctgtcctgagagtagtagcagggttttccctacaattcctccttcatgacagagtctgtgattttatatggttctcaggagtggtttgatcaaataaatgaagctgaaattctttccattcaagttctggagacccttgccctcattccttaccttaaccattatatctttcatatcatagccactaaaattaatcctctaatttgaactcgaatcttcttaaactgattgaataactttcacactgctttaagtgattaactcaaagcttctggctttaaggggagatttgaaacacatcaaacatgttagctcttgttgtattaagaagtaaaagactttggactcagaatgtttctggcttttaatgtaattcaagctgtaaaatatcactcacccattagacctcttcttttagctcatctcttgaaagatcttggaaagaaagagaaaagtagaatacatctttggcaaatttttaacctccgtttaggaaatggtgccaagcactgccagcattaaaaaataataataaatggtgcttataattctagtagggcttattaggttcagggcattgaacatgcaggcaggtctgagataacgtaggaaatgaggtgatgagtgttaaagttttgatcactcaaatcatgttaactaatgaggtgagatttctgccccctgaagtctcttattccataaagacctctgctgacccagtctctgctctggtcatcacacacaaaggtgtttcttctttttcttttttaagtatatacatacagatagtggagaaagagaaatagtctttatctatgtcctccaaaacaaagccagtcctacgtatctggaccagactcagagaaagtttaaaatattttttaaagggaaagaaagcataaataaactttttttttttggccgttttgtagaatgcaaagcagagtggagacctgaattctagttctgcttatttgtggtttgaccgaggcaagttgagtgtccgctgaatgtggattttttcatctctaaagtgggggctatgccggtcagattaactacagagaattaggagccaggctatacataagagggcagtgtgactttacagcctcatacacttgtttggaactctcaacagcacttcactttaccccagggtgggaaatccactaatttaaacccgagggccagattggagtggtggaggggcatgggggactcttatcttttcacatttagatgtcctcccctataaatctgcccccagacccattcaggaccacaggcagtgcacatcctgtgaacccttctcacctttagcaaaaagcctttgctatgaagagtctctgattatgacaacacctgcattcaaggtgcaaatgcatggtaattataggctgcttgtcaatctggtgaggaattctggatggttcactcacctccttcccttcactttcctgccccctcagctgttggacttgagcagttgtataaagacatgtctgttttgcctcgtctgtgggtgtgatgtgattcctctgtactgcagtctcgattgatggaaactgttgctagagttggtggaacacctggggggatcttctggcatgaaaggtgctgggtatgaatcatttgtcatgagcttggtgtcgtaagcaagaacatattgttcccaccctactcatcccaggcatgctgtgccctgatctaaatttatatagtaatccttagagtgttaaaatatatatttgcctttatatgtatgcataatggtgtatgtgtttattccttatttccaagggattttaaagtgctgtagcattaatctttataaaatcctttgtaggtagtaagtaggtgacgggtgttaatatctctttttcatatttttatgccggagttaagtttagtatttcaattcaccactctgcccctttctcactggcaattgtattacaagatttgttaacagagggttttacttgacttctatttttccatgatgacatctttaatgttacatttctcatagcacatgatggactgcttgatttctgtgtacctctttgcttctagttgttctgggatttgacatttaccatccaacattagtgaataaattgagtcccaatctgggccaacttttggggtagatgctttacattcatcatctcacttaatttttcacagaaatgtcatgtgtaggtgttattattgtcattacatacaggaggaaactgaggttccaagaggctaaatgaattgccaaatagacacaggaggtcagtggcagaacagagactgtcacccaaagtgatcctattcccagactgcacagaagggcttgttcaatggactttaaagtaggacggaaaaactcagaccttttggagtttatattttagataatcctatcttgagttgatttctgatgatggtggaggaggacgtactcttagctggaagctccatctccttgtagaaaagcgaggacattaacatgtgcctgtcacattgcaccctttaccttaagtagtgctttggttgttctctcatccacccacctcttcatcttcagtgagacatggaatctgcacctggtgattcagtgagcaagaggtaacctgcgatcattcagctttcagctcagttgttcctcaggaatagattccttttctaatttaatggcaaatctgatattatagacacactggctgtgaatgcttgacttggctatacattttgatacagtttttttttttcggtggggaggagctgaccttttaaaaagtaaaatgatgaaagattttagctttctctagcaagtccacgtaattccttctctcagtacttaatgctatatgaatgctaatgtggtgtgatttggaaggcaatgggtttgaaatcaaacagatttgagtttgaatcttagttgtcctgctaaatcagcacgttgccttgagtaagtcacttaaattctttgagcctgagtctccccatctaaaatatggggatagtatatctttcggaggttttttcctcaggaggcgacatcgtggatacaaagtgctttattcctagtaaatgctcaataaatgctacttactcatgggaagaaagatttctctactgggaattaagaattgtgggttataatactggctgtatacaaaaattagatacgtagtcatagcatgttgaaatgttgtagcctcaatttcatcctctgtaaaatggcactaatggactaaaatccattacaggtcaaaactaatttaatactttgttcatacagatactggatacctgctgcatttactaagtaaagtgcactaggagtgttggggatgtagaaatgacataatgacctatacccttgacctgtaagggaacaaaccttttatttcacaaggttcttcctttttcctcagttcatatgcatatctgtttaggggaaatcaagtaatgtgagatcccagcaggccttcatttcaatctgtgcacatgggtttgcagcaaaacatagtttattgggtttattgtattacatcttcatgttaaggaacttgctaactttggaccccccttcccccccaaaaaaatgcctcatgtgaaattggaaagtaaaaatctcttagttatttaatgagattttctagagaacattgacatgaatgttgactgtcagaactacatccacatttttttaaagagagaccttagaagttcataggatagggcaaaaaagcagatacatgaatctcatttatatatgaaaataataattgctcccatttaggagtaattgctatgtgccaaaattatgccaagagccttacgcaaattattgtgtttagttttaattcaacaaatatttattgagctcctaatatttgtcattcactggcatagggatatttgtgaagtgctacacaagatgaaaagaaataattcctgccctcaatgagctctcggtcttgtacccaaagaaacttcttaagagacagcaggagatgtacgttctctgaggacagaacatgctgtaggaagtcaggggagagttgggcatcttctggctgggatggccttcaagctggattgtagagtaggtacttcagagaaaccttgaaatgtagagaagattgtaagtaacagttggagattattacaaggatatttttagctgaatggatgtcataaccaaaggtcaagggaagagatgtaaacattcctctttatatccaggaatttaaattacttgatttaaaaactatgtttaacgaaagttttaaccttaggaatgattgaaaaatatgagttaagcaaaaaatatacacatcaatcttgtagtaaatttgggtacattccaagcccagtaggaaaataaaaacctttatggtcattgagagacatgactgaccttatttgcacattaaatcttagctggagtcatcattgtttcatttttaccttgatactttccacacagagttttcacaaaaggactttcttttgtttaagttattggtgagagagatcactgttcaggctgccttgaggataaattaatttttctccttgccagcttatattcagccactaaatgtatgtaaaatatttgtcctgtttttgtgtatgtcttaattactgtcccttattttgtggctaaaaggtgtagagaaggcacttgtgtctcctggaggggaaactggccaaacagcatctctgcagtggccaaaggggatggcagagaagagatgtgttcattgcgaggtgaggccaggctccataaaagtgcagtggttcctgtcaaggagctcaaactctgctccgattgtacggatggagtaagcaaacagttggcaagaagcaaaggtggaatcttagagtgcaacgtttagaatgaaagaacagagcttatcctagaatgtagataggagtaaaaaaaggacgtggatgctctgtcggaaatcctatgtgagattttacacacatatgaaagatattgtgtctatttctatagcactcctgaatgtttttataccactttagatcagttatagcccttttttctctttgcaaaatgcttcagttttcaaagatcgacacattacttccattacttaaggtattttttctcaccacgattctataagataggaaagacaaatatcatctacactctcagataaaaaaaacaagatgttcctattaagtaggtcagttagtggaagaagaaggtcaaataacatttggtcacactgtaggagtgattcttggtttgacccactgctggcttgccacaggcaagagttagaacacagctgcaccctagccttgtggtttgtctgaagcccatcacaggcaagagttagaacacagctgctccctagccttgtagtttgtctgaagcccatcacaggcaagagttagaacacagctgcaccctagccttgtagtttgtctgaagcccatgcacctgtatccttaaggttttccattgtgggaagaagagtgaatattggctgtagagctcctgagttccaggttcagcttttcaagttgtttgtcttgggcttcaaaacaaggagcctcatgaaaagtcatgctcttggcattgtttaaaccactgaaattaccttaaagagtgatgatgggaccttctggaagtgaggttcccagtaataacctgtctgccatatgtattccactgctaatagacttcagagatgagactactcatgactgggtttattgcaatagcggcttggggtagaagggaggtatagccatctcttcctctctttgattttcttatgcagataaaagctagttaaaaataatattaaaggtggtctcactacgtcttcccatataggaaacctagagtgtcaatcaacattttggagcagcagtagtcaaactgaaggactgcctgttgatgctaatgggttttacttgctcaaggattataactgagttaccagatgtagctttttctacttctaactgttggggtgagagtggaagaagagagcaaaggaaagtttgctgaatatcagggacaactctatctacataagacatattgattatatcagaagtctcctttaacaaaaataatataaataaccaccaatttagtgaacagcttctctggaaatatgatctggaacatcaccacatgatttcacttgattatcacgacacctttatgaactacgtactgttatcctcattctaaagctgtagaagtcaagcttaaacaacttgctcaaggttacccagctagcaggtggcagagctgggatttgatttttgccctttctggaaccaaagctctttgtgctataaatcatgctttgtatgggtttatttttgtataagtttatttttgaatgggtttatttctgagtttctttggaaagaactccacaattcagtgcagatggggtggtaggggagctctttatatgaatgacatatcttggggggtcttcctttcacttcaccccattgtcaggtcactgacactttacttggcaataacccgctccatgatgctgtttgggttgaagccctcacctgtgtccatccccacaagtggcttctgggggttattaatgtgtgtcatcttgttatcctgggaagatgtgtgggatgtgctgtttggtttctccctgctgactaatgaccctacagtgacagtgtgcacaacgtgtacactttttaaagaaagtgctaataagaatcatgttatcagacaaccaactaatcatgttgtgccctggaaccaatagattgacgcctctagtcatctttccctaaccagagtaacaggagctgttgagacacaaaatcatgggccatcaatccttctgctgcagggcctttggtggtttggggccgggtggtggatgggtcggtggggcagattaaaagcgaaagatcttccccttatctcagcaattcccactgtacattcttgattataatcattaaagggaaaaaggctattttgggcacattcagcaccctggtttagaaatttatcatgtgcagccctgctcgccctgacttgcattttgctgaaatggtagaagaattcttaactgggcaggcatgggctcactcataggtgcctggggcagtgtttctcaaagtactgtcctcatgggtcctgcttttgaatgacctgatggggagaagggaccaggcatctatattttacaaactccctaggagattcttgggaacactcaagtttgaaaatcatttccttaagatttgcacatgagtttaagagtccatggacttcttccattgtctgcataattttgtgttaatatgctttaatttttcccatgaagagatgcagtccacagtgtttatcagcttctcaatagaaaccatgaccccctacagtgaagacctattggaatgtaaggctctataaatcacacaggacagtacagtgtagcccaggtgaaatttctgtcattcaatgtatactaaaaaattatcttccatggctgtccacataaccacaatatgtcttaaatggcagaaagtacacatgatttaaaatataatttattgggttaattgccgactctactatccactagatatgtgaacttgtgcaattaactttatctctgtctttagttccctcatctgtaaaatgagggtactaatggtatatttcttatatggtggcttgatgattaacagagatagtataacttcttaacagaaattaacagagataatataacttcttaacggaacatctggcatatactaaatcatcaataagggttagctgttattacagtttcattgatattaatagtgctccagtatggcctattaaaagatgtttgtaatatgacattcatgatgttgtttctgtttctgcatttaggttctctcggtccagttctattttcttaaattgaagattggggcactgtcctaatcttcttagcatccctgtcagcaactctagctgtttccacttaatatttgcttactaaatatttccaattttatttgctatttccttgggaaagtgtttttttttcatgtgttgtgaacaacctataactttgtacctgtgtgttgtagaataatgaagtcattaaaaggttgattataaaaacatatatttttaagtgggaaactgtccacaaaataccagaataaaagattacaaaatagtacaaacataaacccattaagtcagagtttttgtctatgttgttctctcatatatcccaagtccctagaaatatacctggaggccaggcgtggtggctcacgcctgtaatcccaacactttgggaggctgaggcgggcagatcacttgaggtcaggagtttgaagccagcctggccaacatggagaaaccccatctctattaaaatacaaaaattagccaagtgggtgtctgtagtcccagctacttgggaggctgaggcaggagaattgcttgaacctgggaggtggaggttgcagtgagccaagatggtgccactgcactccagcctaggtgacagagcaagactccatctcaaaaaaaaaaaaaaaaaaaaagaaaagaaaagaaatatactggaaatagtaagggtttgaaacagtttttttcaattattatatactgtaaaattaaacttttgtgggaaaaaaagcaggaaaggatatgactcaaaatgtttgccagtgataatgatgaatgttaggattctatgcaaggtttcttgtgttcattctttttgtcatttcttaataaatgtgtattgcttgagttatttttaaaagttattttaaaatgaaaataaatgaaagagagagcaaacgagtttgtgaacttggcctcattaaaactgaattccaggcaacaactgtacaagagctcacattcaagttgcctgtttcccttttaatcactattgttgggagacagtctgctgtccaggctttttgcaaaagagcaagatcactctgtctgtttcctgagtatgcagcagcatgtgctaccaggccttttgtttatcatcgcctttgttgattccagagagaatgatccatggtagtttcaccaacctgactatatatcccagaaattccagtgacctccattcacccagttaaacaatatatgtttcagtttaaatctcaatctctgtctttattttggtctccatctgcatatcatataagtacatataaatatatacataataaatatgtgcgctcttatatgtctgtatacattcacagcaacataagcaccaatgtacaacatttaagtctccactcttaaaaacgaaatattagtatcgtaaggccacagtaaggatgtttactgattgtgagcactgattggaaagagagctccagaacaaggagagatggaaaaaaaaaacagagagaaggagacagagagacataaataacagatatatggaagacagaaaatgaataagagagagaagaaaagggagagggagaaaatgaaggagggagagggaaggagggagaagggaagagaaagaacataagttcatgacaaaggcagagagagacagaaggaaagccagagagcagaggcagattgagaagaggaagaaaaaggaaagatgagagacaaagagacacggagagaccacaggcaaagaaagtcatattgggagacaaagacagagctgtgatggaggcatataaacaaagcaggagaatcataaaaagagaggaagagatgaaaataaaaggcaaaagtgtcagtgagtgtattagtccattctcatgctgctaataaagacatacccatgactgggtgatttttaaaggaaagaggtttaattgactcacagttcggtgtcgccagtgaggcctccagaaacttacaatcatggcagaaggggaagcaaacagatccttcttcatgtgacagcagaagagagaggtgcagagtgaagtggggggaaagccccttataaaaccatcagatcccatgagagctcactcactattatgagaacagcatggaggtagccactcccatgattcagttacctcccgctaggtcccatgtgtggggtccccatccaggctgcttacatgggctggcattgagtgtctgtagcttttccaaatgcatggaacaagttgtcggtggatctaccattctggggtatggaggatagtggttctcttctcatagctccactagacagtgccccatggggactttgcatggggaccccaaacccacatttcccttctcctctgtcctagcagaggttctccatgagggctccacccctgcagcaaacttctgcctggacatccaggcatttctgtacatcctctgaaatctaggcagaggttcacaaacctcagttcttgtcttctgcacacccacagggctaacaccatgtgaaagctgccaaggcttagggtttgcactctctgaagcaatggcctgagctgtacattggcctcttttagccacagctggagctgaagcagctgggatgcagggcaccatatcctgaggctgcacagagcagtgggttctgggcctggtccactaaagcatttttccctcctaggcctctgggtctgtgatggaagggcctgctgtgaaggtctctgacatgccctggagacatttttcccattgtctttgtgattaacatttggctccttgttacttatgccactttctccagcaagcttgaatttctccccccagaatttctctgctccctcttgaatgctttgccacttagaaatttcttccaccagataccctaaatcatttaactcaagttcaaagtttcacagatgtctagggcaggggcaaaatgccaccagtctctttgcatagcaagaatgatatggtttggctgtgtctccacccaaatctccactagaattgtatctcccagaattcccacttgttgtgggagggacctagggtgaggtaatggaatcatgggggttggtctttcctgtgctattctcgtcatagttaataagtctcatgggatctgatgggtttatcaggggtatccacttttgcttcttcctcattttctctcgctgccaccaaaaatgccttttacctcccaccatcattctgagatctccccagccatgtggaactgtaagtccaattaaacctctttttcttcccagtctcaggtatgtctttatcagcagcatgaaaacagactaatacaaagagtgacctttactccagtttgcaacaagtttgtcatctctatctgagatcacctcagactgggcttcattgtccatgtcactatcagcattttggttaaagccattcaactagtttataggaagttccaaattttcccacaccatcctgtctctgagccctccaattctctaggaagctccaaacttccccagattttcctgtcttcttctgagccttccaattctctagaagttccagactttctaacatcctcctgtcttcttctgagccctccaaactgttccagcctctgcctgctacccagttccaaagttgtttccacatttttgggtatctttacagcagtgccccactactcagtactaatttactgtgttggttcattctcatgctgctaataaagatatacccgggactgggcaatttataaaggaaagaggtttaattgactcacagttcagcatggctggggaggcctcacgaaacttacaatcatggctgaagggaatgcaaacacctccttcttcacatggcagcaggggagagaagtgtagagtgaagacggggaaaagccccttgtaaaaccatcagttctcgtgagaactcactatcacaagaacagcatggaggtaactgctcccatggttcagttttctcccaccagttccctcccatggcacgtggggattatgtgaactacaattgaagatgagatttggatggagacacagccaaaccatatcagtgagtgagaagaacttataatcaaatcaagggcatagaagaactggtcctaagaagacggtgcccttccaaaagcacagtgcttcacttgccttttgctttgagtgattttgcacccaaccatgtcagatggttagcacaggtagccactcttgcatgtgtgatggctttgaagccatatgttcatcagatgggtgtggagtggaaggggttcatgtagtatttatgcattattaagaatctcttaagagtgattttgttttggaagtcggactgatgttctgaatggtggaaagacaacttttaacctttccttttataccagttatgctgttctgaatttttagcatgggcatgcgtttctttaataataaaaatactaaaacatgtttgaagtggctgttgtgtcagcactgtgctgagcgctgggaatacaaagatgaataagatctgatctttacccttaagggtgcatattctggtggaaatagacccataaacaataaattgcaatttactgtgataagtgcataatagccataatagagttttgtgcaaagtgctatgggagcaaagatgactgggggacacctaattttgcctgagtgggaggtaaggttttaaagggaagtgacatttaagctgggtctttatacaagattaaaaattttgcagacagaatagggcggggtaggagaaaaggtcattagtgcctgtttttaattcttcatatcttgggtcttgggttgatcttaggttgttagcacaatcaccaagctgtgactggttgaacactttcttcattgtctcaatgtctaagatatttggaaccaaggctaacagtgttttaaaatatcagattagattccacatcttagaatgttgtgttcttgtcctcaaactggacaaaggaatctgattttctcagagataaattgctcccctaaatcttcacccaaccaacacacacaatcaagaatgcgcatgcacgtgcacgtacacaaaaccattttaaagcatcactatcttctctcttcacagttaaatctgattagcacaatggtgatgggatttttttattggttattctgtatgtttctgcttttagagccttaacagtggttgtttttggtattttcttggacatgcttctcaaatcagtattagatacaagtatattgggatgaatcggatggttaccacgtatgattaaagcgcgatttttttttacagcagtaagaaaatgcaatagaatattccactccagtgttatccaaacttagttatgccttgccaactggagacagtgtatgtacgctaaatacatggaaatgtcccagaaagcaaagttagcttttaattggttggccctttccgttcttcttgtctaccttctaaataaaagaaaaaaagaacagaaaggatgaaactggggcggaaatgtatgtatagtcagagacagagggagctgtgctctcagggctggcttaccagccagtgagtagttgaagagataccttcgtggtctttcagttcccttctttccttgcacgtaagtctcagcagactgctgtttgagatgatgttacaaggtcccgatctggttttagggtgttgtgactttagaaatttttgcctagcattttttgctaggtagtagagaatcagtttaggaatttcattattttaagacaaaaattaggtaagaaagagcttttcagcagatcccaaatatgccctgagacaaataaatgactatccccagagagtaggaattagctcccttccaatcacctaagccttggtttaatgccctctatgaaagtctccttgatgttcatttggttagattaaaatcttagggcagggagaagggaaaattatatttgccttaaaagctcaccaactttataagtaccctagtacctcttactcaacttaaatccaggtattgaaaatatctttaaagaaacctttgcattccccattagagggaaagacataatttatcttttgttgcaggtaggatttgaggtaatttacacaggggtggccaaattttagcccatgggctatatctgtcctaccacctgttttttatggcccacaagccaaagatggttactacctttttaagtgactggaaaatctaaagaatggtatttcatgacatgtgaaaattatttgatataaaatcttactggaacatggccacactcattcattgacatattgtctatggctgctttcctgctacaacaacaaagttgaatagttgtgacagagaccgtatagctcacaaacctaaaatatttactctgtgaccctttacaggaacgtttgccaaggcctgatttaggagattggagagaatgtaagcagtgaggcacagtaaaggtcctgtggttgtcatctgcatgccaacttgagagtgttttttggacccttggttttcctggctcaaaggcatacacactcctaaccattgtagacttccagtcacaaagtggatcatttattttccgtccctgcccctttgctcaagctgcctaaaactttactgcctctgtttaaaaactcaatctgccatgtctgtgtccacttaaatcctttccattatttaagtcctcatttggatatcacctcctgtctgacgatttctccaacactttcaagaagaagggaagcctgaatatcatgaagaaaatatctgatcttatgtgccgggtcactctctgtatgtctccctccaagcactaagcatcatctagtgtgtgctccaattaatagtgagtttctcaagggcaaggcttcatttcatttatttttatatgccagtatttggcacataggtggtttgcaataagcatatttttcaggacactaaagcaatatagaatctttttatttacctctcttggtatagaagataaatggtcagcattgatataccataaagaaagtctgcctggatagttttcactatcctgattcttgaagtataatctgtctgagttgtctcatccaaattgttctacaaaagtggccaaaaatgagacacaggaagagagaggggagagagaaagagagacagagagacagagagagagagaaagaagcgtagattcagatcaaatcagatgcattggaggcaacagctcccttgtggcagggagggtaggggtgcactttgataaagcatgctgctccagtggataggatgggctgatggctgtctagtcagggctagcactgccaaaggcctgagggagaaaatagcttcctgctcttcatttaaggagctgaactgagaaccagcgcccatgttgcaaagtctcagcagggcaagaacgtttgaaaaatgacgaggacatattgcattatgagaaggataaaattgcatttgtgataatggactgacctaagagcactgtgccaataagaaaaagaattgtaggttaaacttacgttttctttcaggcacatttacctgaaggggtaaattgagagttgctggggttatcaattaagttggggtatgatagaatttcaattaaatgtaggtaaggacttaggggttgggtgatagttaatataataataactaatacttactgggtttttactatgtgccaggcactatttgaggggaaacacatatctgcaacaataggaagtaggtactgttattattcgctagacatgagtacaaggaattgtactattcccagtacaataggaagtagtcacaatcattattctctaaattaaagtctagttaagctacttaacctagggtgagaggttaagtaactcacccaaggtcacatagaaagcagatggtagaattgggagttgtgaagttggggtctaaaaacaccagacagtttagaccccatgcagttggggtctgaaaagctcagctcttaaccactatattctactgcgtttaggacgctatgacatatcatcttcaagtagcctcaagtttttcctgtatttagtgattgttaattggatacctggtgtatacctgacatacaccaggtgctggggatttattcatgatgaaaaccagtcatagcctcgatcctccataagctaagagcatggggcatccactcacgttctgtagtctttgagacgttatgatccaggattcttttcgggaagtagacttttcaaaacccccaaagctaactcattcgttaggagttaattgaaaacatttagaggaaacattttttgaaatcagatgaacatttttaggcaataggtggagtgctggttgtcatggtttaaataccgtaaaaaatgcatttacagaaatctgtatctaaagagacaaacgcttaggattctccttatcatggacattggtgagttgtatttgtgtgtgtgggtgtatgtgatggacatttatacagacacacatgtatctgcttctgcttctacatctatatcataagctatacttatacctgaaactggataatctcattcagtgtctctgctttgtcttcaaattttgaggcaaattctgttatataaggatgcaataaaactgtggagctacttccctgtgaaaaccaggatgcttgccccagtggtatgattaaacaaaaaatttatgtgtacatgacaaaatgatgaaattgtgtaaagttcagtaatagtgaaataaggcactgacttaaaaatagagctaaaatgatagtcattttgcaaataatttgggctcctttctttttataataatttcttctctcacctggaaaatgcttctctctatttaaaagttgtcctcttttctcccaaatcagaaactgttttagttagattgtgtgtgtgcacttgctaacttgctgtatttcaccctaacatttaagttgcctgaattcaattggaacaaaatttgaattgtctgaccttgatttattattaaaacttccctgtagccaacttgtttgtatttttaatggactttattatttttagacctgcttaaattttatttatgctcaattgttttcaaaatcatgagtttataattctattttatttctttcttaaaacacttggtgcacgtgggtaaattttcctgcacagtgatttagagtaggacagactttcttaaaatgcagtatttggaccaccatcaagaaagaaaaccaggataataaatggtttttgcatcttttagacaaaaccatttttgtaatctgccagtctgggatgactgacgaaatgtttccttcccagaagttgctggtcttctggcctttctccaggctcctcattttcttcttttggtcatttaattcagtcacattcgctttttctagaattcctggtagtttaacaaacttgtaccatcaggaaatgccaaatatgtttgcccaagactttcctaccaaacactctgctttattcattgcttgccccatctcatctcccactaccacccacattggtgtttatcacgttgtttgctgatggacataagcagagaaatataaatgcttttacacctccccctgcatccactggaagatagagattattgccaccttgttgaagagggagatagattaaatagcaccatgcatcctgatggcttaattctttaaaagagacactgtagaaagccttggtatattgacgtaactattcttttttttcccctttttaacagcgtgatgtggatatttgtcacacatatacccttataatcctgtaaaaaatgcaggcaagtgacggaatgcaaaatgtctctctgtctctatcgtgatgctgtcatttctcaaaattgtgaccactcttatattgataggttctagcaaagctgtgccgaagggggagaggaatgtcaaggagttcagcaggtggagctgttccctatgagacagtgctgaacctggctcttcagctggggttcagctgctcactacggagtgcccaatatggcaaggccatgggctcttgtttgtttggcagaggccagctagctgcagagtcatgctctttctttaaacccaggtggtgttccacagggatatgccttgtatatgatgagatgtgagagttgtgtgcctagctctgtggctgaccattttgatatcaggcacatcatctgtggtcagcaaagagttacaggaggaaggaaagggtaatagttaaaaatatggatgcatgtgcccaacagttttgagttttgtttactaattcttcatctttgttttagtattattaaccctatcatgtgcttaactttctggtagggctaagaacacagaaatagtcctcctctcaagtagttcaaagtctaaggggagaattaaatagttgaaatataatttggtatgtgcaaaggaggagaatctagccaaatgggagtggagtaaggtgagggtatcagcaaaggttttgaagaagatatcacatatgatgtttctggcaaatataaaagataaataggattttccagatgaaaacatgagacaagcaagctctaaggggaaggataagcatgtgtggcccctcagagcacaaaagggaacagcccatgaaaggaagggagaatacagagcggaagatgggatgggagatgaggctggagagaaaaactggcatcttacaaaaaagggccttgcaaactagattgaaagagtttggggctgggcgcagtggctcatacctgtaatcccagcacattaggaggctgaggtgagtggattgcttgagaccagcagcctgggtaatatggtgaaacctcatctctacaaaaaaaataggaaaattaggccgggcgtggtggctcacacccataatcccagcactttgggaggccaaggcgggcagatcacgaggtcaggaggtcaagactagcctgatcaacatgctgaaaccccatctctactaaaaatacagaaaaaatagcctggtgtggtggcgcgtgcctgtaatcccagctactcaggaggctgaggcaggagaatcgcttgaacccaggaggcagaggttgcagtgagcagagatctagccactacactccagcctgggtgacagagggagattccatctcaaaaagaaaaagaaaagaaaagaagaattagctgggtgtggaggtgtgcgtctgtagtcccagctacttgggaggctgaggtgggaggatggcttgagccctggaggtgtaagttgcagcaagccaacatcgtgccactgcagtccagcctgtgcgatagagccagaccctgactcaaaaacaaaaacaacaaaacaaaataagagattggactttattgtgaatgtataaaggagtgacataatcagcattttagtttggaagaaaagcatatatagcaaaaataaattgtatgggtgaaacatagaaaaaagggagaccagttgcaaagctacttgtaggagtaattcatccattgaactcattttcagggcattgtgtgagtgcctgaccatggataccgatggtacttgtgatttttacacctactttctcaagataacactatagagggcagggccagtgcacacagtctgtcacaaaatgtgtatgatcaagagtgatgtgatatcctttgtctgttatatactacttcatcctttgcttctggaggtataacatatgtgaccttagcaattttagaaactacatacagggaggcctgtgctaggagtcaggacacgttggtcttggccccagttccatcacaaatttcctgtgtatttaatgatagtaattttagttctctggcttatttccttcatttcaaaatgagaatgccagactggacaataaccaaggccttatctgttccataaccctgtcagtgtcaccctacctatgatctagtgatgatggcattgaagaagagctgggagaagaaccgcaggtgaaactggacattagactgaagtactaatgattgagagggatttctaggaatagaaagtatgcatttgagccatactaagacattttaatatagaccagtgcacaaataaaatatataaatttagactgtggataaatcttctgagtgtgatgtttaataaatactcaaagtgaatactaagtagctttaaggaatagaggacatttactttcttcatcactatgcctaacacagtgcctttctcacactagtacttgagaagtgtcatttaacgaagaggatttaaaacattttggagtgtagttgaacacttagggaagaagaacacttgtggttttagctgcttcttgcagcgcgggttctctgtgccacaaaatccaagctccccaccacaagctggcgtttgtaaaaatcagtcactagtaggaactctgctagaatctgcatctcctgggcacacattttaatatcatttcctcctcgcaaacctctgccaaaggctgcacttggaaaccacaagtaaatggagaatggcccctgggaagtagcaaataagagggccaagccagggtccatttccctagaattgaataggaaagccatgggagattaaagtgattaaattgcttggggaggataattcaaggtgccccaatctcttttcctcctccactttatcttcccactccttagaatgaaggagattcaggtgtgttttaaattgccaagaactgctttcccatagcactgcaagtctaggagaaggaattagactattttacaagaaggtgaatgctggtgtttttgattgtgcaatattcagtgaagtgaagggatggtgccacagacagaaaatcactctgctgcctcagcatagttccctgtgtgcaggacatactgctgggactgtgctgggggaagctcctgagtgcaacaggaagccaggcatctagggagtcatgatcaaaggcacaaactcctccttgttacaggcagcctttaaaatagacccaattagggccttaactggaaacccaagggattcctctgccccatgcccgttaccactgcactctgcgtgggacttctgcatacacacagactaggaacagtaataataacttctttttattacatgataatgagccaggaacaattttgagccagtgatctgagcactgccccagagcaagtctgtgttacataactactacctttttgaaaaatagtccaataatccccactgggctcactgcatacttcctcagcttggagaatatgaacaatgttaacaataggctctggaaggaaatgctgaagtttatgttattagatggaggagacaataataattttaatttgtttcagtattaaataatgtgtgtgtgcccctcccctccattgagttcctctctacaaaagtagccaagataaaacttagcccagggggttgcttagtccagaatcttatgaactctacttgagtgcacatgggtttttgccagacacctttcattccttgcttttccaccagtctgattttggtaactgagtgtagttaacatgggtcgcttacgaagaagaaagatctctgaggtcatcttctccagtgtcctcattttacagatgagaaatctgaggactgtagagactgaactaaatatgctgtgaaggacttcagagtgtggatgcccttgcttttcataaagggttcaaaacactgtcagtgtaatgtggtagttgaagactgggtttgaattcctggttctgccgtttaccagtcgggaaatattggactggtcatttaatttttccaagatcatttcatcattcataaaatgaaactaatattgtgaccactaacagggttaacttgagtattacaagagatcatgcatgtaaagcattttgtccaatgctcagccagaattaccatgtgtgttatatgttgggatatcgaatgatgtcttgagacaatagagctatagatgtcttgaaagcaatttcttatgggactatgtataggtatatacaagaatatatatacataatattagctattttatcacaatggttggtaagacagctggccttcataatgtaagaattttctactaaaggcaggttgtagaatgcatttcacttaaaaaacattataggcattcacagtaaacgtggaattttagctcagtctgtgacaacatgggccaataagaacaaatgtttgttcatttgtttgaaaactcaacatttacaagtcagccacaaagaagcaaaccacaaaaatgatattgtggaattattgctgacaataaaactgcacatgtcatgaaattagaagtttgaattttaacaacttttaacatagcatacttctagaagtctttgaagccctgtattgctggaatcagtatgtaagaattattgtgatgttgtggtaaactcaacttcatagattctgcaaggaaagtttggtggctgaaacttgagatatttaatgtgtgttcacataaacataaatatacatgtattttctttttgaatggtagataacagaaaaacatgactggctgtgaggtcaagatggagattattttattactggatttaatttgaatgctgttgcagtgttagctttgccctgatgaaggagtggaatatcatgctttagataatcactggaggcccatgaacctgggtttgagttttctccactttttgctagccaggtgacttcaaagaaattacttaaacactctacatctcaatttcaccaaaggcaaaacgggactgatgctagcaaccccataggagtgtggtgaggacatacgtgaagcacttagtgtttggccaggtgcatggagctgctgaatatgatccagttattagccatgtctgggttattaatatcatgtgttggtcattccaggtttttcggaaaggactgcaatcactataaatagttcagtgaagagcttgccaaaagactagatgatatggtttggcatatggagagcatcatagcagccatttggtgatgaaactgcgtcatgtatttgggcttcaccaatctctactgattgtgtatatgtgtcagggcctgactatacctttgagaatctgctgtctgttttttcccctctgtctttccttttctctttctctccctctctctcttcccaatctctctggcatcccctagaatttgctaggagctcactgcagtcaccaattgattgcaggaccagatcacagggtctaggtggcagtgtctttatttcatttagaaagcttttagatagataaatagtaatagaaattgcattttgtcttgactttttttttcttcagagtttccaaataagccaatcttatatcaacatggctaaaactaagtgcacaactctgcctattactagcttggttccagtttttaaaaagtgtgtttctggctttccaagactagtgacttatcctcttttctacctgcaatttctttttaaagaaagaatatccagaagatttaagcaaatgggaatttaattcatcagatttaatcttattttcatgcttagattcatagctttaatctgtaaacaagcacatcattagggagataggtaattacacaaattagattggagaaactttgccaggggagatggattttgtttaccctcatttggttggcaccagaggaatttctcacacaaaactccatcttacgtggctagagaagaggaaaagagtgaaaagtctaggaaaggaatatgtttgtccctgggatgaaatatcttgaagcaacgaacatttgttccagcctgctcgtgggggtcagtctgcagtgagggacagcggaaagtatggaccgcgtagaggcactgaggcttcacttacccaggggcctggcacatacatttttttcctcaaaatatgttatttggcttcagtgagaaatctcctaaaattttaagatgtactctacacatgaagtgcacttatgaacaattaaattgccttgaaaatctttactcttaaaaataatttctaagcctgaaagaagatattttgtcctcaaagtgtgaataatctacatgagaaataaaatgtaaatgtgaactgatgtctctgtctgcctatcttagacgaagaatgggtaaaagattgatgagtggtgtagaccatcaaccctgggcacagtttactggaaggtaggattactgagggttggagcaagcaaggaaaaataggaggggaaaaactgtgtatgaaaaggatgcagtaagaaaacacattctctttggacagatagatcctcgtaaagaataataaacaacgaatctgcaaagatagttcagatcctagtcaccaagtattgtctttctcttatgtacaggtggggagccagtaaatattttaagtaaagaatgaactaaggaaagtcacatgaaaataagaatggttagtcatgaaattcagaaaggatttaaggggtggagagatcatttaggagatagaggattcattcttttatttaaaaaaaaattaattgaccacctattatgtgctagtcaccataccatttgcagaaatgaaaatataagagaaattattttggctgtgattattgtgataataatggaaatttttccactcaataactcatttaacacatatagaaggcttattatatttcaggaacgtaataggtgtcagagatcctgtaatgaacagaatacacatggcttctgccttcatggaacttggaattgagtagttaaaaaagcgtataaaattaacagtattgaattttttttttttttttttgagacggagtttcgctcttgttgcccaggctggagtgcaatggcatgatcttggctcgctgcaacctctgcctcctgggttcaagcgattctcctgcctcagcctcccaagtagctgggattacaggcatgtgccaccaggcccagctaattttgtgtttttagtagagatggcgtttctccatgttggtcagactggtctcgaactctcgacctcaggtgatctgcccgcctcaacctcgcaaagtgttgagattacaggcggagccaccacacctggcctcatgctcccaatggtgcatacttgagtagttttcagttttgggacagatatttttgctatgaatattcttgtaactgacactattgcagaacttttgatacattctagtacatatggaggggatgtaggctagtctggcagggcagtaaaaataaattcagggagttgaaatttgagttgtcggggatggaggatgcagagtctggtcagaaagaatggtatactatatgctgacatccaggacaggatgagattagattaaagtgttcctctaggtcaaaaaagactgggacccagtaggatcagtacagttggcctcggaatgctctggcacctgtgtcatccagtgcctacataacacccaaggttggcttcatcctctgccattcctacttctcagcattctctagtgcctggcttccaggctggaggaatgatggctgtgtcagcaggctggtagctacattaagggatacccttatgggaaccaagagttaaagggcccatggggagccttacgaccacagagccccagattcttctgttggtgaaacatttcctttccaaaatggaacactggacaagattttatctagagtaggggctagactgtggccttacatctgtagaagatagagtgatttgaggggaatttgttcccagatagagttaggtggagctgactggtcctctcaaatttgcaaaaggaagcaggggacggaggggagttctggtggagtgcagggaggctgtcagtgtagaccgaattagctacgaatgtgaaaccggagatcacatagcgtgtgcttgaaacctggtactcctgcttactagctgggtgatcttggccatgatgtttcacctccctgtgcctccattctcatatttaacctggacttaataatcaatgtggttatgaagatcaaatgatatatgtgaggcagttaaaacagcatctgctgtacctaagcactttgcaagtgttggatattattgttaattcggcctctcacttaccagttgtgactttggacaagtcattttccctctctaagccttgttttttttctgcactgaaactctgaggtctccaagaccctttactactgcagcaaacccactgttttcaagctttgatggctatgcaatctgaacatgatgcattgtgtttttgttgtaggctatgtggaacccataacttggctcaggaaagtaaagacttattgtttgagctccgttctctcattctttttggtttttaggatttcagaaggtcacttgtatgaagaaagccaggacttttgtcctctcccctgcatatgggttccagagtcactcctgtgaaaagtctttggtgaaaaacgtcctcctaagttttgcgtaaatggatttctcaatgttgcctccttgattttaagttatcttttcttttcatcctttttttcttccccaattttttttttctacaactgcactctttactactaaacaagggccaccttttcctttcatcttgatggacaatttaaaagaaaaaccagaggttatttatttgaaaacaggatcatagcaagaggtgggaaagaatgagagagagatcaggggctgctttcagttgctataacaaccatatgtaatatctgtattttcttccctctttgcttttagtagcttctctaatctgtcttctggcttttgattctagaaatcacctgggattattttatgaaaggacatgtgattttaataatactttaaaaaagaaacataaacccaacaatggctgtctggtattgtgggtctcctactggccaggcactttactgggtatttaatatatgtcgtttcattataatattctctttcttctacaaaattgtagagaataatgcttggacgtaattgctttctggacaatacggtgttaatcagatacactgatagctggagccattaggaaacttccaatgtatattctatatcagagcttctataaggagcacccttctggattggcaggtgctggttaaggaggatagtttgatcaatgccctttcatgatttttccagcaacttgtgtttatttgatacaattaaagttacgtttggtgacataattgtctgggtatattttttctttgttgaggggaattctgatctatgtgtatgatacttttgcctctttaatgcttaatgagaagaggatatcagccatttttatacttcagtgcatttaattttgcatgtactatgtgcaaagcactgtgctcagtgccatctgggaaagtaaatatagtcttcagccttctggacttcatatttcaataggggagagaggcacatatgtgaataatgcaaataattttccaattgttttagaaaggacataaaatcattaaaagaaactaatgatcttaccataataaattatttaccataacgaataattacccatgtatttgttctttcccacagtccccttttgattatttgaattaaatttcaaatttgaaaaacatttaggaagctcctattatgtgttaggccctgtgttcagacaggacagatcctcacccacatggagtttatgggaaagatgtatttgtacatatttacctgcagaaaagcatgagtgtcattcccacagcacctttttctcctttccaaatctcttccttgtgtgtttcttatcacaggcaaagccatggccactcaactaagggcccaggacatcatctgagcaacgagagttaagtttttgaaagatgcatttgattgttgtactcccattaaaatccttccgggttccctatagtgtatctggaacgataatgacttttcctctgctgacttgtccgatttctcatcccaccccaacccttacattgtggtccagttacactaagctactgtggaatgatggaatataagtctttttttttgagatggagtctcggtctgatgcccaggctggagtgcagtggcgcgatctcggctcactgcaacctccgcctcccaggttcaagccattctcctgcctcagcctcccaagtagctgggactataggcacgtgccaccacgtccagataatttttttgtatttttagtagagacagggtctcaccatgttagccaggatggtctcgatctcctgacctcgtgatccatccgccttggcctcccaaagttctgggattacaggcttgagccaccgcgcctggccgatggaatgtaaatcttaaattattcactttagttagaggtagaaagaagggaggctggtcagtaggagttaaaagcgtaaagtttaaaaagttgtgaaatatttgcagtaaaatgatagttacttcttgatggaattaattgtggccacataattccttttttccttcctgacatcagtttctaactccccctggtccccaacctattagagtgaaagtatgccagttacttttcccagggccaggaagaccctctgactcctttattgtcaccactactactagcactgctactactactagtagtaataatagcaacagtagcagtgcatagggagagaattctgactcacacagaaatgtcagcaatttgtggcaaagtttgttggaagctgtagttctgcatatgttttcttcgttcagcagtcttttgacacagtgtaaaggactgcttgagtaagctatttatgtttgttagacagacagaaaagacagaagaaaatctaaagttgaaagctggggatctgttggacttccattcatttcacagatacagctagatttgtttttggttggcacatttctaaagttctgaatgttagaaaactgcaacagttgtctccaagtgccagcagttacatacatgcaccaaggctggtgaaacagacacaagggaagaaagtaagaaatgcaatgaggctgaattgtgggttcttcccacaaaggccttccagcagcctgggtttctaactcctgtaaaaacatcttctgtacctgatgttggaactcagaaaatgatacccccaaatgtactgcttcagcacactgagtactctgaaataaaggatattgaaaggcttcagaaatagcctcaaaatcaaggtctttctgaccttctccggcattctacccttccctcctgaaacacaggagggactttctctgaagttcccttatctaagtaagggaagttttttctgcagaaggaatgcagttgtcttgagccccctccctataatatcaatcaaaagattagctcactggaaaggagaccaaaggtccatggatcctgttcttctgaggactgctgcctaaaaagctgtatccacccaaaaagacaaccttcgttcacagtgcagttcctcccctcaccttctcatagtttctctgcaggagccttcaagctcctatttattcctgtagttcaaaattctatttaaaattcaaccaatctggcctttctttgaatctcttattttgtcagactctgtgaatatgaatgtaataaatttgtacgtcttttctcctgtctagtttattccagaggctgaaccttcagcgggtgtaaggaaagttccctttgtccccacactgataagggggacgaaacaaaattgctctgactcttccaaaagtgtgattgttgtttcaaaggaagggaaaagcttgtgtgtatgttgagttagttgtacaaggtctcgttttttatttttttttatttttgaaatatatgagaagggtaatagcagaaatatggttatacacatagagtaacaacggggctgttgaacgtggtaatcttagtgaatctggttaatgctttaacaaacagacaataatcacaatcagcacatcgattgtttgaatggaactaggcacggaagtgctgcttaaaatagtgtgttgattttcacataaagtaggccaaattctctatgtttacagtattaatttgcttagccagccctttatttcattgacagtacggagataaacttcagcccagctgtgactgaattatcgaatcaagaaacaagtatttgttgtctactgttagcgtgctaaagattgcttgccaccatgatgggtacatggtacaaataacatcataactccagttttcaaggagcttgagtctagaactaaggaactactaatttgaaaattaagtgctatgttgtgtaaattaacatatggcaccggaattaagagcagaatgggtgggatagtgctaaacaagaggggctctcactgaatttttaagaataggtgggtttggataggaaaaatgtgaaattgtctattcatagctaaagcttgggtataggaataaataatgggattgcctggagtttataaaacctgactgtcttgaggaggtaaggatgatgggtgggaaagatgagagaaaagagaaagaagaggggaaagggagagagggtgagagagagagaaattgacctgtattcgatgcctttaaatgctaggcaaaagagaattatctataagttcttacttagttgagtctgagaagtttaactttctaggttttactttgctactttcttctcaaagaaagaaacattgatggaaaacaaattttctatttttcagccaacagcagtggttcattgttggacggaggctaagggcagtggacaagaaagaagtggaaagaaaggaagataagatttttcccacctatcattgtgcctcggctgctcagtctgtaaagtggattgacgataactcagtcacagaggatttttgtcacagaggattttcatgatagcatcctctgtgtagcagactctgcctagcattattctcaagtataaaagaaagagacttttgtttttgagacagtcttgctttgtggcccaggctggagtgccatgatgtgatctaggctcatggtaacctctacctcccgggttcaagagattcttgtgcctcttgagtagctgggactaaaggcacctgccaccacacccggctaatttttgtatttttggtagagatgggggggttcgccatgttggccaggctggtctcaaattcctcacctcaggtaatccacccaccttggcctcccaaagtgctgggattaaaggcgtgagccactgcatcgggccaaaagagagaggctttcatccaaaatgctgcaacatccaagagatggtctgcagctagactgtgggaacagcagtttttgagggaggctctatagttgatagattagttttagaaaaaagaggtaagacttggaggagcaggagttgggtcagaggataaggcagaaatgtgatgtgaaagatctaagtcagagacctgggaagaggacatgccaataataatgtctgtgtcaacaccaggggacaaacattaaaagaaatacaaaagaagcccaaatgcaagaatgctcagaactaaggacaggtactataaagagcaggagagtgtatataggacctggacacctacacgtggtgtttgcaacaaggaggctttgaaaagtgagttcaaattctagcctttatcacttctatgagttatacagaataggcaaatttaattgtaaagacagaagaaagtagactagaagttactgggggattgggagggaggaacgtggagttattgcttaatggctccagtgtttctgtttggggatgatggaaacattctggaaatagatggtggtgatggttacacaacattttgaaggtacttaccgcaactggattgtacattgaaaaatggttaagatagtaaatttcatttatgtattttttaattccaattaaaagagtaatctaggattaaaaaaaaaaaaagaaaactttctgcgaggaaggagctctggggtccagagtccatagggaaatctgttcaccttcaggtaggataagggccaaagtgggaacaaaagatgttagattctaagtcgaaagactttacatttttgtgctcccatccattgcctgtctgctgcacagaagctcttgtcagccatgtgaggccgttgttacgatgttgaactccttttacaactctaaataagttgctcccagcctttgctcttctggatagattttggaaagtttttgattaatcatttaatacctggtttacctctcaaaattatttaacatctgttactgctttagcaatatgttttctactttaaaactattataagtatgaagcttgattttgagaaatgttgattatttgttgctctgcagtttgtaactgtatagcagagtccacttgttccttctgtaaataaaagtagccataagatgagaaacctattttttttaaattttcctctgcttctacataaggacactagagtgactaggttattcagattgtctcattattggtggtttgactgagaaagtttgggttctcttaactcacaatgaagtcttaaaattaggattggaagacagcgattccctccagttggatggtcctttattgcatgtgaaacattttttcttccttgatagtttgttctttttccctagaatatatagaaaacttggacatattgaagacattatcaagtctgctcaagttagatgaggtggatcctctgtaaggcagagcaacatgatttcattcctaatggataaacatacatcaacaagcacagaaactcccacttgagcaaagcaaagcttttgtgaagttaaggaaatgatcaatggtctctcacacagaatccagcaatagcaatagagtgagtgatggggtaactaaaatcaataagtaaaaagagatttcatccaagccatcaaagaagttattaggggcactgagaaaggagaattagaagagcagttgaaaagggtcttaaagatcttcctttgaagaggtttgtttcgaagaagcctttggaatgtaagatgacaagaacacactcccattttcaagttaaatgacaaattgggaagagtgggtaaaatttaaaacttaaattatgctcgtgtgaaatattttcctaattaagacattaaaccgtctccacctggtttctccctaatgaacaaaggcaattatgttattgttcaggctcatgtgcagcctttgataacaacagagttatttgaacattcttttttctcccttctttttatgccagtgagcaattgagcccaatcattgtatttctcttaacgttgaaggaactggcagctctcgcttgagcctgatggatttattctatgttctttcgtcccacggcaactaaattctagttaaatttatttttgaacaaaggtagtcagcctccaagagattctcttttaaatgaatgacagcagacagttccaagaccattcatttgcttatatctatttgctgtatctagacagctattatcatgcatgtggtacttcagaacaatttcacccagtctgctgtcaatagcaaccagctgaagaagcctgctccagcaagacttgtacttggtgtcttgaatctgaacggaaacttttgttattgccttgatatttgtacgagtttgtgctcagggactggtgttgagaaagagcatccttttttgcaaataatttattggtttaaaaggacttcagatgtgcattatatgtttttaggcagacctcttattaagaagtttgcagaatttaatgtatttttatcagagtctcatcaccaggaatagtggcacgacctgggagtaagacccaggacaccttattggagattgagatcatagctaaagggcagtggggagaaatgccaaagaattgatgttaatcaacatcacgcatcagcattatgaagcaaggagaaaatagaagaagtgctccatctccacgataaaggggtattaggattaatgaagtcccagctaggaaaatgttccttaaggaactaatggtagcagttcttcagcagttccctatgctgtggttcaggtgtgtgtttgagtgtttttgctaagcacattccatgggtttgtttcattatatttaatcatcacaaagtactgttgttacttccattttagaaatgagaaaacgagttcagacacttatccaaagccaaccagctggtaaatgacagtgatgggatcaaacacttacaggactgatgatttcaaaatctagactctattgccccttctgcctttcctccttgcccagcgactgtgaaaggtcactcttgagatttgcaacttccctaactgtgagagcaagatgggacatcatgcaacccgatgttgtgttcacccaaagtacactttaatctcttgtttcttttgtgtaaattctttctcatgaagaacatgatttaggcttagtttatttttttctggaagaagggcttatgtttatctggagaaaaggattacttaaatttcctaagtagaaatggaagtgctatggaatttgtttcctgcctatgaagattgtaagaccttatacttatattgaagagtgtacaagtagtaagtggaaatactggaaggaaaataaaataatgtgttgagatcctcctgagttccagtccctttcatagctattttgcagaaatacttgtattctatctgtgaaatagctgaaatcactataagtgtgaccaatttacaatgaagaatctgaggttccaagatgatacattactggccaaagttcacacagctagtaaaggaaagagataagttttaaagccaggtatgcctgactcaaaaaccagcctttattgccacattcactccattctctcagtttgcctcacattcagaggtggaggtgggccctacctaccaggtggaagaaatctggtaaggctgtgtgcctttgaacaatgccagatggaaaggcagcctttgagcatgagggcagaaggggaaagctgtctatgcaggatggaagcacaagtgaggtgatgcaaaatcagaaaaggcgtgagatgttcacagaggacttgactagagccaattgtttgtttaagttcctctgctatcttcaggaacatgatcccatttccctgctgtcctaagaattaaccaaatcatagacaaagttatgcctgtggggaagatgcacaaaaaggatgcaagaatacttaagaaaatgaacagaaagacatgccaatgacatagaatcaccaatacacaacatgtattctaaggaaatcaaagtagtggaggagtccagacctatggaggcccaaacagatatatcctggaaaattggaatttcaactatggtgctgaaagtaagggagctatattcaagcagaagtgcattcattggttccaggcacataagaataagaaatgccccaaatgacagcatagaatcctgaatcagttagttttcatctagaatctctcttacctaatggcaagatctagctctttatcagcaaacctccttgaaaagccaatgtaacatgagcatttttttttgttttatgcaattacatatctttgaataatcagcctgccacaaacaagattggggttggcatctcatttacttccaaagccatcaaagatctgtaaatcatgttaaccactgctgggctcaagtgagtgggctgggatggaaaggctacttgcctgtggcgctaagttgtatgctgttcccttgctgttgctatttatggcaagcagagtgcttacaagtattctcccaatttactcattagttcctaacatatcttttaggctcgtttttctgtcatggacagactgtgtcccttctgcttgcaactgattcattaatacaattatgttgaggtcacagatcctccctctcaactgggatgcagggaaatgcccgcgattaaaggagataaaatccacatccatcaaaagaagtgcctctgcaatgagcagaactgttgtgtcccctctccttagtgtttcataatgagctgatgacatggagacagactctccacaaatatgcagagaaaggttcctaacgaggatttctgacttcatcccaaaggctggaaatggtatagattaagctaatggaatacagaatctcacaaggttcttctcttttaaaggtcaacaggaagccagattatttttatttctcattaaaatttgactacaatctaaacgtaagaattttaataaggtagatacctgtctatcgaagacgtttttcttatttatgaatcacagttttctgggtggtgcagggcaattttcaaagatgctgactatatggcttggaactcttggtaagtcatatttttctaggctggtgatctaagtgtttacttgtaattttaaaaactaggagcagacattggagagtgctttgttgtttgtttgtttgtttgttttagataggatgaagtgatcgttggttttcttggaagaggttaggcttaaagtgagcctaaaatgaaaaggattattgtcactcaagggacgcttccaaagcaaagacttattcaggaaggaaagaaaagggccaaggtcaaacaggaggtaataaagtcaagcagagataaattgaccttaaataagtatttaattagattgaatcatgtttaatcacgtgttacagacatttgcccaacacgttagcttactggaaaatcaccttagggacaaaaggaaggaaggacattccaatttacaagcattggtagcatttcttctgggacctgaagcatttcccataatgatggtttaatacaatcgtggtcaattacctcttctgagagagctagggatatgtgccactttgctggaaatgttaaaatcctattaaacttcagttattagtagcagagggggaaaaaaagaactgaatgattcaattaagacacaaaccaccaggtgttggtggtactgaattagttttcctgttatgagcaagaaatactgattttcaagttggctagaagcctgttttcccccttatttcaccttcattatttgcttcccagccttctgatgcagtcccaaaagccacactttcagagatttttcccatatgcaaatgcgttaagcaatgtcttctgtatgcaaaaattgtatagccaccactaataagatgagtgagtagtgaccgagtgaatatccatgctcctgacatttctaagatagccttcctggtcagatcaagcacatccaggcagaatgctttaagctgttcccaacttccaaaggtaaatccaaagcagttttcatgttgaagtagtcaaatatcattataatccttgaaaatttctagctgagcaaatttgtgaaacttctaggcctttctgaaataaagaaaatgggcattttgctttaagaaagctgagcggggccaggcatggtggctcatgcctgtaatcccagcactttttgaggccaaggcgtgcagattatgagatcaggagatcgagaccatcctggccaacatggtgaaaccccatctttagtaaaaatataaaaattagctgggcgtgttggtgcatgcctgtagtcccagctgcttgggaggcggaggcaggggaatctcttgaacctgggaggcagaggttgcagtgagccgagatcgcgccactgcactccagcctggcaacagagcaagactccatctcaaaaaaaaaaaaaaaaaagaaaaagaaaagaaagaaagaaaagaaagctgagcagagtgggcagtgaggtagaattcagctttccacaattgcattttgctgaccaaaaggctgacacttccttgatcaaattggagagatgctgtctgctctgtgagttttgtaaagagaaaattacacgtttcatacacggttgcttttttatcaggtttggctggttttctgtttttcgttttgtttgtttttcacttttgattttgttcttacatgagtcctcaagttgatggatcactgactcatagactcagattacctgtttttcttttatctttttttgtgctgccccactagtgctcagatcacgtcgaccaccagttcccagcaaaatgtttgcagggaagaattgatgccattaatggttcgtttaccttccttttcagttttctgtgctcagttaagagcattttggagctagttttcatagtcaccggtttgggagaaaaaaaggaaaaattaaaacctgactggtcctgattccattttatgttacctatctgacaggtttctaattacatacctaattctaacattggaaccagggttgcaaagggaacaagacttaaatacatttcagatggtcttgtctcaattgcaggcagagatcaaaattaggacctaattttggaacgagtcatgaacttggaggccagctgaacacatatctcttcctagggctcctgggctcagcaagaacaataacaacacatacctgtaaacacactagcactgaagcgtggtacaaaaagttttcatatattatttaattctcactctaaccttcacagtttgcattgtctccattttcttttctttttttttttttttgagacgaagtctcgctctgtcgcccaggctggagtgcagtggcaggacctcggctcactgcaagctccgcctcccaggttcatgccattctcctgcctcagcctcccgagtagctgggactacaggtacccgccaccacgcccagctcattttttttttttttttgtatttttagtagagacggggtttcaccgtgttaaccaggatggtctcaatctcctgacctcctgatctgcccttcttggcctcccaaagtgctgggattacaggcgtgagccaccacaccttgcaaccttgtctccattttcaaatgaagtaactgaagcttccagtaggtaatatgttcaagtcccctagctagtaaatgacaaagcatagatttagacccttattttctgtctccagggcctgcaaatttaaacactaagctgtatcctgtaggtaaaagaaaatccttacattttgagttaaattaagcgttctaaaagttatccaatatatcatcttcaactctggacacatctcagtttcttgtttatatttgcagcattaacttatgatacattctatttattgtgtttctctcttgtgctaagtactgggctaattttgacatattccctgctttcaaagggttctgccttgtgactttccatctatccactgcaaggttctgtaattgaacttactttcaagaattaacattcaaataattccagtccattttagtttcttttactgtttattgaacagtatggttatcttctatattgctttattacatatgcatattagttcatctagtctaagctttcaacatcagatgtgggcaaaactgtgaatacaagtaccaattattttattatttactggggagatgcaacatcattgagaatgtttaccatatacccccttgtaagttgggagctgctttggctcttcagacactttgggcttcattcagttttgttgtgtttgttcattttcttccttttttttttttttttttgccagtttgtctttgcctcatgatttttagatgttttaacaaagtgaaaaaaagaaaggggaaattgtgggtggagaggaatatgatttctcatcttaaatgtgaaagaaagcctccctgggaaagcagtaacagtgaacagaaggggcttgtcaaaatgactgatactgtctttgcctctctaacaatgtctaggatgacatcaacaactctgagcatttgcttatcgttatttcaacttgagttttccttccttttcctcttcatgcccaattcttagcttatctccagctgcaaattcagaagagaagacaagtgctaaatcggtgcctcactttggagcctgaaacaggactacttttttttttctttcctgcttttagtccgtaaggagatgatagacattttataatgacacagaggtgccatcatgctattgtgccatcagcatcaaagttaaagaaaattaacttaaaaagctattttatccataaaaataactaaatgctaccgctatttgtatatgcatcatttaagattagggtcttaccttatttccttcttcagataaaagcacagacactcaaatgccatgctatttttatctataattaggttgagtagcttcttccttacctttcctggttaagtgatcagagaggcaagagccacagaaccctgacattggagtggaactcttgctacttactactcagcacttctctttttgaatgggaaaagaaggaaggaaatgaaaatcagacttctaatggttttacttgaaggaaaagtacatggaagaaatagtacatggacgaaatatcagggttgaccaaggtcaggaatggcaggcccttgcttgtattgtgcttagttgtgagaacagagagacagaaataagaatgtcatttgaacgggtattttcccttatgaggtgacctctttgtgccctctggaatagacaaagccaaaaccagtctccggagcacttctcaagactggcactaagtacagagggtcacatctacattcacagcagcatcaggtggctggtgctttttcccttgggacactccctgtccaccaaactaatttttggaggtagatgtgcttgcctccttttttccttttccctcatttgtattattatataataaatacatttttgtattaaaaggtgaaaatggagataaaaatattggtttcctttgatagcccctctccccatgcccaaaccacagacagtccttgtgtcaaaaggaaccactgtgtatttctttcagacattttatatttgttatgcaaagagatgcatacacaagaaaataatgtgtttttgtcccttatcataacaattctccaactgtatgtactgttatgccagttttatcttgtctctaaatgatattccctggggaattgatatgatgttacttaataccctgtgattttttttttttactgtagaatcatgtttgataatgttgttaaatcacagttagccattttacatttaatgcctttccctccagtcttaacaataatgtaataacaggcatcatctagccttctttgttgtactttcctttaaacaacttaaaagcttagaagggatggtcccaaagatgtcattgtatgaattttgtccttgagaacccaagtctttgattgagagcagtggggatgcttcttctgctcatgtaaccagttctagctctgagctcctgctttgcctaggtccatgcattttatggatcttctcaacattctgaaactttttgttttgtcaaaaatggctctcaggattgacagagagggattatattttactgagctactatattccagacaatctcatgaataatcacatggcatcctgtggcaaccctgagaaacaggtggtactgtccgcagtttataagggaaactgaagctcagaaaaatgaaataaactgcttgagattatagacactaagttgcatgttataaatttaaagacttcggctccaaagacacctgtgattttcactgtgccatgttaccttctaacatgaacctccttttcgaagtgctggtcgcttttctctttatcctctgcattttggcatatagaccctaagcaaagccatcctattcccatctccctcttctccttagcatagatcattttttcttgcttttttttcacttgagacctgaaacatagaacctagggatttcctcactgtggtctcccctatgaggagcatgttacaagaagggatgtagtatgggaattaaatgggtttgcttgaatgtggatagcctgctttccgcattttcagttgtagcagtttggtgccagtgatgcatggccggtttaagcagtcgtgctttgcctttcaagttagtcatctttggtttcatggaaagagtcctcccttagaggaataacaggtggaaagatctattaggttatcctgtgcattatgagattgcctacttctgtgaatttcctggtccttatttcaagtgatccatgttataagtctttggtctctgtctataaactaataagtatcactgctgtgatttgcttagtctcgatgtcctcttacttgttttgaattttctagtctaaatcagactcttcccatcagagaatagaataatataatactgtacaatcatgtcttccaggtacttgcctacaggcagtgaatttttttattactttctttattcatgtatttatttattcattcagcaaatacaaattacctgcctgctatgtgcatagcactgtaagagatgctttatgctgtattgatgtataatgtatgatacatttatatatgatgtatgaagatgccaagtagttaacattcattcaatacttaccctcaaaaatctcgacttctaattatttctgacattaaatatattcacttgcaaaggtaaaaccaatttaaagtctaataaacagtaagaatgataataacacaggagatatattataaggcaggccatgatggaaagcctggtagtcatcctagatggcatgtgctttgtgctctgaaaagatattaaaacatataggaattagctggaagaaaccatggaaagcttttctaagtgagggcagatttgtggttagctgtgatcagtcttggctgtaaacggatagttccatagatagagactctcaggcctccttcattttctaccactccattttttggatgatgaatactctcactcttttatctatctgaaattaattttgacttaacttgtgacctatctacttgtttagtcctcagaaaatatgaaaaatacccaaattctataggttattagaagacatttttcttagctccatgacatggacaactaggttaatctctctgtggattagacttcctattgtaaaataaaatatttgaaggcttctaataataaatgaactttttccctggccaaagattttcttggattatttaatatgattatctcatcaacactgcatataggtacaatactctccattttcctaataaaacaaaaatcaaggccaagcaaagcaaagtaacattttcaaagcctcagccacagtaagatatttctgattacaaatcccatgtttgtattattcccttgaaagattaaattggattactgctagagactcttgaaatgcaacccttatatacaaaccatagcctttctttaaaactagttgcaatacctcagctgagtgcatgaaatgtacaaagggccaccattctgtaggtaaacaataagagcacatttaatatttctttgctgtttctatgtctatcctagtcactttcatgattcatctctaaacccttaccaattcttttgcagttttgaaagtgtacttcaaaatctgcagtgaaattttgatattttgccttttcctttcacttcctatattaccagtttcagctactttggaggcttgtccaccacttccatttcactggctctgtactcatttcattatggtatatagctttcaggatagattagttgatgctgcagcaaagaacaatatgacctgtgtgagtcatgtgggagttctcatctgcatagttatcactcagggacccaagtgttaaagagtccaccaactgtggcattgctggttcttgagattggaaaagagagctgtggaggacctcacattataagtattctgacctggaagttttacatgtcatgtcttgtctgtatccattgctcagacatagttatatgttattttatggtacccagaaatagaggagacaaccaaaatgtgacatactcagtatatggttattctgacaagaaaaaaatgtagttactattgcaggtatcctcaaagtctgaaaggaagtagaaatggataagggtgcaaagacctgaatagatattatttacctagatatcaattcatctgtatagtcacccatcggtctgtttatccttttatgtaattttttgcaaagtccctcacagatttatggagtgagatagagttaatttttaaatcaaaggacattggatgttagataaatcagtggaggaaaaaaataaagcccaaggataaatgtgtcatgggcatatgcatatgatatgatcccattcaactgatggattgtttcctggatttactgcaaactgtctagtagctaaagaaaaaataaacacattgtcttagtcagttttgtctgctccaacaataacataacctgggtggcttataaacaacagaaatttatttctcacagttttgaaggctgggaagtccaagatcaaggcagcaacggatttggtgtctgacgagagcccacatcctggttcagagatggctgtgtcctcacatggtagaatgtgaggtagaagggatcttatttatagagtctctttcataaggacattaatcccattcatgagagtcctgccctcatgacctatacacctcctgtaggccccacctttaaatatcattgcactggggataaggtttcaacatatgaattttggggagacataaacattcagtctatagcattctgtccatagcccctcgaaattcatgtctttcttacatgaaaaatacattcattccattccattagccacaaatatcttaattcatcctagcatcaactgtaaagtctaagtcccaagtctcttctaagtctcttctaaattaggtatgtgtgagactcgaggtatgagtcactgtgaggcaaaatcctctaaagctgtgaacctttgaaacaaaacatattatgtgcttccaaaatacaattgtgtgacaggcataggctagacattttcatttcaaaagggagaaataagaaagaagaaagggagtaacagaggccaagtaagttgaaactacaaggcaaacttcatgagatcttgagaagggaaggaattaagggtcaagaataatcctctggctccatgctgtgcctccaagcccactggagctaatatttcaccttctaggcccactagggaagaagtcctgaacttgaaactctactctgcagggttctcacccccagcgctttcctgggtactcatgacctcacagttctggggggccctgatctcacagctttgagaagaggctttctggcctgttgagagcaaagcaatgatcccctgttttgaacctgagaaagcagtcctgatggtctctgaatggccttccggggtcattgttcttgtattgaagaataatgtctgttctcagatatatacctctctggtcccatgctgcaaaaacaacaaagcctgatagctttccttcattactttttgtttcttttcttttcagttctaactggcagttttcctgcttgggtggtggattaagttcatagttcacacccatattaatcttcttttcaaataggcaattggccatgctttttcactttttgcaatagggataggctaagaatttttcaaatcttcaagttctccttcccttctgcttaataattccctctttaactcatttctctcattttcttttttaaactgaaaattggattttaattctgacaaatttggatatcaacaataattgtgttactctttagtgtattggtttgtatatagtttctatgattattcattaataccaagctcttggaataaaattaaaccaagacatttaataaatctgttgatagcaagattatttcttttatattttaaatagttaattggcaaataaaaatcatatatactcaatgtgtacaacgtgattatttgatatgtgtatactttgtgtaatgattataacaaattaattaataaatccattaccacccttgccatagacttgatccctggaatttgttcatcttaaaattgatattttgtacccttacatcaacatttcccactttcttgcatcccctagtccctggtaacttcctgtttctatgagtgtgattctacatataagtgaaattatacggtatttgcccttatgtgtctggcttacttcacttagcataatgtcctccaagttcatccatgtttttatatatggcaggatttcctttttaaagctgtataatgttccattgcttgtgtatgtacgtatgtatgtgtgtgtgtacattatgtataatacattatatatgtatgtgtgtgtatatataattttctttatccatttatccagcaatggacactttgattaattccatgtcttagctattgtgaataatgctgcaatgaatatggagattctggtatctcttgaagatgcttatttcatttcctttggagatagtcccagggcgagattgctggatcatataatgttgttctacttttaattttttaagagccttcctactgtcttacataatggctataccaatttacattccaatcaacagtggacaagcgtttcattttttcccaccttcaccaataattaccttttgtctttttgataatggccatcctactatgtatgaagtggtatctcattgtggtttcatttttcatttttctgattattagtgatgttgagcacctattcatatttttcaaagaaaacatacaaatagccatttatatgtttcctttgaataaaaatgtctacttaggccctttgtgcactttttaatcagggatttgtcttttttgctattgagttgtatgaatttcttaaacattttggatattaacccttcattataaagctagcttgcaaacattctctctcattccatggactgccttttcactaggtaggttattttctttgttgtgcagaagctttttggttttatgtactcccatttgtttgtgtttgcttttattgcctgttcttttgttgtcatatccaaaaaatcattgccaaagccaatgtcagggagcttttaaactatgttttcttctatgagttttacggtttcagatcttacattgaagtttttaatccattttgagttaatttttatatatggtttaagtaaaagaatttaatttttctgcgtatggatattgttttccaagcatcatttattgaagtgattttttcccctcaccgtatattcttggcactctcatcaaagattagttgacgacatatgtgtgtgcttatttctgagatctctattttgttccattggttagtatctctgtttttatgccaataccgtacagttttgatcacatgactttgtaatatactttaaaatcaggcagtgtgatgcctctagctttgttctttttcttcaaaattgctttggctatttcaggtcttttgtagttccatatgaactttaggattttttttttttctgttttcatgaaaaatgtcattggaatgttgacagagattgcactgactttgtagatcacttttggcaatatggacgtttaaacaatattaattcttccaatccataaacacgggatatgtttttattagtttatgtcttctttgatatccttcatcagtgttttatagtttttagtgtaggtatctttcacctgtttggccaaatttatcttaagtatcttatttttgatgctgttgtaaatgggatctcaatttctgtatctcaatttggatatagttgtttgttaggtgatagaaatgcaactgacatgtgtatgtcgatattatttcctgtaactttactgaatttatttattagttctgacaggtttttggtagaatgtttaagtttttctgtatataatattatgacacctgcaaacatacaatttaactttttcatttccaatttggatgcattttctttcttattatcacacaatgtttctggctaggacttccattactatgttgagtagaagtgatgagagtgtgtatgcttgtcttattcctgatcttgaggaaaagctttaaattttttcaccattgagtattatactacccataagcctgtcatgtatggcctttaacatgttgaagtaaattccttctacatctaatttgttgagagtttttatagtgattgttgaattttgtcagatgctttttctgcatatgttgagactatctatgatttttgtcctttgttcttttaaagtagtgcatcacatttattgatttgcatatgttgaatcattcttctgatttgacatggtgtatgatccttttaatgtgcttctgagtttgtttcactagtattttgttgaggatttttgcatctatctttgttcatcaaggtttctggactgtaatttattttctggtattatccttacctggctttagtttgaaggttatgctggcctcataaaattagtttggagatgtcctctcctctttaattttttgaaagactttgagaaggatgggcattaattatttaaacgtttggtataattgaccctggaatttttttgttgggaggtttttgattactgattcaatcttctcacttgttatttgtctattcaaattacctagttattcattattcatcttagtaggtggaatgtttctaggaatttatttatttcctctaagttatccaatttgttggtgaataactgtactcaagtagtctcttatgatcctttgtatttttgtattaccagttttgggtcgcttttataattttaattttatttatttgggctctctttattttctggttaacctagttaaagctttgtctatttatatcttttcaaaaaaaccaactcttagttttgttgatcttttctttttagtctctatttcatttacttcaggtctggtctttattatgtctttctttctgctgactttgggcctagtttattattttcctagttccttgaggtgtaacaataggttgtttcagttctttcttttcctttttttttttttttttttgagatggagtcttgccctgttacccaggctggagtgcagtggtgtgatctccgctcactgcaacctccgcctcccgggttcaagcgattctcctgcctcagcctcccaagtagctgggactacaggcacgcaccaccttgccgggctaatttttgtatttttagtagagacaggatttcaccatgttggccaggatgatggtcttgacctcttgacctcgtgatccatctgcctcagcctcccaaagtgctgggattacagatgcaaggcaccgcgcctggcctttttcttcattttgatgttggcatttatcactatatagttctctcagcactggttttgctgcatctcagaaattttggtatgttgtattttattttcatttgtctcaaatgcttttcatttctattttgatttttttctttgaaccattgattgttcaacagtatgttgtttaatttccacatattggtgagtttttcataattatttctcatatcgatttatagttttataccattgtggtcagaaaatatatgtgggttgatttcagtcttctcaaatttgttaagaattgttttgtggcccaaagtataatctatcatggagaaagttcatgtgcatttgagaagaacgtgtagttgttgctgttggatggaatgtttgctgtaagtctggtaagttcatttgttttatagtgttgttcaagcctactgcttctttattaattttctctctggatgatctatccattgttgaaaaatgggttattgaagtcccctattattatttgattgctgtctatttctcccttcatttctgaaatttttgccttatatgtttaggtgcgtcagtgttgagtgcatatatatttacaattgttatcatcatgtagctaccttttttgtctcttctaacagattttgactgaaaatctatgttgtctgatataagtatagccacccatgctctcttttggttgccatttttcatagaatacctttttctatttttttactttcagtctatgtttgtccttaaggcttaagtgagtctattttaggtagcatattgttgattttttttaacccattcagacactctgtatctttagagagttacattcatttacatttaaagttattgttgatagataaggatttactattgacatttttttaattgtctacaattttgtagttcctttgtttctttcttccactcttgctgttttcctttgtgatttgttgaatttttgtattggtatgctttgttttctttctttttatggtttgtgtatctactagagatttcttcctttctggttaccttaccatggaacatacgtaaaacatcctaaaattataatattttagtttagctgataacaaattaccttattttgcatacaagaactctatgtttgtactgccccatttcccatttttttataaaattgatagcacattttcatctttttatattgtgtgttcattaacaaattattatagctatagtttttttttatgctttttaacttttatactagggttaaaagtgatttgcaagccaccattataatattaggatattccgaatttgactacatacttaagcttaccagtgagctttatactttaatatgttttcatgttgttacatgaaacagaaataactcttttctttcaaattgaaagaatccctttagcattacagttgctgagtataatattgttagttggcagtttttcttttgacattttgaatatattaccttactccattttggcctgaaaggcttctgttgagatgtctgctgttaaccttatgcagattttcttatatgtgacaagtctcttttctcttgctgctttcaggattttctttgtctttgacttttaataattcatttataatgtgtcctggagtttcttctttaggttgatcttagttgggatcctttaaatttcatgaatctgaatactcatatttctccaaaggtctggatagttttcagcaagtgtttctttaaataattctctgtctcttactctctctcctttctccttccagaaatcacacagtttatatatttgtacaattgatttttgtcccataggtccctaatgctttcttcaacttttaaaaatctttttatctttttggtcctggacttggctaatttcaaatggcctgtctttgaattcactaattatttcttctgcatagtggagtctgctgttaaagttgtctgttgaattttttaatattgtcattttatccttcagctctaggatttctgtttgattctttattatggtttatatttctttattaaactttttattttgttcatgcattgttctgatttcatcaaattgtctatgttttcttacatttcattgagcttcttaagatgattattttttattcttttttaaggaaatttgtagatctccatttctttggagtcaattatagaatgttcatagtttcctttggtggtgtcatgtttgcctgatttgttgttatcgctgtagccttgcattgatggctatgcatttgcaggagcaaataccgcttctagtctttacagactagttttggcaggaaaagcctcctcatgttgagactctgagctgatgggattgcctataggattgcagtcttgtggcgattgagctggatcacatgagtccacgaggggacccacagttggcaggcctgttaccagtgtctctggtaggcatggcttttgtctgacctcttggtggacaagataccattagtaccttggccagtagggctggcactgggatgaagaaccacttgaaggtatgcagacagcaggcctgttaccagttgcacaactgggagtgacttcctccaggtccctgggagggctcctcctaggtcactgaatatgtacctgggcaggcagtcctgaccccagccatggcttaaagggactaaaaccaagtcacaatgatatagtttggatatttgtcaccactgaaatctcacgttgaattgtaatccccaatgcagtggtggtggtgggggtggggggagttggtgggaggttttggttatgagggtggatccctcatggcttgatgctatctttgtgataatgagtgagttctcatgagatctagtcatttaaaagtctgtagcccctcctccccaactctctagcttgctcttgtgtttgccatgtgacatgcctattccccctttgccttccaccatgattgaaagctccctgaggcttcaccggaagctgggcaaatgcctgcaccatactttctattaagcatgaagaactgtgagccaattaaaccttttttatttataaattaccttgtcttaggtatttctttatagcaatataagaatggcctaatatagaaaatcggtactaatgagttgggtattgctataaagatacctgaaaatctagaagcaactttgaaactgggtaactagcagaggttgaaaaaatctggagggcttagaataaaaaagaaagatgagggacagtttggaacttcctacagactatttaaatggttgtgaccaaaatgctgttagtgatatggacagtgaagttcaggctgccgaggtttcagatggaaattaggagcttttgggaactgaagcaaagaaactgaacccttgttataccttgctgaagaagttggctgtattgtgatctatgtcctaaagatctgtggaagtttggaattgagggtgatgacctagggtatctggcagaagaaatttctaagcagcaaagtattcaagatatgtcctggctgcttctaatagcctacctatcagatgcaggagcaaagaaatgacttaaagttggatgttatatttaagcaggaaacagaatgtaaaagtttagaaaatctgcagcctagccacgtgacacagaaaggataagctttctcaggagaggaattcaagcaggctacgtagcaaccgcttgctagagaaatttgcataactaaaagggagccaagtgttaatatcccagagaatggggaaaaggtatttcagagaggtttgtggcagcccttctcatcataggcccagaggtctaagtggaaagaatggtttcaggggcagggcccagggcctcactgtactccacaccattgggatgctgctccccacatcccagcccctctggctccatccttggctcagagggccccagatatagctcaggctactgcttcaaagggtgcaagtcatacgccttggtggcttccatgtagtgttaagcctgcagattcacagagtgtatgagtaaaggaggcttggcctccgtctagattttggaggatgtgtgagaaagcctaggtgcccaggtagaagcctgctgcaggggtgtaaccctcacagagaacctctactagggcagcacagaggggaaatctgtggttagaggccccccacggagtcctcactgtggcactgcctagtggatctgtgagaagggggctaccacccatcagaccccagaatggttgatccactggcagcttgcaccatgcccctggaaaagtctcaggcactcaacacactgtgagagcagcctcaggctgaaccctgcaaagccacaagggtagagctgcccagggttttggaagctcacctgttgcaccatcacccccatggatgtgggacaaggagtgaaagaagattattttggagctttaagatttaatgactgccttgctggtttcaaacttgcataaagcctgtagcccctttcttttggctgacttctcccttttggaatgagaatgtttatccaatgcctatacactcattgaatcttggaagtaacaaatttgttttttttatgttacaggctcataagtagaagggatttcctttgtctcagataagactttgggttttggacttttgagttgatgctagaatgagttaagacggggggactgttgtgaaggcatgatcatattttgcaatatgagaaggacatgagatttgagagggactggggtggaatgatatagtgtggatttttcttcctgcctgaatctcatgttgaattgtaatccccaatgtttgaggtggggcctggtgggaggtatttgagtcataagggtagattcctgatggcttggtgctgtcttcatggtagtgggtgagttcttttgagatctggtcatttaaaagtgtgtggcacctcaccactactctcttgtttgcttctgcttttgccatgtgatatgcctgttcctcctttgccttctaccatgattgaaagctccttgaggcttcaccagaagccaagcagatgccagcaccatgctttctgtaaagcctgcagcacagtgagccaattaaacatcttttctttataaattatccagtctcaggtacttctttataggaatgcaaggacagcccagtacatgcaaggatgcttcaggatatacagctgagactaaggtctgcagtcctgtctctaggatcatagataagtgtgtttccctccagatgcctgggcatgtaggattgctcacaaccaacagctcagaggggttgtagctgagttttagtgccatttcaagatctgctgtagggctgagtttggcaagcctaccctggggactcaggcaggcatttctccctctgcgttcgtggatgagaaggcctcctctctgtccacagctaagagtgtctaaaactgggtttcagagctgtttcagggtctacatccagactcaactttggctggcctgtctgccaatgtactagtgtgcatgaatttttctgggcctctttgctgatgatttttataataagaccaagagaaaatggggccatagctgagtccacaagaggataaagccatttccaggtctgcagtcagaaccatgatcaccaagtctgccatctgggcatgagttggccctctcaaaatggccctactgaatatcgggctcccctggaatttcacaacctcctaaattaatccaaggttcccacaaaggctattttgtctgtgggtggctgaaaaattattgttgctgtgggagatacaattaggtgagctcttattccactattttgctgatgttacctcatttctttcacacttaactataagcagtcaggaggagccaagccactccttcagtgctttgtttaaagatttcctcagcctagtatccgattgccttgctcacaaattctaccttccacaaagcactgaaacacaaaatccattcatccaagttatctgccactttataacaaagattaccttcctccactgtctagtaatatgttccttatttctgtctgagacctcatcagaatgacctttgccattcatattcctaatttcaggattacataggtattttctaagattgaggctttctctgcatctcttctttttttctgagatttctacccagaatcacttttaaaggttctttacagcaatgtaggctttttctagcaggcacttccaaacacttctagcctctacccattgcccagtttcaaagtcacctggacattgttaggtgtttgggatagcagcactcctagttctgggtaacagtttcctgtcttagtctgtttgggctactataacagaatgccataactgggtggcttttaaacaacaaaaaattatttctcgaagtcctggaggctgggaccttgagccccaaatcacttcactagtagattaggtatctggtgagggcctgcttccttgtacgtaaatggccattttctctttgtatcctcacatggcagaagggatgagagagatctctggggcttcttttgtcagggtattaatcccatttacgaaggttctgcccccaagacctgatgagctcctcaaggccctgctctaaacaccatcatgccaggtataaggtttaaacatatgaatttgggaggggagggcataaacattcagtctatatagtacacatatatttctaggattgataattttaatttgattgaaaatatggttaaaaaggagaatctttattcctgatactgagagctgagtgtgatttttccttggtgattctacaaaagccatccccaaagatatttaatagatataatagttttttgttataatgccattcaatatttagatatatagtttgtaaaagaaaagcacttcttcaggagataaataaatgcagaataaataggtagttgtcaggtctggtttgacccaaaataaaaggcatttaatactcatctgttcataacatctatttaacaaacatttactgagcttgtgatatgctagcactgttctacatttgggaaataccagaatgagatactcaacctgtagataaattgattaacttatcgcatgattactattggggaaaagcatcttgcttttgccaaatttggaatgatggtcaagtctgttcaatataatacactcttaagagtgagtctcatttgtatcatctgaatgtacctagtattcagaattttgagaatatttgacaaggagatcctcatccaaacttctcattttcttcacccaccagcagagacataaccatctcttcctttgatcagctctgggaggtccacggaagtccaaatccagtctagcttatgaatgtgttttctgccttcctaacttcctggactattttttatgcttctctcccttctttgcacccttctcatgtggtgcttcagccatcaagaattaccctttccttcctgatcactacattctcagacctaccacaagaactttttatatgtgctgtgtgatggttaatattgagtgtcaacttgatgggaatgaaagatgaaaagtattgttcctgggtgtgtctgggagggtgttgccaaaggagattaacatttgagtcagtgtactgggagaggcagacccaccctcaatctgggtgggcatcatctaatcagctgccagcatggctaggataaaagcaggcagaggaatatggaaggagtagactggctgagtcttccggcctccatctttctcccatgctgggtgcatcctgccctcgaacatcagactcaaagttcttcagcttttggactgttggactcataccagtgatttgccaggggcactcgggccttcagccacagactgaaggctgcactgtcggcttctcgacttctgacgttttgggactgggactagcttccttgctcctcaccttgcagatggcctgttgtgggacttcaccttatgatcgtgtgagtcaatactccttaataaacttccttcatatatacatctatcctattagttctgtccctgtagagaaccctaatacactctgtttgcctttagatcagccttcctttcactctgacttctacttgcctttcatatcttaactgagacaccatgttctgtcctgaggctctcctgaccctccagacagttcattggagccacatctgtgttcgcccccagaactcatttcttcatttaggctagatatgttaagtgctaaacacagttattaactcactacttgctgaatacatgttaactgtttgagtattatgatcggtatcagtattatcagtattacaattttcgtgcacttttcaaatatatgttgattattgagaaataaaattagactttctggccagtgtttctttctcctgttgattcttctgaatataccacaggcattcaggtcattcttggctcctctagttcagttcttccagatcctatttcccacacaactaaggttgtttcacacttgccagctctttgtttcttacctctggcaacaaactgctgacctgttctttcctataacttagaacctcacgtgtctctgaaaaagataagcagtacgtgtggatctagacataactttcctgcactccttagggaatttggtaaaggatggcagagcaaaaaagggagctctttcataccaggatcatgtgaggctaagtacttttccaaattgccaaatcctggaaggtctttcagccatccctccctggaatggacatctctggctctggcctgttaaacatgctttttttttcttttctgggaacatcacacttatgttcctttactgttctccagtctcagtccacgtgtgtacagtagagcagttcccacactccagatcctgaggtgagaggtgactggtctgccatgaggctgaagtatttcccttggctagaaacactgtttcaggagaaggaaggtgacgaaagccagacctttcaagccaaacatattcaatttccagacttcttttggaactagtggataataggaacttctttcaaactagggctgcaaagcagaggaggtaaaattcagcggaagaggattaaacttggtgagaatttgcttgaatataacccaaagcaaggaatgctgagctgagaggtagggagagactaattcctaacagtatcacttagcaccttgaggcagtcagacctggggattcattccttgaatttctcagttgcactggcagtacatttccttgaatatccagtacaattccttgaatttgtcagttgcaccggcagtacattctctttgttgttgaagcttaatacagttgggtttctatcatttgtgtccaaaaaggttctgacgaatctgccatccattaaggcagaagaaaaaccatgagtgcaatcttttgtccaaatagaagagtggcctttgaggcaactcacagtgaaatgatggtctgttataatttgacatttcctggctctaaaatgaagcccacggcagtggccacgggtgcttaggaggatttggtctttgagttttacatgaaggagaacaaaggggttttataatggctactggattcctcattgggattcccttctctgcttcctactgaaatgtaaatgcctgcacaatgcagatggcatatttcattaatacaaacaaaagtccaggcaacagatgctttggggactgaggggaaaggagatctctgtatttctccaacagcaacaactccgatgataaatttctcccactgagcatattgaaccaagagcacagaaatgtgtagttttcaagccttaggcactctacagtatttaaaagtaggaagatcaaaatcagtatttttggacaaagagaccttatgctgaggaagctgcattgaaaagcaatgagcaagaaaagctgaggcatgctttgtgaatttcacagggcttggggatgggcaggacttccagtgttctgtttgtctagagagcatatattaataaaccttagtcgggactactgccatccacaatgacaaaagccaggccaggccaattatttgcacatcaagggctgggttagcgtggcttctgttcctttgtttcttaacgttgttttgtgggaaatgtaacgcagagatgattaattgcagagcagatccaactctctctctgcttgtgataagtttaaataaaaatgccaaagtccaaattctgaaactatgtcaaagagtaataattcaaaaatttataaaaattacaccatgctttgtggtcatattctcctgagtttattgtgactatgggcaactgcccgggcaggagtgttggaaggagaaaggtatgggggtagaacgaattagataggcaaaaaatgttatctgcattattttggtgctatttcactgaagacggaagattgatagcaagcatttggaggcaatattacagcaatttttgtgactcctcagtagggtaagcataatgctaataaaatattgtggacagggattgtaggacatttttctgttcacaaaatgtaaagatttttacattatattttataatatgttatactatatactctttaaaatacttgcccctctaattgtgtgtgcatttttagcctatttagttagcagaatagaaaaggctgagttaagccgaagaaccacagtttatcgctttgcatgtaagatgtagatgctcagagtcttctggttttgtaaggctttttcctcctttcttctttatagtgcttaggtagaacgctaactaaatgcccactgagcataggaagcaaaataaagcacctttaacaaatcatagttagattccctttttatatgtaactccaaaaattgataccattaaaaatgccagccactgacaatccaatatcttgccactgctggaaaccagtcttcacttgggaacacttgtttgttctttatatcctgatccggatcccaacaccttgacattttgcatgacttccctatatccagaggtcgtctcaaatccagcttcaggacagtgagccatgcagcttggcttgcatgagaagggccatacgttttccttcccatacattaaatcctctcatatcagaaccagctccacagtgtctaaatcaataataagattaaataatgaaggctcgataatgacaagtccttaaaatgcaatgactattattaaacatgcatttgttcattcttcacttattgatgtaacaaatacatatcatgtgttgcattatgctagtcattaggggaaaatgatgaccaagatagaaatcgtttcataaggtccagaaagctcccttatgtttgatccaggccatactgaaaacacacactaaatgttctatagaaataaacaaaggtaataggcaaagtcattatagatcagagattgcaaactgaaagactaaatgggccatgtaggttacatgtatatacaaactgggccaactgagagttgataaagcatgatagaacttatagctgactggaaaatgtcatacttaaagacatttcagttatttttattataaagactattgagtcaactctccccaaacagaaacacacacacacacacacacacacacacacataattagcccatggaagatttgtttctggaaatgttatgcttgacatacttaaatttcaggttactattttttattcaagcatattcaaccccggtgcattggttcagtcctataatcccagcagtttgagtgaccgagatggcaggatcacttgaggacaggagtttgagaccaggagggagggctgtctaggtgaagcacaggggaattttactttagggaaaatattctgtatgagcctataatggtagttacatgacatcatacatttgtcaaaacccatagagtttaaacacagtgaaccttaatgtaaactgtgaactttggttgatacagacatgtcagtgttggttcattgattgtcacatagtgagaccatgtttctacaaaacatgaaaaaatagaccgggcacggtggctcacgcctgtaatcccaccactttgggaggccaaggcgggtggatcacctgaaggtcaggagttcaagagcagcctggtcaacatggtgaaaccccgtctctaataaaaatataaactattagccaggtgtggtggcaggctacttgggaggctgaggcagagaattgcttgagcccgagagatggaggttgcagtgagccgagatcgcgccattgcactccagcctgggcaatgagagtgaaacttggtctccaaaaaagaaaaaaaatagctaagtgtggtggtgcatgcctatactcctagctactcaggaggctgaggagggaggatctcttgagtccaggagttccaagttatagtgagctataagattgcatcactgctctgcagcctgcattgcagagcaagaccctgtctctagaaaaatatttttaaaaatacatttccattatttctcatcagaaagaattattattttctcaaagagggagaagtgtaaagtaacattaagaatcttgacagataaacttttgcttttatgtgggtattcccttgttctttctcctgaactgtctgtaggagttagatcttaaaataatgtcaggagagagtaatcaagatccagcccactaaccaccaaagtccttgcttagaactggtgctgcctcatctgagaattgttcagctcaattttcaagctctttctttgagattttcaatacctgctcttttctctgatgtccctagatacaagatagctttgactgtatcataaagtctgcctaagagactatttacttactttttttttttttgaggcggagtcttgctctgttgcccaggctggagtgcagtggtgagatcttggctcactgcaagctctgcctcccgggttcacaccattctcctgcctcagccttccaagtagctgggactacaggcgcccgccaccacgcccagctaagttttttgtatttttagtagagacggggtttcactgtgttagccaggatggtctggatctcctgacctcgtgatccacccacctcgacctcccaaagtgctgggattacaggcgtgagccaccgcacccggcctatttacttatttcttattacgatttacaaaatgtgctctcatgtttgaaaaactcatatttgaatatatgtgaggtaaaaacatttaaatgctggctgctaaattcacatcttaaaaacctatggaaatttctggaaggaaactttcctgtagttagcatgatggtttatgtgacccagaaagattgcagcttctcaggaacagacatgtctgcccctttctgcatgtgcaaatgcaagagagtttccatttactgtgattccgacaaaattagaggtaatagcaaataatcacattctgttgaaactgcatgttatattatctgtattccctccaggttttaagatcagtgaggtcagaaatcatgtatattttgctaattaatctcttacttcaagtacaatgcctggcacatagtaggcacttaatacgtatgcactaaaccatacaaaacaaatgaaagaatgaatctagatcacttttagttataatattttattgtattctttatggttgtattagtttaacctatggttccttggttcagtagttttaaggaaacaaatttcaaatgcataccagcattgtttaatatacatttcttcagtgatggaatacctgctttgttcaatattgtagccactagccacatgagactattaatagactattaagtgtgattagtgtgactgagaatctgaattttaaatttaatttaattttaatttgacttaatttaaatttacatagttacatgtggctaaaggctaaaggtctatgcatagcacatagaccactcctttagggaatcttgtttaactgttgattaggtcagtatttggaaatgctcatggaaagggtcacatattaagagatggacatgtggacttcttgtattttctagtggtctcacactcaaaaatcttctcaatcaagagtccctgagaattaaatttgagttaacataaagagagatatatcatatactatgtagttaatagagaaagaaaatatcctgtatcaagctgccctgaaaaacttttatctgccaatcaagactgaacccaactttactactctcagaatttttccttctttacatcctctggagcgctgtagaattttgtcaatacctttaacactatatatgtcttcactatagattgtttacagagcaactgaaacttccttaattaatggacaccataatagtgcagaagcttgtgctgggactaattcagtactgtacgcattgttggttgttcatgaagagttattgagtgaaaaatgaaatttggggtccaaagatctgagttctggtcctatgtctgccatttacttagtgaccttgtgcctggaatttaacacctctaagttatggttttcttattcttaaaatgggaatattaatatgtgttttcccagagtaatacatgagagccacatgggagaagtcatgcatgtgtaaagattaccaaaaataaatctaattattgtcaatatggagctttagagcaatatcttcaaggaactaatttcaattccagaaagaagtcattccaaaattgttagaagttatgccacaaaggcattaattaaatttcctcttcccttataaaatagtgtcatctttaacaacgaggtgttggctgagcccagacagaaaacagtaaattctcaatttgatatgcattcctgacacgtgatacatatgcactcaccagatcttttatggagatagcctaaatgctgaatggtggaaaaaaccaaaacaaaacaaaacatacaattattgatttaggcaatagagacagctcaccagtctgcatcaggacaactgactacttcttcagtatggcaagcagctcccagaaacaatagttgtttctggacctcttattgtctactaagtgatgtgctagatgtttgggaaacaggtgtgagactcaggagctaagttggattcacttgggaggaaagataaaagagttcaatatcgataagttggtaaagaaagacatactgagaaacatcataataacctactaatatttggcaacctggatattatgcctgacatagacaacaacaacaaaaactagatattacaaaaattggccactttgcagcttacctaatgattgtctacatgtgactaagacatgacctgcacaaggagaatgcttatcacaatagtgctttgcaaaaaataactgttttataagtaagatttaccagatattcatcgatcaccctactgtgtaacagacataaaatgggcatttttttcctgtattacattgtctcatgtttttataatagctcaaggatgtagatttttgagtgagtcaggattctggcagaaaagagatggcacactcaaatggaaattagaaattaaagataacttaatgaagggactatttaaaagtcagaactaaaggaaacctataagcaataagaaagcacccaggcactagctgatgtgcagctatcacctctggtcctaaagaggctgagagtttggtgaccagaatcgagagggagccataatagcagggagggcacagatgaggagagctgcaggcacaggtaagaagaatatggcctctgctaatgtgtggcctggcagagaggctggggctaggggtggagtgggatggtgggatagagtataaagactttggtctttctctcattccagctttggaaccctagccagttgctcctatgaactcaaacaggcaccttgcaggcccagttgttatagcaccaaaactgccatcctatgacacacagtgtggacatggaaagtaggaaagaacctggaaagaaatggaaatgatccagccagttttgttgcctttattttacaagtagggaaattgagtcccagaataaataaataatttgcttaaaagcatgcaacaaagaaatcagatgaaagatttctgattccaaaaatgtgttttttaatttctccatttctcattcacttgttaaaaataaatcacaaattgggctgtgctcctggatttcattccctgagcacagaggtttttattcagttcctttattgaaaactatgtcctaacactggccagtcatttcccagaaccttgcattcatcacaattggacatggtaaaagtgaatgcgtgtgtttctgtgactttgcgaaaagatctcaatattgagagaggttattctccttaaagcacattaattgttgttcaaaacaattgaagattgaagattggagaaaactagtgttgggatagcatggagaagtgaatgggggaaatgagatgggcaatctacatgaaaactagaaaaaaggagcttatggagagaatcttgggttaagagtgagttgatgatccgttttgttaggaatttggcctttaagaatattgatagggccgggtgcggtggctcacacctgtaatcccagcattttgggaggccgaggtgggccgatcacctgaggtcaggagttcgagaccagcctggccaaaatggtgaaaccctgtctctactaaaactacaaaaattagccaggcatggtggcgggtgtctatggtcccagctactcaggaggctgaggcaggagaatcgcttgaacccaggaggtggagcttgcagtgagccaagattgcatcactgcactccagcctggcgacagaaggagactccgtctcaaaataaataaataaataataaaaatattgataggtgtagcaaagctttactaagggcatatgatatagtaagttgttttgctaaagctaagtcttcatgtacatgatctctgtgttccctataggtaactacttaaccttttcaaggtgaaagaagttgaaagtcatatcaatagtatgtggtaaaacatgatttcaaacctagtgatctgtctacctcatagccagtcccttttaccttttaaaacttgttaaagcaaagcacaaaggcttcaacgtcttattcctcatttgttaaatgccagtgaaacataactgtgactgtttcttgcctcttgcaacaataacttgccatatattatctgcatttaaggtgactgcaaacactggataaaatgcaattcatccattagcaaatcatgagtaaccgtgcccacttagtgctgtgtaatcttataatggatatggttgtttccagctggatggaaatggggaataaacagtgagggtttcatatatacaagaggaaaaatcctggataagttgtaaagtgtatctttattcttgtttttttttaatgcaaattgaattccacttaccaattggaaataactatgttggggctatattataggtttattgtaagcagggcatatatttttcatatttggctttataatattttagctgaatcaccttttaccgtgtttctccttggatgggaggtaaccttttttttaatattcctcatgatttctgccctatacttagccattggtaactttttaaatttttattttactgtaaaattcagcactgataaatcactggcccttacatatagagtggatttaaaatttgtacactgtgactgaggtgggtagaaatataactttatttctgcataactgaatactgcttgctcgccagcacccatttctgcttaaggaaggaatacttatatgccacttgaatgtatcttactgacttccagttaaaattcattgctttctggataaatccaactctttagaacagacacttaaactttcagtggcttttttcctctgctctttcttctttgcttgggttcagggagactatgagtttcatggctacatgcagcatgatgaggtggggaagtggcgtcaggtcaatgtgtacccttcggttgtttgcaggctcccactaaagaatgttgtcccttggcctttcatattgactctgtgtctgatgcaactgtagatgagacagattgccttctgtttccttgtctgtgttatgcattggcatcagccctctgatagactaagtccccatcctaatgcttgtgggtgctatattttttcccaagactggctgtgactgccacttaattcctagcttgggccatttactctaactctttctcctccacagtcacttcacctcttgacttaatgaccagccagtgctcttaggtaacatctgtgtcctacactaggccaggggggatttttacatcttgttagcagcatagagctgtcccgcgttggtgagagacactctgaaagactgccttctcccatgttccagaagatcaggcaatgagtttctcttgccgacagatcatcaaacctgtctatgacgcttctattactttcccaaatgaaggttttcactgcaaagagtgaaggggctggctgtgtcagggaccatacttaacatctaaccatgttgcttctcccgttcttaggggtcctcccaccaagtcaaatgctacttttgcttttggtctggcaaactatatctttatcattccctactcaatgcatagtgtcctctctgatattaccaactactgatatatggagccttttttaaaaaaattctaaacaaaagccacttctatttcttgtacctaattattgccaatcaaaatgtcttgggctctaaatctgttgtatgatctgtagccttgattaaaaaccattttttgaaagtcataggtgaataatttttattctatagtttatatctgtcattcccccttttttgcaattatatacctcaccttcatagcctatttgtagtgagaacaaagtgcttaaggaaaaatattgtgaaacagaaatatgatttcagtaatatttagaaatgttttccaactgcaataataaattggagtttcttaatgtcagtttggaagaatacttaacagaaaggatttcccagtgatttaagattctctatttgattgaaggatgtttcttagaatattaaagatgatatattatacattcatataataaacaattaccatatgacactgtttgagtgctgggggtgtaggagggaattaaaaaaaaatgtttgccttcatagatcttatattcttgattaaaaaagagaaaatatatacattagtgaaatatataaagggcattatatgatcatcactgttatggagaaaataaagtaagggagaatgttagaaagtctgggagaagtggggttttcgaagttttaaatagagtgataagaattcgaaaatctcgaggtggcatgggagtgagctatgtgtgcttctgggggatagcggtccaggcataggaatggtgagtaaaaagttcctgaggctggaatgaccccactgtgttcaagaaagagcaagaagataaagttacaagagctggagcagagtgaaggaggtagagaacagaaagggatgaggccagagagatcatggtggaagaggtagtgataggcagattgtgtaaggcttctccatccaccatagggaatgtggcttttattctgagggagatttcaaacagggagtgacatgaaagactcagtttttttttttttttgagactgagtctcactctgtcgccaggctggatgccaggctgcagtgatgtgatctcagccccctgcaacctccttgtcccgggttcaagcgattctcctgtctcagcctcccaagtagctgggactacgggcacacaccaccatacccaactaatttttgtatttttagtagagacagggtttcactgtgttggccaggatggtttctatctcttgaccttgtgatctgccctcctcggcctcccaaagtgttgggattacaggcgtgagccaccacgcctggccgaaagactcgctttgtaagtgaattgctctagttgagaatagagtgaaggggagagggtataatgaagagatgtcattcaggatgctatttcagacattgaagcatgtttcagaccggagatgtttcagaccagggatgcagcactgtcggtcaatcgaagtgtgtatgtgctgggcatatatgtggaaatcagtcatacattttgggaaccagtactgcatcttggttaaaaaaaatcatggctctgcagtcaggcggcttgagttcaaattgtagtttgagtgcttactagcaatggaatcttgaagaattccactaaagcataagctgcatgaggcttttgtaaggattaaatgagaaatgactgaaaagtaccaaagaaagctccctagctcataaaacttaaatcattacctggcattattattgctatggtttctttccttattgaacttgagaaaagttggaatcatgaagcagtaaggtttttttttttttttttttttttcatggtcttcttttagcccgtgaacctgggaatattttccaaaaagctgaaagtgcttttcaggatttgtctggcataggtacttagaagtaaaatataaagccttctgtttctcaagtcctgcacttggttttccagtgaaaagccacaaaaagatatacttggcatcttatggttattgagaaaagggtgtaaaaataaagttgtgatagctctctcacagcaggttgcttagttcttaagcctgttctttgctaatctgtagtatgtgtttgattcctgaatgggagctcagtaagaagaatgaaggagcccagcatctgactggcaggcatattggactgcagccttgtcatgtgcaaggcagggagaacgataccattgagagtagagcagcactagctgtcatgcattcagcacttaagtgtgtgccaagccctatgcttgcattgcctctcaccatgcaatatggatgatattatccctcaatactactcagcttccacaaccataaacaatgatctcctgaagaattcttgtctctcatcctggttttcactgcagaaagagctcgtgtcagtcttgggcaacatcagctcctgaagcgttcttggcatcttagaatcacacagaggatgtatcatgcagtttgagagtctctctctttcctaagctccaattttgcagttgcctttagtatggcttccaatccttctgcttagaagcatttctgaacttcagatgtatggatgtacctgctttaccacattttcatagttggcttaagcaagagatctttttatcttccttcctaaatcaactttcaatattcttaaatcacctttgcagctcttctcggaaatctcttagatttactggcctgttttggtcctgtaggtactctgctagatactgatgtgcagtgtcgtgtactctgatggcattatgtaggagctcattcatacataaagacaggataatcagagagtgagtgatgggtcatgaaactgtgtggcagctacttggccattgcagaatattaagatttttgcattttaccatctggaagagtgaaaagagttgaagaaaataaaatgtagccaaatggatcatttaggctttgaaggaccaaagtccagctgttagaggcacatgggggtctccagcagttactctatcttgaagggactctcaggtaagcaatatttcagaagatgattgaatctcggtgacttattctcctccacctggatccttaatgtagcagcaaatgaactcggtctctggaatttgaagttcatgcccatgcataaaatgttaaagatgactttaaaacagacactccattcatcttcccaagtttatgggactgtcaggaggccagaggcacaagtttggaaacatcagaagatttatcctccaggaaatggaaattaatgtcccatcttaatctcagccatcctcctcctgtttatatgaccacattaaatgatgaaacaatggattgttatcatcagaaggctgactcatagaaaagggagagaggacagcagcatttgctttgaatcctaaggagtcagtcatcaccgatgctggggaacccataagcaggtggtgaggattatgggatttatcagggaaggctcaaatggggctactcaccagctctgttgcataggcaggaagggattagtagaagagtcatgtcagcagcagctgcgtgatgagatttgtgacaaaatgtggtaaaggatgctgcatgaactacttttgttggtattttcccatgatgaaccataacagagggcttgggtctccctcgcttttactttttcctctagacacctcatggagatagagcttttctttcccatgtgtttactctcttctaggtcactggctatcttttctttcatttcactcaccaattgtgtgtgtacgtgtgtgtgtgtgtgtgtgtgtgtactttagaatagatacctggctgtattggacaatcaattctagatccagtgttgcttctgacagcgtctctttctatatcacttccactgggaataacttgggttctacatcccagctcagaatcttactggctaaccctttcagaaatctgcttatcaaaataagggctttggttcaaattatgcgtatagtcaatgaggctgttgtttctaattttaccatctctatcatgcccagaatctcccaaccccagctaagcatctaggcttagtgttggaaggttctgcacagttgaaaaataataggggacatctatctgtagctttaaattttacatagtaattaccttctgtcatttaatatctccaaaaatattggaagatagaaatggtttttattgttatcagtcataattgtcatcattagtactatcattattttactcatgaggaaggtaatgttcgtgaagccgtgacccaacctgaattacaagtccaaactcctctgtgctctctttctacagggacaatgctcaaaatgattagtcacataagggaaacatttgatttctccacaacttacatggtaactggaggctgccatgtcccattccattttcctttctcctttacttcctctcttgtggtgtccaatgagtcctatgcttctccagggttctctttagggatgcataaactaggacaggccactgctggggaaagtgctcgcagtgttcctgccccctgtacaaggaatcgtgaatgagtgggaagagattaagaaggctggttcatcccagagagagacctgaacccctctgcgtggaagccatcaggctctccaccttctttcattctataatgcctctatgtcattgttgggtgagttgcaaagtgaaataaacacaggcttaagggatttggtgggtcgatggatcattcttcctagtgccctcttcacaattaagtctgaaaagagccgcagccatctgagagcccttttaaaaattgtaatgctggatggaataagtattgttagacatgggtgggttcattttgagactgtaagaacttacagtaacttgaatctagttttgtgccatttttcttgtgttcagtgctttatgtggttaaagatggggtttgggaaaatatagatgtgacaaatatcattgtattcattttacacctggaataacctgtttgcctttgcctgacagcatcagacttaaatccttttgtctttttgttaggttattttacctttttttcatttgtttattccttccttaatttatttatataagaactagtttgagtcccctgttcaaggtttggctctgtgctaagtgatgaggatacagcagtgagaaggaaagatattttctgactcgccagaaatagtatctattagatgatattaaagcacatggaaaatatgttttaatttctgcagatttttaaagacaagatagattttcatgtgtctaggataacttaaactagtcttttctgaaggtcagaaagataggctatgtacactactcatatgtgttggatgggaatcacataataactagaatatctatgccactttttgtttaccccataaacagtttttagttcatgtcaagtaatatgagctttactattaatatttgttaattttatgaaaacattggatttaacttttagtttgccttaacaaagacgccagcaaaacaaaattaaaaagtaaaattctaaaaaaaataaaaggtttgtcatatacttaaatgaaaaataaaggaatttggctttgggtgattatgactattgatgttttagaggttagcagttgatcgatccagcctattttccatgaatgtcttttgtatatcacaagattctaagtcagatggtaatggtaatttgaattagattaatgtatctattaatattagtaatagaattaataatagaaacaaataatcttaataacaaataataacttgctcatattagcttaagtagaggaggcactgattggaaattacacagatccttaaaattctaggaaaagctgaacaggaagtttctgggaaatggaggaaccatgacaaattcaggggctacaatagaagttgttcatgaaattttattctaaggccctaccatttatgtaactcaaactctgcatctaaattacagatgagtaggagacacatgctaactgtcccactttggttcaattgtccatatctcttccagtgatctgtgcccagagattaaagacaaaaagccactgatcatccagcagtagcgatcagagctggctctgagaaaaggtgggtgaaacaactgaacaatatgcctactttgttacatcgttggcctgccgtatccatttgcgttatttcccctgtgaactggaaatactctagaataggaaaaccagtcacagacatcagacagagagtgcctgccatgccccacccaatcagggaaatcccaccgtcccccccagggcctgccttcagatgcagtgcattgagtaaaagctgcctgtggtcattgcgtttcctaggggaggtgcttgcctccctaatgtttatcttaattttgtctcacaattctgagatctatggataaaatggtgaatttaactacttccagtgtaactgtgcagagtattcaggggaaagggtgggaacaacaacaacaaaatcaagcctttaaaaaaaataaattcaggccgggcacggtggctcacccctgtaatcccagcactttgggaggccgagaccatcctggctaacacggtgaaaccccgtctctagtaaaaatacaaaaaactagccaggcgtggtggtgggtgcctgtagtcccagctactcgggaggctgaggcaggagaatggcgtgaacccgggaggcggagcttgccgtgagccgagatcacgccactgtgctgcagcctgggtgacagagcgagactccgtctcaaaataaataaataaataaataaaataaattcagctggttaggcaaattacccaacccacagcaattgggaaactctagcaaccaaaagggaaacaggcaggagctatgggaagatttctgcagacagttaggaggcctaagccgatatttattttccctcctcggctattaattccatctttgccacatcttcatggtaaatgttacctttgttcttcaaacgcttgacttctcatgaccttccctatataaggttctagaaactttccagttaatcttgtgctacttgtcaccttctttatcttcactattgctgtatattgagcattgaccaggtggtaggaaattgacttggtatattacatacattcttattcagtctttacaatgactcaagatatggtattatttagagagaagttagtgactattccgttaggttaaaactgtctaatattactgctgggaagtaatagaaccaatcaacgtagatgtatcaggaactttccattatattacattgtcttttatttattaaatgaaaacatgtttctccaggaacactagacatatggatcaaggataaagctacttaataagactggactggccagagccactgtgcaataccatgttttccaggaaaaaaaaaagaaggattgtttgacccctctgataaggctccatgtttgaggggacaagccaaatggtggcaggtgaaatgtagtgagttccttctgttttataggggacaattattttgtctcaccaaagacaaccccaagacggacttaaagtaaaagagatgaagccacaaaagaataaaaataaaatctaaaattgaaaccctcagtctagtgttctttccatgtctggtagtattttgtttttgtttgtttgtttgttttgagacgaagtcacgctctgttgcccaggctgagtgcagtgccgtgatctcagctcactgcaagctccgcctcccaggttcacaccattctcctgcctcagcctcccgagtagctgggactacaggtgcccaccaccattcccggctaattgtttgtatttttactagagacgaggtttcaccgtgttagccaggatggtctcgatctcctgacctggtgatccacctgccttggcctcccaaagtgctgggattacaggcgtgagccactgaacccatgtgtctggtaatattttctaggtggagttaaataatgtgactaacagagtgctgtattcccaaaccatgctggtaggtcacttaatacaactaatggctatatgatgtatgtgttcttccaattgctttaaaaaaagagaaccatataacccaagagataattcagatgtgcctaaagtccacagctataaatggcgaagtcaaaatattgaaaatgttgaatctagacctacttgattcctaattaatggtctttccaacatgccatattatttatagtttgataaatttattatttgaaatataagcaatataggataattttaggatatctcaatattttaagctgttatgtagtaacttctcttagttattaaaaacttgtctttaaatgaggttaggtatccgcccccaacctcccaaaataatccacctgtgtcataaaatgcatcatctgctcacttccaagctttgagaagtggattaattttgcatctgtatattcacattttttgtagtcttggctgggttttactataatatacaatggattaggacttctgtttgaattgtgaaactattaaatgattccatgtctctggaaagcaatgagccctgtaggtattgtgcttagacgagattacacagatgcttctccagtgcccgaattctctccactgtgaaaacaagctttgaaaatccttattttgacagcatctgtgaagtgctttaaacctcaagtcacttctaggctttggacttctttatccaactgcattcttttcaacaatacggcttggaaatttgtttggtagtggggaaaaggccttggtttgttttattgtcaaattccaattgctttgtgagtgattgtacaatgtagagctagtgtcttcaatgcagttgcctcggcgtaatacaaaatgctcattgtctactcttcttgagaaaatcattgtatggttgttgaaaaggattcttcatataattctacagtgttcagccaagtaggatctttaaagatccatcttcaatgtgtcacatatgtttgggtgtcaacaaacttctgtattttctgagctggagtaaatgctctcaggaacttgtttcacttatccaattctcttcaaaactgcccttggcatttttttatcccatatgtcttcagagtgacatctatctcccttattgtagcctttaatgaggatgttatttgatggtaaataaattatttaagtgtttaataaaataaagcacagtatgattgtccataaaaggcaagctgcaaaatgagctctaatcatgttcttctgttttggaagtaaatttcacaagtatttgcataaaactaaccattttcagtcttaatgatgagtcaccccaatttgaggagagccatgttaagtcagtagagatattgtatgttgatactctggccaatttttatttgttgtgtttaaatggtattaccggaggacgaatcaggcttttgtaaaaaggcaatgtagttttcagggtcctcgagatagagtgatttagggaaacctagagacagaagaaatatttagtgacatctctgtctatctgtgtctatctctgtctttctgtgtctctctgtctctttctcttcaattgtgaataggctaaggtacttgtgcttctaagattttatgaatctggaacccaggatctcttcaataaaacaaaagctttgagggcttcacactgctctgaacgctcatcaagaccagacactggtttcagaagctgtgcttctgaaattttgcatgccctagagtttatatctggtagatcatcaatgttttaataagcttgtaatcagagtctcatgaacgattgattctagtgttttccaggaaatgggatagattagagcctcaaataattttggaagctgtagtttataaaaataaactcacagtaacttttgaatacttagtatttgtggttttgtagaatttacttagtctcattatgggtcaggaagttagttaagaaatacatcaaggaatgcattactgtacctctacctttcagatggagaagtcaaagtgtggatttgattagcttgcatttgtaactattgtagactattattaaccattcataaataaataaaaataaaattacattttattttttcatgttctattttttttacgccagaaaattcagtaatctctcttctctctcccctcttttctcttcccatacatatacatacacaaacacatctgcagtctttatacataccgtggcttaaacagagatttgtcttctgagactgagaaatagtatagttcttgtccatttaaaaccttttcctggccaggtgtggcggctcatgccggtaatcccagcactttgggaggctgaggcgggcggatcacgaggtcagcagatggagaccatcctggctacggtgaaaccacatctctactaaaaatacaaaaaaaaaaaaaaaaattagccgggtatggtggtgggcacctatagtcccagatacttgggaggctgaggcaggagagtggcgtgaacccaggaggcagagcttgcagtgagccgagatctcaccactgcactccagcctgggcaacagagcaagactcggtctcaaaaaaaaaaaaaaaaaaaaacaaaaaacaacaaaaataacccaccttttcccctactgtggacattcacatcagctctagttaatattctgtatagttttaggtgaatacagttgagaaagttgtgttaggtaggaaatggaaggatatgtcagagtaatccaaacctgagtgaatatccaacagcattccatacatttcaccttaacagcaggttgagagggccatgctaaagccttggtgtcatgttcaaacccttcgtataaccccattccagtcagaatcatagtagattagcgtgagtcatcccactcccctctagggcctccttttacagtgctcatatgcagccctcatcctcctgccctctttcctttaaagctgtgagttccttgtgaagaagaaaagctttcacttagaataactgctcacctgtaaggctaggagtaggttaagaatcttctgaaaatgtgccccatttcttagaattgtggaagtaattggtctgaagaattccttgggttcacaaactactaatggccacattttagccttgtaaagataagaaaaaaagtatgacccatgacagtcttatcttctaagtggttgtgtcttagtcatcaagggttttaacttaaaaacatgtttagtaaaatgggattggaataataatatgagaaacaatacaaacagacaataaaaatcatttgaaaatcgaatggaaaaaattgaaataaaacacaaccagaagtctaatttgaaatatatgagctataagattgacagtccacaatgattttacctcataggatgttgctttagattttattcttcctttcaaatctgcttaccacagttcctagttctcctcagagacagaggcaatgagccagaagagaaaacctccatcttcattttgttacctttcctttgataataataataaaccctttcaaatactgtattcaagcagttgactttctttttttttttttttttttttgtgagttggagtcttactctgtcacccaggctggagtgcagtggtgcgatcatggctcactgcaagctctgcctcccaggttcacaccattctcctgcctcagcctccccagtagctgggactacaggtgcccgccaccacgcctggctaatttttttttgtattttttctagagacggggtttcaccatgttaggcagggtggtctgggatctcctgaccttgtgatctgccaagcagctgactttcacagatttcttctcacatcaagaaatccagctcttggactttggacttaaaggacatttgtaaaaacaaaacaaaatgaaacaccaggccaggtacagtggcttacacctgtaatcccagcactttgggaggccaaggtgagcaaatcacctgagctcaggagttcgagactggccaacatggtgaaacccggtatctaccaaaaatacaaaaattagccagctgtagtggcacaaacctgtaatcccagctactttggaggctgagtgaggcaggataattgcttgaacccaggaggtggaggttacagtgagctgagatcacaccactgcactccagtttgtgcgacagagcgtgactctgtctctaaaaaaacaaaaaagaaaagaaaaaaaaagaaaggagaagcaccacttcttcggagtagtaaacaaaataaaacaaaagtcttcacctttgaacagcactgtgtgaattaaaatgataattaagtagtataaacaccaataacaaaaaactttaaaagcaaagcaaaacaaaacaaaacccaaccaaacaaaaatctcctcttaaagagtaggaaaagtaaagttccaaacattcgaggccatttcattttcacctcagagcctctgagggcagtcaaggccctgttctgacaggtgggaaaccatgccttgaggacagaaaaatctttgctctgagagtttccgaaagtgcaggtgtgattaaaaatcaaacaaatcctgaaattaaattgaaggaaaactaggctattcacaacaaattggacaattaagaaatggtgctattgcttcaaacatgccaaatgggaaactgccactgtctctttggaggaagtctcttatcagttttatagtgattttctttcttcccaaacatacaaacacaatattctgcatgttatctttgctgtgagtccaaagacaaagagagaatttttctagcactttcccgctagttcatgtagctcacagcaatggtttcctttgtgaattcttctctgtggttttctggttcatgctaatacctcatgactgagatagccagaggaagggccaattatctttgagttgttcttgtattttcagttgatgctattcatgcagttacttccttattcttttttcttctgatcatgctttttttcactctttttctttgtgtctttgtatatttactgtctcaaaaatctgctgcatttataaatagactaagtgatagccataagcaacaatacatgaactattagtagctttttctgaataaggagagaattaattgctacagaatgcaaagaaagaaagcagcattcaagggtctaagttctcaagtctctcacccacaggaggcagatttgaggagtagttgagaacagttctctaaatggaaagtcttgtgggtctatgcaacaatggtttagtatagtgatagacatgttcacatcatatataaaaagcaatcaagtcaactttcctctatttgaatgaattatagaaaattccctgtgaagaaattcatggcagattcctattagataattttatttggggttagcctgtgacgtggtaacctgagacgtatttcaggaaaaattttcagatgtcttcttactttaccattatccattgagttgtaaagtttgatgagattggattcttctagtataggtagggaaagattaaagagatagttcagcagagtgtttagagatacagctttttggattagatctgaaactgaactgcagttatggtactgactagcttatgaccaagttggttgacttctctgaacttctgttgattcatgtataaaatgggaatagcaatgatatcttttttttatggttgtgtgactaaatgttatgataaatgtaatatacttaacacagtaactcttaagaaatatattagctataatcatgaaagacagaaaatgcagaatagaaagaagggtcctggtgaggactgacactctggtaacaaaaggtgccttttgagtttcctataagattttattgagatcagttgacaacatgaggttaaaattcatttaagagattgtgtgttattattgttttaataactgggttttaaggatgaaaaagagcagaacttgttaaaaattgctttttgaaatatcatagcagtggaacaactttcagctcttgtatgtaaaatgtctctgatggaagtgcaatactttcttattgtgtcggttacagaactgctgaaggcctttcacataccaagctctttataaaataatgcactgtctgattactcagtggaaaagcttatcaataaatatgttgttaccagaccacacgcgactcagggaagagtttgtgagtggttgttcaaagagtaaagtacaagatttttttaacctgaggacaaaaattgtctttaaattcaaagtattgttagtgttcacagtcccttctggctaatgctggagtgacttggggtcaagggagataatctcattttactagttgcctataggttgcagacagtatttctgggagagatttaatgcaggggaacataacagaaaacgcttgcttggcagtgagaagactacacactgcaaaacaacattatggcttaatgtcagccactcaaagcactggaggttttgtcattcattggaagactttgaggaagctaatgaaatacattagaagcaggttgttcaaaatggtcctaaaaatggaaaagaacccaaatgtttattgcagcaattttattgctgggaaacatgggctttatgaccagagtgtttgtaatatattcatttgtgtctctgaggaatttcagactgctgagaattatttggattgcatgagcataattatgttacaatttgaaagctaaatctctcttgttttttatcatacattttattttgttaatcttttaggtgggagctgctcatgaggaaggttgtaagctagccaaaggcaagagctggggtccatccaagataccttaattattggccagtaaatcctggcttctgtgttagcttggagttctccttttggtgatgtttctgtggcgtgtgtactgacttccacagagctgtcaattttctagggttctagtcagattgattgactcactctgggccttcctggtttgcttctgaagtatctgtggcctcaaatttttatcacccatttttcggaattggggcacaaatttcttctgagggttaattagctgacatcccagcctctagcagcctttctgtgttctggctctttgccttacactggcaagatgtagcaaaaaattgttagcagtgatggttcctagagcaagtggtgactgttcacttctttcctgtcttcttcaggaatcagtactgagatcaggggaagcactaataccaaccctccattatgacaaacaatgtagaatgtggccattttaaatatgtgtagtttgtagtcacttaacaataatggcctaattccagaaagggtctgtattggcacatccatggaactcttccaaagaatggtaaaaatcctatatttagtgaaaggtaccatgtctttcagagtctttctttatgatctcaacaccagtttttttttttttttgagacagagtcttgctctgttgcccaggctggagtgcagtggcgcaatctcagctcactgcaagctccacctcccgggttcatgtcattttcctgactcagcctcccaagtagctgggactacaggcacccaccactgtgcccggctaatttttttgtatttttagtagagacgtggtttcaccacgttagccaggatggtctcgatctcctgacctcgtgatctacctgcattggcctcccaaagtgctgggattacaggcctgagccaccgtgcccagccgatctcaacaccatttttaagcagttaactccttgagtaccttttgtgtaatttgtgaaaaatacagtaagataaaatgtgacagctgacctcagaggatctcaagctagttgcagagagtactttacacaaatacaaccacagtgaaacagtaagtggccttaatattgttaagtgctaaattaggaaatatgggttgtagttttcttggaagaggagaggggtgttggtaagtcaagttcactgatggtcctgaaaaatgatcaagtacaaagctttaggtagttcaaaatatgaagagtccctgggcatagatgggagaaaaatgaaaagaagatctgatactgagggagtgatagagaacacaactgaatggaagaggtgtgtccagaacaaaggcattcattgtttttggaattgttttcatcaccagagaatacttcagcctgagatctgggcaagaagctatgtagaaggcgttcacatgcaaagtcccgatcctataattgagtgtccacaaacaggcttctgtcccttgagtgataaattagcttctcatttctaatcttattttgaattgtctgaaatctgagctagaactaggctaaattgaatgagtaatcttttttattttattttatatttttgtcccaaacacttctactactccagcatggaacctccttttactgagtataagttatttaacaccgtggtcttagaacatttaaaattactatagtaaaatatttttattggtgaattactgaaaatagacccactgtcccaaagtattttacacagtatttaatgttgtacatcacattggaaggacactttgaaactaatatttagtgttccttaaaattttctaatttctctttactcacctaacactttatattcatcataagtgattaggaaacaacaattccacttaacagatgaggaccatgaatttcccagacattaaatgatggtttggaattgcaaaatcagtgaaaaagattttcctgattttttaaattctcaccctaattctctttctaagcatttgcctaactttcttcctaaatgcccccttcttttctaattaccatatgcttatctaaatctcttcttttccattgccatatgtagtatatttagagtagattttctggaggcagcaaagcatagtggttaatagggaaaactctggagtcagagagatccagtgttgagaactgcttctgtgtttcatagagtaatggccttgatccagggactcacctctgcatttcagttctcttaactgtgaaacggatgtaagagattcttatgagggttaaatgagatctagtatgtgaaatgcttaatacagtgcttgctatataacaaatcttaaataaacatcaccaattattaactgtctttataaaatatgtacgttttcctaagtttcatcctgcacttgttctatgtaaacatctaaaaaaaaaacacagaaaaattatgcctttacatttatgaatttgaaaataactggtgataggtaagtagtagcagttttataagaatagcaagagtttatagtatgtatttcttaagcatttttaagactgagtttagaatgtatacaacaggtaaccttaaatatgtcatctaattggaccgaaaatagttattaaatggtattcaatgttgaggatttgattacttaaataattattttcaaaactagaaaaatggctaaaccatatactggacctcagagacaccacaggagaaaagctagtaacacattagaggggaaaaataaaacagaaacatgtgaaactttaggtcaatagaaacagtctgaaagtatgaaggaagataaaagtgattggttgtgaaaaaatagagcagatccctccgaggtagagtcattagaagtaacacatgcaaataatcaagctgctttcatcttgaaatagcataacaggtaaagtgtgcatatcagatgtgagcactgcaatataagatttttcgcaaaggagttaaatatattgaatcaacacactaactattctcatgatgaaaatgttttagtcattccaatgtcccagactcctcctacaacattgtaaaatgtggcttcggggatatagtagaataacagccaccatcagaacctcagaaaagtaaactccagggaacacctaggagcgtccacttcaccatgatgttcacctcaatgggagctaaaataaaatatgtaccttaatttacccacaaagagctacatgttgttctcccaaaagcccatccctgggctcattaaatgttgactcacaacaggatagtgaattatgctaatgaaccatgtgaataaacaacttgctttcatatatgagtaattactaggaaatgtttgttggatgaattaattaaaatttgtttaaacattgtgtgttgtagtttgttcaaatattgtgtgttactgttttgtgctcgctggtgtattgtgcatacagtttagaagagattactatgagaaataccagtgctgtaaaatattaataggtgttaaccaaaatattaaaaaagcttccaaagtcaaacatgtttgggctatgctggcttatgcaatattaagtagattccttgagtgtaggactttggagactttaacatgctaatatgctctatgaatcaccaagaaggctatagtactaagtttatttcactatagcataagtatttagatacagtctcatagtactaatgttctagcaaatacggtgccgaaaacctagcaacagactttagtattcacagtatcactaacctgtgggcagctggctctcagaagcccatgatctgagataattggcaattttgtcaaagttagtatttgaatttcaagcactgtacagaaagtcacttaattagtagctattccctatattcttgatttttttttggtgtcacccttttgaaataataaagttttgtttcttttctcaaaaaggacatcagaagaaagtcagctgatatggctggtgacaataataaaatgaatgtgaagctccctaagaaaatcgttgcctgaaaatggaaagtgtagagagattaaagagcagaaaattgaattcagctgtagcttttcttgatgggaacacacccaccatgtaatttgtatggaaacaagaaagaatgattgaagaataggtttcagtaagttccccagctactgcaaaagttgctacccatatatatatttttaaaaatttattgaaaggtacaaatttagacaatttctctgtgaatctgtgcataggaaatgtgtaactttagaagcatatgaatggagaaattcaggagcccaaagatacatttctgtgtttgtgaatttgggaattcctgacagtcttcatgattttttctgtaacagtatcaacaatcctgcttctataggataatgtttatcaaataccctctgccatcttctgtgcctagaacatttattccaatgaaagtgttgatgtcaacttcacagaagaggaaagtgagattcagaaggcacttaaactgcatcatagaagacctttgttttcattaggctttgctttcaatccgtttcatcatacaaaagttggaaagcaaaaccagactaattccaaactctcttcactgcatcatgctgttttctaataagcaaatgactttttaaattgggattaattatggagccaccatttctggcttgtgctctcattacctcaagttctcgattttaacatataaaattcaaattcagtatattctaattagttataaaaccaaactgctcagtttacaaaactcccaaagaatatgttgaagtttttttccatgcaaatgtatcttattgaaatgtcaaatcattgaggctgatttatagagatgtagatcatcccacttttggatagatgtgccttgaatatctactgtctaacaaacaataaacacttatcaataaaggtgagttactgttattgatgaaaacagtcagagaatatactttatttaaaaaacatttacaaagaactcttaaaactcaacaataagaacttaacagatatgccaccaaagaagttatacagatgacgagtaaggatatgaaaaaaaatgctgcacatcgtatttcattagggaaatgcaaattaaaacaacaataagataccactacacatgtatgagaatggccaaaattgagaacactgaaaacaccaaaagttgacaaggatgtggagcaacaagaactcttcttcattgctattaggaatggaaaatagtacaaccactttggaaaacagtttggtggtttctcacaaacgaatcatactcttaccaaatgatccagcaattgcactccttgcaatttatccacaggagttgaaaacttatgtccacacgaaaacttgtacaccactgtttatagcagctttgtttataattgctaaaacttagaagcaacaaaaatgctttctggtaggtgaatggacaaagaaactgtggcaccatccagaaaatggagtattactcagccctaatcagaaatgagctatcaagtcatgaagagacatggagtaaacttaaacacatattactaaatgaaaaaagccaatctgaaaaggctgcataatgcgtgattccaaatatgtatgacatcctggaaaagaccaaactatggagacagtaaaaagatgagtggttgcccggtgttgggggagtgcaggagatgaataggtggagcacagatgattcttagagcactgaaactacttcgtatgttataatggtggatacatgccattataaatttgtccaaatgcatagaatggacaaggccgagaatgaacctcaatgtaaactttgtactctgggtgatgacgatgtgtcaatgtgggttcatcagttgtaatgaatgtaccattctggtgtgagatattgataatagaggaagctgtaaaagtgtgggagcacggaatatatgggaaatctctgtaccttccattccacctaaaactgctctaaaaaataaattctatgttaaaaaaaaaaagtccaagcccaggtgaaatgttattttctgaaagtaaccttctttgctttcccaaccatatagtactggtgtccatagtgccacatgacatttagcatttctttattgtttttatgggaggcaacatggcctaggtaaatacagaggattgggggtcagagtacttggaatcaaattctgcctccagcatttactagctatatgacttggataaaatagcttaaattctctgagcctcgctttctttatctgtaaaatagggatactaagacttatctgccttatagattgttgtgagcatttagcgatttaatacatatcagacattttgaacagtggctgccagcattagtattcagtatgtagtagttgttattgaattcatgtctctaagtctaattgagggtaaactcaattagatggtagaatcccctcaattagagggcagaatccttgagggcagtggccatatctgagtcacctctatttggcaaattataggtgctggataaatatttttattgaagaaatgcattaaatgaatgcctatggagattcatctcatagaattttgctatattttaaaaatgtgtttttaaagtattgtaaaagtcagcggaaatgctccttagaaaattagttgcatctctttatgcttttattcatggtctttccaccttggctgatctcatctctccaaatctttttctatgtttaaagtagtatcattaggaaagaattatacaagaatatctgtgctgtatgcaattgaagccgtagctcattgtaattaaaagtaattgagaccagacagtgaatgggttttaataggaacacagcagacatcacccagacagtgtcctggtgctttcctagcccagtgaactctagtaaccctgcagcgttagggcacaaggggcctttgtatcagtgtcattgaatatcgctgagtgccctactaggaaagtggcctttttagaaggagatctggtgtcccgagctggctgtggatagtaatatagagtagttaagagcacagggttggaggtcagatatgcgtttagtttctgggcaattattcaaacattcccagtcttgttatctcggtggttcttttttttttcttttttaatttattttgttctgtttaggaataaatatataatatttattctagatctctagagttaacgcaaataatgcaagtgttctcgttctctctctccctctcgccatgtgtctatatatgtgtgtatatatatatgtgtatgtatgtatatagaaatatatgtaagtatatgaagatatatgtataaatacatgtatgtgtgtatattcagagagcagggaatttgtgttatgaagattaagtgaaattacagattatattaactaaatcgttacactctagagcatagggagtgctcagtgcaggtggcggggttattagccgttccaaggcatctattatgcagatgaaaactttttcaattgctgatttcagaatttaacaaaatctagagacttttcattgagataatttgcgtgccagttattattagctccaaacctacccttctgcactctgctttgggaagctggagaggcctctgcagccttcctgctttgcctgcaggctccctgttaagctctgcaagcagagggtgcttcaggaagactgcagggttggaggaggaggtcagggctggttccttatttgctccctgtctccttcctgttaccctgagcttcatcccagcaacgcatcttcacttgggcagcaggagttctttcctgtagctgcagctgcatccagtttgcagtttttccaacactccaggaacaaattgcctggtgttccaccagagatgccagaggagccatgctgcatcccatcttcagagttttacctcattgggtctctcctctatatttctgagttttcatattgccaacctgtttccattttcccctcagccctggggtagctgctttctgtagttgcttcctctgtaatatcttcaagttctctttttacatcttcaattatctagttaacaatagtataatagttaacaattcttcaatttaaattctctctgtttaagtaagtgatgtggtttctgtccgctgactggactgactagtgtgagtgttaggacctgtctttgttagtagtgccagttggcaaaatgctaattgaagggtgctttcataagtacagttcttagatccaaggaagtagattaatctagagggatgattttccagggatgtggtgcgcccagtgacaattcaacaaagaaaagatcacatttttcatcagaacaactgtaggaggacatccttattcacattgcaagggctccaggggtgaaatgactcaccataatgcaggcaggtgtcctcgaagaggttcataggttggcttcaggggattcacataagctcccacaactctgtgtaaaagttgagtacacagacacttttcaaaggagaagttttctttttgttaagttttcagtggagccctggcccgtaaaagcttcaacactgttacggtagtaaaggagatatagatggataaaaaaagaagaagaggcttgagaattatttggagagtgaacataaataaaaacaaccacttaaaaaaataccagcatttttttttctgccgtaaaggctggtgctgcggaggacaaccagttttctctgccagggtccatgctccctcttttggcaacttgactctgaggcatatggactgtgactctgactcctgccggtcactgtcgtgtgcccagccttagactggatatagccaaagcaaatgtttacgttttgcatttttgcattatttagtgtcaagcacctagtagatgccacatgaaagcctcctggttactgactgaggtcagtagcaagcctcgtttatgggactatttttttttttaagatatcttaccttctattacaataattacaaatctctttatatagcatagctcttcacaggagaattatatatatatgtatgtgtgtgtctgtgtacatgaattagattctccaaaagagtattcagtaacatagtcattaagtaagtgataatgacaatttttgttttgaaatttttgctttttgaaattttactgtgaaattttgctacagttcaatcacaaacgaggtattatttttctgtattactcgtgttctgtgagagccaatagaatggatttaaagaataaaagaaatggattttataaacgatgaaagtaaattatttgtctttcttggaactctgattttgtagccaccaaatcatagtaggaggcctagggaaagatgctttaaatggaggataagtgcgtgacacttagcttttaaattctgcaattttgttctgttatttttcattaactctttttatctcatagtgcagaaagagaccattaagtgggagtgtaaaagtgtgcagctactgtgaaaaccactttgatagtcactcaaaaagttaagcatggagttaacatgtgatccaataattttactcctagctatgtacaccaaagagctgaaaacataagtccacacacacacacacacacaaactgtttacgaatggtcatagaagcattattcgtactaggaaaaatgtgggaacaacccaagaacaaatacactgataatgggatattactcagccataaaaatgaagtattgatacatactacagcatgaagaaaccttgaacatattatgctaagtgaaagaagtcaggcacgagaagtcacatattgtatgattccacttatatgaaatattctgagtagacacttccacaaagaatacagacagaaagtagattcatggttttcaggggctggggaattaggacagtgggaagttactgctatggggtttcttttggggtgatgaaaatgttttccagttagattgtgatggtggtcacacaaatctttgaatatactaaaaagcactgaattgcatgcttttacatagtaacatttaggatatgtgaattatatcttattttttaaagaggcagctggtaaatattccttctttgcattgaaggtgataatcattgcataagacattgtttggattctgtactacttctttcaaacaaaaacgaatttatctaattcaaaggtgctttttaaaaataggcacatgggccaggcgaggtggctcacgcctgtaatcccagcacttttggaggccgaggtgggtggatcacctgaggtcaggaggtcgagaccagcctggccaacatggtgaaaccccatctctaccaaaaatacaaaaattagccaggcgtggtggtgggtgcctgtaatcccagctactcgggaggctgaggcaggagaatcgcttgaacctgggaggcgaaggttgcagtgagccgacatggcactactgcactccagcctgggcaacaagagtgaaactccgtctaaaaaaaagaaaaaagaaaaaaaaggaaaagaaaagaaaataggcatgtgatttttaaaatgtagtctgcagcagaatttcagaaatatggaaataatagaggtgaattcagctctggaggtggtgatatggtaaacgtagatgtcacagttttgtaatcacatcccctcttctctgggtcatatatctctcaatgcatatccgggatgaccaccttagctggaggatgctgcactcctctggacgtgcttattcaatcaatagtatacccttaatgtcagaataaattcaacacacattttggattgagaactcagtttatagtcagaaaggtggatgaaataaccagctgcaacaacaaaataacaagtatgtgtttaggcaccattgggaatctatcagtgatgtgctgtctctcaccagttaggtttcatatatataattgcttattgtacttgggcgatgcctccctccaccccaagaaaaaaaagatcatggtgaggtttccttttttttttttttttgagacggagtctcgctctgttgcccaggctggagtgcagtggcacgatctcttctcactgcaagctctgcctcacaggttcacaccattctcctgcctcagcctcccaagtagctgggactacaggcccccaccaccacgcccagctaattttgtttttgtatttttagtagagatggggcttcaccgtgttagccaggatggtcttgatctcctgaccttgtgatccgcctgccttggcctcccaaagtggtgggattacaggcgtgagccaccatgctcggcagttcatggtgagctttctgaaatagattatagctcttgaagtttagagtcaggccgacttatgcctgaagtaatgctagttcaaatacttactggttggtcacttaaccttcagaaaaagactaaccatgttagtacctggttcctggtgatttgtcataaggtttaactggtataaggcatgtgtgacttcataatatcctgaggaattagtctgttgttcccccttgttatcgtccactgcttcaccaaatacaagcaggtagtgtgctgggagttcagttgcctcagtgaggaaattgataggaaaaacaatggttgtcattgacagatctttcaagtctttctttccaaaagcccagatcttgagtggattccagatttgcagtaaaaggcttcccgaaagcagattagaaagaattcctccaaactagggaggggaaggaggatgatgattactgaaagcaattcgcatgcctctcagtaacatcattttggtaggggcaagcaaaacctcggagaaagaatgagagagggagtcttaagagggctaacaaaactattctgtaccaagcttgccatggaagcagcgtttctgtttatttttctttgttcttcctcttgacacctttgtgagataggagctttgagtcatcatcatccttaatgttaacacttgagatagcactcttaatgtgccaggcactttctgagtactagcatatatttatttatttaacaaatatgtaatcctcacaacaattcacgtgaggttggtactatttattatctccatttcactgatgaggaaactgaatgagaatcagagaggtaaagtgagttattcaagatcacacagttaataattgaaagaacaggtatttgaactcagtccgattccagttgcttttatgtgctgttgcatgcctctcttaatgataaattaaatcattttatataaaatcatgaaagtagcagtttctaaaaagctgtatttatggactcaatttcatgcctactcttcctaaaaagcacacagcattccctatatcttatcaatatagttatatgcatacaaaaattacaccaattacaccgggatgttttggagttctcaactaatttattttccatttcaaagggactgttgctacctgcagttttgcagcaggaacaagtctatgaggccaatatgatcttttcccagatacacgcaaggattaggagatggttacccagataagtgtctgcaaactgcacagcaacctgttggaaaaaaaaaaaaaaaagttaagttgaactaagtagccactctttttcctaaggtttggatttgaatccagggaaactattaatatgtcagtaaggagtaaggagaaatgatagtacacatttagagagcaggtgagtccatgaatgccagaactcaggaaaaatgacatcaaaatcccacagctgaaatctctggagctgcttcatctccagtatgagtttgagtttcagccagctcccataaaacaatgctacctttcaaataaactgtctgtggttttactgtacccctcccacattcccaattttttatatctctgagttgttccttaactagcaaagagctgtgattgacacaatagggctagaacttctctgtgataatcccacctctagtattagggttggctaactagtaagcaagattatattacagagggcccaactatggctagaaagatgattttccatatcccaagatgacaagtcaacagtgtcaattctcctttccttccatttatatggttgggaacacactatttattctccctccttttatagctctcaatctttttttagagaactcagtcccattttgagtttttactaaaaggatttggacagtgttaaaaaaataatagaaatgattaaattactacaacaaagtatacatttgaatcttaagatgagagtcaaagcttaatgataattaactcaatgacttgatcattgtacttcattcctcactagccttgagtctccagtgtctagtgcaatagactcgtttgtagagccttgtagcagatggcggcttttcactttcagatagataccatatttgaaaaggaagactaaagatactaagtaatatttctagatttcctttcggcttgcataacacattcccatttcactcaaaaacatttttatttgtaaaacaattgaaggataatgaacatggtagcaactcacagagtagttttctgcctgaagggattagaggctcttggatcaaagtacagtgacaactccagggttaagtgtagaagatatttcatgaataaatggcaatagaaagtgatcatgatgcttggaaccccaagcatgggctcagagctacaactgccctctccattccagaccaaatgagaaaaggagtcaggtagattaatttgatgcaaacttaacacttgaaaaaaagtcataaaaatattagtgaccattaagagttccacctctcttcaaagattcagtctctgtagagactgagtgcttactttatgaaggtttagagaaatatgtttttattagaatgagaaggtattggttaagccattggtgctagaatcaaacagtctgggtttgaatcctgtctctgctactcactgagcttgggagcttgagcctcaactttttaaaatgagagaaattatagtactcatccttagcatttctggcaggattaaatgggattatggatgaaatgttcagcctagggctgggagtggtggctcatgcctgcaatcccagcactttgggaggcggaggccagtgaatctcttgagctcaggagttcgagaccagcctgagcaacatagagaaaccccatctctgccaaaaaatacaaaacaaaaacaaagcaaacaaacaaacaaacaaacaaaactatttggggagctgaggtgggaggatcgcttgagccctggaggcgaaagttgcagtgagttgagatcacgccactgcactctagcctgggtgactgagccagaccctaagaaagagaaagaaagaaagaaagaaagagaggagaggagaggagaggagaggagaggagaggagaggagagggagagagaaagagagaaaagaaagaaagaaagaaagaaagaaagaaagaaaagaaagagagaaagaaaatgttcagcataatattagaagttttgaagcactcagtgttaaccgtggctctttttattaaatacgatttgctgcattctcatggctgagccaaaacattagttagggataccgagtgtgtgcaaagctcgcttaggctctgtggtgttggtagggaaagtgaatgctcattcatgttacagacatttcttggatttctgaaccagaagagatattagaaatgatttacccttatccatcccatccctgcctccccccaccctcaatcaattaatgcatttggcttgactaattcccagtcttcaacaacctgtcagtcaattatatacttttcctacctgagggaaacagtgaggagaagcaaatccactcgagctcatagttccagctgttcccagggaaacagtgcttgggggccggagttgccttccctcaggttctctactctgctttgccactatttagatggtgtccttaggcacaaaccctgaaattcactttcttcctctattaaataaaaatcacagtgactacccttcgtggttgtcttgaagatggatggagatcatagagatggaagctatttgcaaaaatagttaattcttctaatctgttccaggactagtaggcatgtataataaagtcttgtagagcttacagagatggcataattacacaaatatataacacagtttatcaacaccaaaacaggttgctgtctgcaagagaggagaaggaaagaatttagtagatctcacttctggatagatgttcaaaaatacaccttcagaggattaagtatgaataaaactccagcatataaatgcaggtcagtatacaagattgcctacataaactggagcatgatgggaagcagactggagaaaaggcttcgcagagcagtcactttactggttatcacctctggctcccaaacagtgttttcttgggaatagcgggaactgtgagctagagtggatttgcttttcctcaccatttcccccgggtaggaaaagtatatctttgagtgtcaggttgttgaagacttagaattaatcaagccaaatgcattaattgattgtgggtgtcagaggagatgagggcgggacaaataaggataaatcatttctaatgtcccttccagatcggggtttaggattctaagaaggtaaggcccagctgctggtaccgtattcaatcttttctatccctagctaagaaaaaatgtttacatgttaaaatagaaatgacttcaactcctttcaaaaggaaaattgaaaaccacagattgctgtctaaaaggattttaaagatttgtgaataaaaactattagtgaaaggagtggggatagaataggggtataaataatgaagatggttggttaatgtctttcgactcaatgaggcctagaaagtgttgaattctactgaatattttaagtctgatatctttactgttcttcccattctacattcatttcaagtattttaaaatgcactcagatttcaatgcagccagagagttactgtcatgaactctccatttctcattgggaatatgggggaatgaggaagaagttgcaaattcattcagctatgtaactttggtataagagagctaaggattgatgtcacaatcttaccatctgcatccacatgtgctcatataaattgttaaacatataaagctaagtccctgtcaggaagaacacaaaaatgaaaactcaaataaccaggcttatcttagactcatagtcagtgagaatttgttttttatgatgacaatgaggaaccatgagattgtgaattgcctttcaaattatcaaaaggatattaaattgcattaaacatcttctagtgtcagacatcctagtgcttgagaattggtttttctggatatggtacacatggttactttttattaaccagaatgggaaaagctaccagcttttaaatgattttaaatgatttgtcctgcagaactttgtcagctttccacaagcttggagtgctctcctctcatagaaatagtaacatacaagtattcaagtatccccatttcttctgaagctttttctaaaacagttttattttaaaatgactacctattttagaaaacatgaaaatggaaaatcaactagagaagaaaacaaagactcccatattccactaatcagaagtaactccttgcatgttgatgcttttccttacctacccatacccatacccatttacttttatatttattgatgcatattttacagatgtgcataagcatgtatgtaggaatataattatactggtacatattcctctcttagctaactttgtggtgtctcacagtcattcatcacagaacctctcacagagcctagtaaggttcttacgagtcaaggaaaggtcatctacttcctctggctgattgtctggctttatagaagcatatttattcctgggtaatttgaaataggcaataggatttttcccccttttcaaagaattatttgaaaaaacaaaaacaaaacagcagactgaaacactgtaaaaaacacctgtgtcttcacacatccttaccactgacttcacatttcaagatgcagtatccttgatcttgttgagttatgggaattggagagaaaagagatactgacgtaagaggaaaggaggtaatagaggcatgtcataaacccaggtgctttgcaaatcggatcacaatagagcagttgcattctcttttgtggcaaagtctccctggggtgtttgagcagctaacttccagtttcttggctctgaaattctgacctcatgtcccagctaggctgcattaattatcgttagctatggtagatgggtgatcaagagttctagcttcctgtggtgatttaacattacatctccttctgttttcatgagtattttaattaaaaaggtgccttaattataattatgtttataattataattataattaaagtaactgtaattataacctaaatgtgccaccacccaaactaatttcatccacctcattcctctgccatgttgtggttgaaatactagaaaacaatactattgaaatattaataaattaaaaatgttaatgttagcaaaatatgctgaagatcaaagggatagcttgtatttttccatgaaatttagaagagattaaattcaatgtcaattctccttataaataaagattattgttataaatttaagctctttgaagttaagaaaataaactctacatattaaaattgtacacaggtagcttcctagctgcatgaatttggatagatcagtgaatttctttatgtgtctcctcatctaaagatgagggacttggaggtggggtgccaatacctgccttagaggatggctatgaagattaattgatataataaagtgtgacatacatttaacagtgtctaatgcagagtaaaatctcaataaaggttagctaccaatatgtccgctcagattctcttctaatatttatttcacatatattattcacttaaccttattctgttaacgtatttctctattgccatgtaatcagcatatttgcagtttttaatgagtcattcatgtgtttagtgtgccctacttatttccaaaataattttaagttattttaacattatatgagagagataaaatgaagccataagttatgtgagaaataaagcaagcaaataatgaaaggagtgaaaataattagaccagaactcaagatctgttgtattggagccttacattttgctctgacttgttcacaaaaggcaaaaaggaaaacataacgagttatggagcttttgctatcatcttaaaaagggaagaatgttggctttttaattatagggttttcttctcttgtactgtagtataaatgggatgtattgcattggcttttacataagagatgtcgaaaaacctgatggatggcatctttattatctcttttactacaaaatagtgtgttctaaatttttaaactattactagaaaatagtcatttttcttctttcatacactgaaagtaagcattttaattagatatgtagttttttgttatgataccatactaatgtttgcttgggaatttattccttttacctttcatgttgtaagtattcattatggatgtttttgaacaagttatttttcttttatcctttatcttttgtttgtatatgttcttccctgatacagatgataagaaatggtaaaaattctcgttaaacaccatcagattactttgcagagagtgaactggttcatttttatgtctaattttctttaaaattgtctttcctttttcttgatggaatacatcactagcatagctcttatacttgtcaggcaaaattactgttattttttactcatagatatatctggctggagtagaaacagaagataaatttttttatttaacttggaaagagaaagggaaaagatatttgaaaatgtgaggacttcattcagtacacatttattgagaatttttaagacattagtttagaggcttgtgattcaataaaattaactaaaatatgattttttaaagctccttaaaaatctcattgaaaagaaagacacggtatgagataataaaggaagtgctaaatgagtcacatttagtacattttttcatgtaaaaagatattgtctaagagtaaacatgactgcaagtgtcaagagaggagaaaaccgtgagccggggactcatggtcacaaatatcacaaagtaagggaaaagggttgttggcaaagatatagattgggcagctccttttcctgagcacagaaaaatgactttgatcccaaggaaggtccttgaggcctgagaggatgttgggaaatatgaggactgaaccatcctgtctgaacagagtgcagagaaggtctggcagcttccatttttaggtttgctacgtctgaggcttcactaagtacatgacaataaaaaattacagcaaagaaatttgcctcactctacattttgctatcctcaaatggctttctcatcttttaattaactttaatctcgcaagaaccctcctcagtactagtaccccacttttacagatgaggggaaaacagattattggatgtgttataaatgattgaaaatcagatggataaaacattctgaagacagcatgtaaacttcagatcctcattgtcatttccatccttctgtctacattttaatattccagtgtgcatgtgtacatatctgatatgggatactgtgtgtgtgtgtgtgtgatgaggtctggcaggcgatttgtcagctagagtacagctatgtgctatcaatgataaggattctgtgtatgaggacacatggtagattaaagaccactgtgtcatctgtcagaagcattctttgaccctcataataatcaaatctctggcattctaatgtacttcgtaattcaattttatttcatttagtagaacgtctactctcaagtctgtgagtagattactgagggtttttttttttaatctacttttgtttttaacatccaaaagcataaaataaagtagggtctctactctctggcttgtggatcataagcctgcttgatggtagaaggatgtgccagacggacttctgaggtccctttcattttacagaattcattactgtctcatctcctgttgctccaaaggtcctttcataataaagctcatagtcaaagccctaaacaggcccatcctgtatacagaatcccttggattctttacaagagcagagctgcaggtccttgaacctgacatccacagcgtttcagtgactttttcttttgttgtcacttatgacctcccaggaaatctgggcttcttgttttactgggattgtgtgcatctcttctgtcatctgggcagttaccaggcagcatagagcctttgtctcaaccagagataatgcctttaaacagtggaaaacaaagcaaagtaattgcttttgtttcaaggtccttatcttgaaataaagaacattgaaaaataagattgtgtaggaaactatagccatatcatgtcacagtttcagcgaaactagaatgcttgcatttgtcactgttgctgaaagagtgtctttataatgtgtgcgtgggatttgcttttggcctcattctagttctgtggagtgaagtcccttgttttgagcttgttggctggcctgcttgtaaccctaggttctagtgagaaaacaacaaagacaggtttttatgtcttgtgttagagatgatttagattatgctaaggaatttttatatgaacactaatcatagaaacaaattcagatcaatgaaaatataaaaattacttattggttttccatcacaagatgcattatagggaagagttttagcacgtgataaaaacccggtgcagcgctattagcaatgtgcttttttagttggtgatgtccctagttttctcgaaaaagttgcaaaattgtgtttaccttattgccatttgatattcaaacagagtaagatttgaaatgctttaaattgtattacctgaaaataaaatcttaggtaactggaactataaatgaaaatttcatgtcagccagtactttcatataatggtatttagtaattccagtatttgtgattgctaacatttattttttggattccatgtgacaggcacagttctatattctaactcaccaccctatgagataagtattattgtcccattttactgataaggaaactgaagcataaaagtggtgagtaacttgctcaggaccatacagatgggtgacagggctgggattcaaactcaggcattatgcactgggaattcctacttcctgagatagtaagacagcctgaagtgccttctgaatcatcgaagaaaattatagtcaaggtaatttctttgttaataatatactaacacgttctaggttttttgaatgacaatccatgttggctatttaaataaaaattatatattagccagaatgtgtattaaccagaaatccctagttctctgtcatgttgaataaaagttgattttaggccaggcatggtggctcatggctgtaatcccagcactttgggaggccgaggcaggcggatcacgaggtcgggagatcgagaccatcctggctaacacggtgaaaccccatctctactaaaaatacaaaaaattagctgggcatggtggcaggcacctgtagtcccagctactcaggaggctgaggcaggagaatggcgtgatcccgggaggtggagtttgcagtgagccaagatcgcaccactgcactccagcctgggcgacagagcaagactccgtctcaataaaaaataaaaaaaaaattttttttaaaagttgattttaggtctcttacatatctttaaaacaaggccagtaaggccaggcactgtgggtcatgcctgtagtcccagtttcttgggaggctgcagccacaggattgcttgaagccaggaatttgaggctgtagagtgcgatgaccatgcctgtgagtagccactgcactgcggcctggggagaatagtgagactcctctctaaacaaggaaacaaaacacaaggtccgtggacatatttccactataggaaggttgttatttctgtcctttgacagttgcattgtgaaaaggatatatgtgttctttttccatcaacagcaacaaaaatgctcggcaaatcaaataatgcagttctattagacattgttagaaaccagatttagagagggcaggaaagagggagagaaaaggagagaggacaacagaagagagaggagacccagtgacagctcaagtgtggaaactctatctggcttagtttaacataagaaagaattacttggtttgggtttggagttgaatgcaattgggcccttgtttgcagaggtagaaattgggaaaagcgagccccaggtttgaggatatgactcccaagagacagagactgatagagttttataatgccaggtatataaagaacagggctttatcttaatcaattcctttctctaagaactaaacctagatactgagttgtgtgtttctgtgtgtataagaaataatacatttgctgaatttataatgatggccccttgtaagtaagatttgtgttcaagaaactcattttatgaataattttttttctggggatggatctctttcataaagtggttatccactgatgatttaagaatcaacagtgctgatctcattcttttctagtctttcatcctctagtggtgtgttttttacttctttgtgtgtcctagccatgctctttgaagttttagtgataacattcaggacagggaaaggtcagtggtcaagcaattgaggatttagaaagcgggaactggatgttaaagccaatcaggaaagtctccgtgcacacggtgacaagaaagccatccagggcacgctgaaagggggacaggcataaatagggaatgaacataaactcagcttaaattgtcttgtttgaaatatatccattacctggcctattggtgacatgaacctctcctacattactgggttagggttatttactgtaaaattatagtaaagttagacacagaactctgactttctctgtctgtcttggaagaagtttgggtgagcagagaacacgttttaccattgcatttgcaaattgaattaacttatctccccatttcttgtcctcttgctttttatcacttataagtggttgagtgagaaagagaaatgttattttgctttccataagtgtttgaattagctatcgatggttatgtgctaattatatgataagagatagttttcctctgtcctcataagttgctgccttctgcaaagccaagtttctgtgcctccagaatacatgacacctcattctctttctcagaaattggcagagaacaattaaaattaaaaggaaagctcagtggcaagagaaggacattatatctatgtcttgcacatggatggctcctagctctccttctgcgtcaccctgcaaggtggggcagtgatcgtgcttcatgctttcccaatgaggcaaaagagcagagttcagtaaatgacttgttctttcagggcatagtgatagtttagaatctctagagtcctgccctattgctcagcttactaaaccataaaagtacattgcttcatctaggctcctttctgaggtcctttctcattcctgagcacattatttataatggttgataggacgtttattgtgattgaagcccccccgacacttttaccctgtaacaaccaatgtctacaagcagctcattctacaacttctcactttttgtttctgccaaatgtcataaagaaactactgggttctgaaattaaatagctttgtttcttcgtggctggagctcaaattgccaaaggggagtctgtaaagaagggcaatctctcaaagcaatccccttaggtgacttcagtattcagaagaaaaaaggtagttatggactggctctgatagaaactcccttgaacagaatatgtctcctcgtttctgtcctgacatggctcatgctgagctagtctgtgctcttagcagactggtgcctggtatatcctgatctcgtctctatttctgaagaaaccacaaggtaactccaggtgttaattagaaatgttcagccgtattatttttctagtctcttgtccctctgttgggtctcccctccctttgaatcaaatggctgttgctgctgtctggtaggaaaaaaagtgcagaactttgtgtattaatggatgagttctatcacctgctcaaatcctgcagagcacacttacaacagcactcatgtgcccagagcaatattttctgcccactggtgaaaggtaaaaatacaagactggctttgcttttttaaagtgttttttaaaattatctttctgtaagtaataaaaatgtaccaaagtcatcgtcattgcaagtaacctaggaaaactttggacatgtattaagtcctgcctgtataacttaaactcactatctattcctttacatcaatgcctgtttcccctgtgccagatctctgcttctcttctaaattctggcttaacatgagagattactagtaatttgatgttgagtttgatgttgtttagaacacggaaagtaacagggataaaagagctgttgatgtaggcaaaataaactagaagaaactaggaaggtgatgtggtgtgctcttcaaggcttctcccagacacctccttctctctccatgaagacctccctggtcccatgattcaaaattaatcccttccactctgtgctcttccagcattatatttcagctccccctggtcctcagcacattctctgttggatcagaggtatctgtgttcatgtctgtgtctctgactatctgatgggctcttctaagttctaataagagtggccaacacttattaggcatgtcgtattgatgagggctcaacaaatgtgataccactttatctttacctagtaagcctgaggaggaaagttcactattaattgcattatacagatgcagcaaagagatggtaaataatttgttcacgtcaggtcaaaataaatgttggggctgaatttaacaacttagacaactctggttgttggctagcatagctcatgccctgtggtttgctgtttggctattaattaatgaatgtcccagggagtagagttcacagcatttagatgacccatttttcactgcctgccccagactgtcaagttagactttcagcaaggctctgaatgtgacatttccatggttatccttgactccctgttaaaattctagcccttttgccctcagttccagccagactttccttctttctgtccaccaaacgtgtccagctcttttctgtcacataggtgatacatacatgggaatctctctacttggactctttctgtctttacctggtccattttttcccattctttagatctcagctgaagcttcctcaggaaaccccccaacaaaagttcccaattattacatataccttttttaaaaaaatgttattatagttagaattctgcattgttccagagtctgcctcaccaacctatcacagtaaaaatgttaaagtagttaaaatatttgcattgttgttcacattttcacttgcatcacctctgttgcgaatatttttacttctagtttcccctctctgaatcatactgcatattcgttttcaaccacttgttgtcaagtcatttacaaataaattttatctgaatcggtagccttcgacacttgatacatattagattcacctggagagcttttaaaaattctcatagttgggtcctactgatcaattcaatctgaatctgtttgggatgggttccaggtatcagcagttttttattcccatagaggattctaaagtgtgcaataaaggttcaaaactactgacttcaatggtgattttacccccatagggactctgtatagaaacgagtgctgtttgccagacaggcatgtgcatttcagaaatgcagacaaggtgtgtgcagcaggaggtaaactatatgattgaaggagctcttggaaacccctagcagtgaaggaaagaaagcaaaatcttcacaagacaccagggcatctgcttatttgtatttataatgaaacgtattttgcttctgaatcatttgatttgcctcttcttttaccccaggcagatttttgcaagcgttttcagtgaactcagtgggaaaaatttgtattgctatccatatgtgagtttcaaatattgtaactcttcaaagatacaagtcaacccttttttccagttggagacatttttttttcaattgactaaaaattctaattgaagaagaaatatacaactggtaaagaataaatatgtgtttgctcactctgcagtttatatacaactacgtacctaacctttgcctatcatcatttacttctggcaaattgtgacccgtggattgttttgttcttgaactaaatattttaaaggcttccagtaatggcaaaaagcctgctaaaagctgttcttatttcaatataataaatcataagtgtgtaaagtggatttccccggaggtatgcattttaaagtttaagtaggggttacatatttggagagactaatgcatcagtactctgctagcggaaatcacaattaaagagtttaaatagaatttgacttgggacagggtttcttagacagtagagtgaaataattgagtggctataagcgagggaaaagcatggttttggactgtaggcttttgatttacacataggaaatgtattccaaagttagatatatcattgactcatggttttgccatattcagaaagtagctgatatttgatttgtgtggattacatccttaaagtaatagcgagctacatggctttcagtaaaaatggctagaggagaaagagaagagttcctttgattgctgtgaatcttctatggaacacaatgagaaagaaaggatcattttctacaaatatggatttcaggcctttttctatcactaatgttctaataagggcctatttcactagaatataatttacaaatttcaatgaaaaaaaattcccattatagaacagaagttgacaggtagcagaataagaattcatggagatatatgagaagaagaggaaaataaatccttgggagtccagaagcagatttaagatttctgtaatgtcgttgttctgaaagtgtttctgtgaccatggaggttggaatttaacttatgtctgcattatcctttaaagtgctgatacttaacaaatgtgcttaccaagtagtaggtgctcagtaaataatacttgaatctgaagatgtggagaactaaggtgacattcagcctgatttagcctgtagggtttcatcacatttgttgtcctgggtaattatacctcctttaacttaaaaaaagaatcccaataggttgataatttatatggccacttttcttagaagcagtgagtgatacctctcaaggttcagttacctgagatgcaacttgattagacatatcttgaaatctgaaaatgatccttgatttggactggagtgtcatccctgagtctgaggctgtccatagattcccagtgctgagaaatgataaatgagtctctcgtaagtagccagcaggcctccacagggaagtccagaaccagacatatttaacagcttcattaatgacctggaagagctgtaataagcagcttgctaatgaaacctgcagatgacactaaattctaaattcttaggtgtgggtagcaacaattgaagcatgaataacaaaagatccaagcctaggctgaggctagactgtaaaagtccatttagggtgactttgcaaaacagttctgtgcaacaccagtagtccataagaccaaggcagggtaggacacagagatgatttatgtcactgaaaagtctgtgccaacaattttcttagtccttaagtcaggaagaggatattggcaaggtaggattagcatctaaaaagttgggttcaagtaccagccctttcatgaattagcgtgtcttaaacaactcactgcatctctggaattcttggtttcattttataaatgttaaattattaatgtatctgaaaatgcttggcacagacatgcaagccagtacaaattagttcaatcttattttaagagcagcatcataacactaaaaatcattctaccactctgacaagagtccatgaatctccagggcttatacaaatgggcttcaaaagatccatgaaccccctgagttaatatagtaaatacttagtgtgtgcctagaagcatggatgggtgtttttctggagaaactgtctaaactttcttcatacacccattggcgttgacaactagaaacatgttaagaacctccacactggattgtaaacatctttcaggttccaattcaatattctagacacatactgagctttctgtactatggacttgacaaaatggctctcagctcagagcctggacaattgctcatctactagatatttttatggctggtaagatttcagctccttggaaagatctgaagtattacatcaactttaggcactctctatcccactgccttgttttcttatcctcataacacgtggctgtctgaaatttgaaatgttctcatttattgtttctatttacttgtgtgctgccatccactaaactataagctccttgagaacaatattctagactttcttgcttactgctgtatgcctaatacttaaaagagtgcctgatccattgtaggtgttcaattgttatttgtggaaggaagggagggaaggaaggagggagagaaaaaggaaggaaagaaggaagaaaactttatgtcacacagaacctggctcatactatatattaaacgatttaatgaataaaagactgaaaggatatgtgaatgaataaggaagactcatctagattgttgtaaagatgtggagggagggatgatgcctgagcaatgggaaaattcagcccactcttctttgacatagtagagagcttcactctctagcctgcaaaaccatatatatacttaagaaggcctggttgatacttttggttctaaaaagaaaatacccagtcccatttcctctgtgctgtaagaatggactgaagtgtccattgatccatttcttggaagtacacaggagctttggttcaactgctgacaagatgaacttgtggcatattaaattctatacagaattcagttttgaggagaggtgccactaaagccattttgtgcctacttttagcaggactagaaggttctggaaataaagcctaaatagagtgccattattctcactggggtttctattgaactgttctacaatcaaaatacatccttcagaatcagaaagcaatgtcttagagtcttctcctcacaggaatcagctgcttctgattgtggaaaaggaattttccttatgtctgaagcatacactcctgttctttgattgattcatttctcacatgtgatttttctctgtcaggtgtttaaaagtgaccattttctgtaaaaacctgtcagccctagaaagtaagttgccagaaaaaaaagagaaagaaatctaaccattatgtgtaagcatcagctattaaactgaatccgctaatacctgagattcaggaatacaactaacaaatatatctgttttgactgaatctcccccttaggctaatttttaaagttaagggttaaggtttttggctgattagaccttttctcacaggatcatgttttagtgggccagattccttgaaacacttggaatatgcatgtacacttgtggaaaaactaattttatgcactgatatccctcattaaatgggcttgaagcgaaacttctaagctgagatatattacgtttcgtttaataattattctctcttcacacaaaatattagccaaaggtggaattttggtagcatcgtacatatatccaagacaccaggaaaatttttactcctaaaaatccaaattcatctttagcctcttgtaatttttactgcataattaacaagaatgtttgataccgtcatccacttgacagaatctaatttggagcatctggtgtgatttagccaagacttagttctagtctcccagtacaaaagggttctgattaattaatcgttgcccaaacctgaataatacattaaagacaaacttcaatgctaagtgaaaaacaaaagggaaagttttcttatttaaagaagctggagtttcccagtaatagaaatgtaacaatgaagaagttttagcacttaaacttacgacaggtcccaacccaggcatgtagcagacaaaatattttcttagatggctgaaattttgggttcaggcagcagagctcaccacctgccctggggtgtattttttttattataccttaagttttagggtacatgtgcacgatgtgcaggttagttacatatgtatacatgtgccatgctggtgtgctgcacccattaactcgtcatttagcattaggtatatctcctaatgctatccctcccccctccccccaccccacaacagtacccagagtgtgatgttccccttcctgtgtccatgtgttctcattgttcaattcccaccacctatgagtgagaacatgcggtgtttggttttttgtccttgcgatagtttactgagaatgatgatttccaatttcatccatgtccctacaaaggacatgaactcatcattttttatggctgcatagtattccatggtgtatatgtgccacattttcttaatccagtctatcattgttggacatttggattggttccaagtctttgctattgtgagtagtgccgcaataattgtctgcttctctctcagacactctcttttgccctcaatgtgttgctattctccttttaaagagtccttagtacaggtttctgaaacacaaatttaccgctactgtcattaaacatggccttagtgtcatgtggctgtgtcaaaatagctccttcataaaagccacccttctgttttttggttctgtcccttctatggtttttcctttgggctgaatacagattgcttttctactccatccaaaaaatggtgtcacctacgatgtgaatgggtgtgaagaggtacacttaagtaagcttccataggggagatagctcaactctgaaggtcatgagacgttttccatcttcacgtacgccataaaatattcatttataagtacttattagatattattaaataattcattgaaaaatatttactttgcaaatatcacatccctggaaaagtcctagtcattggggctaccgcagtgaatgaaacaatgccctcctactttggtggaatttataccctaattgaaagacaaattaacaaataaacgtagagtataggatttaaagtagtgttaaggaccatgaagaaaaatgaggcaaagtaagtggaaagacagtgagatgacatgctaaggtaatttatgttgttacaaagaccttgtcaggcattactgagcaccacttatatgtattgctgtatactaaagctcactctctgtaatgcacttactttcagtctgataatcaagacagaaaatacctaatcataactaaaatatggtgttaaaatgattgaggcaataagaaaggtacaaaacagtatcaaaagacttagaaagaaggaaaggccccatccaggtagccagagagtaaagtctttttgttgttgttggagacttggtctcattctgtcgcctaggagtgcagtgacatgattgcagctcggctcactgcagccttgacttcgcgggctcaggtgatcctcccacctccgcctcctgaatagctgggactacagacatgtgccactacacctggctactctttgtattttttttttagagacagggtttcaccacattgcccagactggtctcgaactcctgagcttaggcaatctgcctgcctctgcctcccaaagtgctgggattataggtgtgagccaacgcacccggcaagcttcctaaacaggggtatgagagatgggcttgggtaaagatgggtctccattttcagggaacaactggagcagggacataacattgggaaaatattggcaacgcactgcggtgacaaatggtccgttttggctagagtgcagtaaaagtgagaacagagtgtggagttagcctgtagccaagtgttgaagggctttgaatgctaaagtgagaagtttgaatataagagcaactttaacaaaaatatgtaaagtactttttctgataatcagaataacccattttccttacgtaaaatagataccatgcctaataataaaatttctggtagaaaagtgagttaaagcgacagtaacaaaataataacctatcagggctgtacagacaatcttaaagtggaaagggttgcataatgtcatgtgggcttatcgacatccactatggtagttttgtttttaatgacttgttctactgacatctggactttatctaaaataaaacagaatgctggctgggcatggtggctcatgcctgtaatcccagcactttgggaggccgaggtgggcagatcacttgaggtcaggagttcaagaccaggctggccaacatggtgaaaccctgtctctactaaaaatacgaaaagtagccaggtgtggtggtgcacacctgtaatcccagctacctgggaggccgaggcaggaaaatggcttgaacccgggaggcagaggttgcggtgagatgagattgtgccactgcactctggcatggacaatagagcgagattccatctcaaaaaataaataaataaaataaaataaaatacagcaaaacaaaacagaatgccagatgatcctttcctggaaactttatgaaatccaaatatgtagccaccatcatgatagagggactgcttatgaaataccaagccttctttgctttatgctctttcataccttctatgctaactggtagacccagtgttttgggtcctcatgagaggcttatcctaattcaagattgcatttttctgggaggtttttagatttcagcaactaacacagaaatttagaaagccaaataatcccttctttggaatcaaagcccttcctcttttcagattctttgcctcctgtttatatcaaaaatacacttcttttcccaccctctgacgtacatgaggctcatgtcagtgcccaatgtgtaaagagtttttaaacctctgcattttctcacccatcctttctgggttgtatgttgatttgtgtagaccttaggcacttttgcatttggggtctctttatccataaaaatatattttgattgtatttatatagatatattattagtagtacagaaatatatattacatgtatttattgataaacataaatatgttaaatatatttatcaataaacatattaatgtggccacatacagtcgctcatgcctgtaatctcagtacttttagaggccaaggcagaaggattgcttgaggccaggagttcaagaccaacctgaacaaaatagacaaaaaatttaaaaattagccaggtggccgagcacagtggctcccgattgcaactccagcactttgggaggccaaggtgggcggatcacgaattcaagagattgagaccatctggccaacgtggtgaaaccctgtctgtactaaaaattcaaaaattatctgggcgtggtggcacgtgcctgtagtcccagctactcaggaggctgaggcaggaggatcgcttgaacccgggaggcagaagttgcagtgagccgagatcgcaccactgcactccagcctgacgacagagcaagactccgtttcaaaaaagaaaaaaaaaaattaggcatggtggcatccacctgtagtcccacctccttgggagactgaggtgtgaaggattgcttgagctcaggcgttcaaagttgtagtacactgttgttatgccactgtattccagcctgggtgacagaataagaacacaactgagaaaaaaaaaaaaaaaaaagaagatatatattcacataacacacacacacatacacacacataaatatatatccatgttattaatttaaacatttttctcaacttaaaattttttttcctgactttaaaataaattaaaatattggcatggccccttaaaactgttgtgtgtgccttaggcattctgcaaactctgcctaatggataggttgacccttttccctttctgtggagaattggtgatgagctgaattgaaaaccagaatgcatggctgggcccaagttgtccatgccctgtaacactctacaaatatgaagttcaagtcagatattgcataccctgaaaatacctcccagttgtacagtaggaacattgggaaaggtcagattcattttattgaccttttcattctggtcaatagtggcagctgcaatttcctatttgcagcaaatttaggaaaagtatggacctcagactacttacctgaaaaccaccaggattaattaaaattcagcttcttaggacccttataatgaaatcaggtattttggatcagaatctcagtgtttgatgtatgtaaatcttatgcacacttaagcttatagccactgtcctaaaacaaaagtctgattggatcgctcccctttagcagttccccattgcagaataaagtccagctctttaacctggcattgatggtccttcataatacggtcctggtctctcaaggcctgataccccagactgaaggatctgaagttactcaaatgcgcatccttctcttttggcctaaactccctatctttcagggcactatcagtttcatatgcattcctaaagccttatgtcaaatgccatccatctcctgcagcatgtgttaacccttcaatataaaactgacacccctttccatctatctgatgcagcacctataatacatcattgcatttgtttagttgtcacttttttttttttttttttttttattgagacacaatctcactctgtctcccaggctggaatgcaatggcgccatcttggctcactgcaacctactcaagcgattctcctgcctcagcctccagagtagctgggactacagacgcccgccacaacacccggctaattttttgtattttcagtagagacagggtttcaccatattggccaggctggtttcaaactcctgatcttgtgatccacctaccttggcctcccaaagtgctaggattacaggtgtgagccacggtgccctgccaacttttttttttttttttttttttttttacaaattagaatgaaacattttttaaatgcaggacctatttcttatttatttgtttatttcataaattacattgcttgtttttttaaaatcagggcacatttcttatttatttgtgagttttcttttgtgggggaaagcatgtgtgtgtgtttatgtatttatttatattttgaatccttaaggctaaacacagaatttggccatgttagtcatgcaggatatcttgacttctttcttttccttttccttgttttcttgtttaatgaggtgatgactaggcatttatttggttagataagattgatattgagaatcaaggtgaagatcaccagaaaaatattgaaaacaaatggttaaaaagaaagatctcctgatttcattatacatggttctccatcacaggctttttttgttgtttccagcaggatagagaagagaaaaattagaaaagaattgacattgatggttgtaggcaacctgttgttcgtgtgaacaagaatgggaacaccagcaaggaaagtcacatcccgccaggagaatatcagtatggacaagctgtggaagtcctacttttatggaacattaccaaaaacctagacgtgaagtgagcaggactttcggaaagatgatttggttccattcaatgactatgtgttgaacatagacacagatcttcctttatggagctttttatcttagtggggtagacaggcattaatcatgaaatcccacaatgaaacactccattgccgaatttagtaggcatcatagggctggcagaaggggctggtggtggtgaaacttgaggctgaagggataggacagggccagattgtggcagggaggagggtggcttgggggccatgatgaccttgaacagctgaagacaatagggaaattagatacttagcaagcttgacaggaagggaaggagcgcaccagaatgagtaccaagactcgttaacttgttaaataatgttaaagaaaatcagaaaaactgtattgctttgtttgctggagagctgttcttcctaaaactcaatgcagttattgcctgtttcccttatatctccacaaaaagagcatcgttttatctggcaagggagaacattaatcattcagacggcggaatcaacattgtaagacttaccttccaacataaaacctgcaggttgaatgagaacccgtgacagaaaagtcttgttaaaattcccattgctatgtcctcctccctgaagacatggggcaaaacggggtttactttttccttagatgctttccagtttttttacccagcctagatcttaatgactgaggatccagagagaggtcttaacatttccctggaagtgttttcttatgattaaaaaggtttgtcttacagaattctctttcattatttttttccttctgacaaaatttttttagcttaatagtgtatttgaatgggtgacagagcatgaaaaagaatgaattagaagcctgggatctttgggataaattgagaaatctagtttaaatatcttaacaaataaatttattcttgggataaccacagaagctccaacatggccttcttgagctgtgtcagtgtttaatagttcacttccggcaaggctcatgcctgtaatcccagaacattgggaggccgaggcaggtggatcatttaaggtcaggggttccagaccagtctggccaacatggtgaaaccccatctctactaaaaatacaaaaattagtcaggtgtggtggcaggtgcttgcaatcctagctacttgggaggctgaggcaggagaatctctagaacccaggaggcggaggttgcagtgagccgagattgcaccactgcactccagccttggcaagaagagtgaaactctgtctcaaaaaaaaaaaaaaatagttcacttccccgctggtaaaatcaggggttccctgtacacagcatgagagccacccctttatttgtccatgtgcaaggaagatattgcccatctgtcacaacacattcatgtggaagtaggatggccttaaaaagtagtcactacccaacagatccaagttagcataagagagaaaacttatttaccagcctgattctagatgttccccaaagctctttataaatctagatgatgtgagtctctttgagaattctgttttagaatttggtaaatgccaggccctttcctgccagtgtaaagctattcgttgttattattgtcattccatagttcttgtttttgttgcgctgctggataattctacaatgccagaaatgattacaccagactcaaagacagaatgaaatttatagatacaagttctaaaccacaacaggagatccgtggctgtctgatttgtcatcaccttttatttactgtgataatttcaagcataattacaggagatgtgcttaagagtttgctgtattttagggttgacagcactgtgaagttttaaaggctaccatctctttgcttgaaatagtgcattttaaggttaatgaaatctttattatggactcagttttgaaactggaacaagaatttttaatttaagaaagatttgcatttttccaaaatgccttaagagctgtgcttttcatgttatcaaagcctaaaagatagatagggaacatattattattctcatttgggataaagaaatcgaggcactttaacactaattggtttgtctaggaaacagagacacatgctctgaaagccttgtttcaaatgtagtgccttagcccctctgtcggaccaatctaagggttctgaggtctgtgttctcacttcctcacctttcactagatagctggatttacatactgggcctctatataaaattctgttgaatataggaacaaaaatgtttaaaaaccatgggtgtaggggaaggaaaaaaaactgggagtttgagtgtatttcaattgcaaattaaaaatcacatgtgggactaaaactgactccgtaactagaggaattattgctcctgtaactaaaatgtcaagctgatagacctagcttcaggcccccttggatcctaatgctgaagttatcagaaatctcctttctcgcttttctttctttttttttttttttaatcccctttagaagttgtcctttcttgctttgcaactcaacatttatctaagtatatttcattcttggccaggacatttcagaaagtagcagagatagacaacatcatcaaatgcttaactgcagcagcaagagagaccctgtttccaatgtgctctcctgggtaaatcactatgtgggaatttatgtggtaaaatatatcgtattttactgttttttccctaaattcaaattatttcctattacacatttgttctgaacttgcatttttcttcctgcttagcaataatacatcttagagatttttatgtgtgtcagtacatgtaaatctaccttattctttaacactattgcatagtattacattgtacaataaaatattatttaatgattttgtcaataataggcatttaagttatttgaggatttttttgttatagcaaacaagtattatattaacagcgttttacatgctctttgggctgtgtatgagattatttctctaggatagataccaggagatacatctgctgggttaaaaggtattgacatttccaacgctggtaaataccatgtaactttcagagagtttcaccagtctcattagttttttaagtgctaatgatgctgctgctgctaccaaatccttttggctactctgccaggtactatgctaagtgttcagtatacatcatcttatgtaatccttacaacaaccctaatccggtttctttatgagatgcatgctgatattaatcatgatcattttgcagaaggggacattgaggcttagagagttcttgtcactggcctaaattcagaaaggtgcttttcttgtctttataaactaaagattggctttacatactaaagttagagggtattttacttgtgacatctcagctgctcagtgaagaaatttgtccttgagtcttgggccaaataccataaggggtgaattcacaaatgttctgtccctgtgttctggatatgtgacttggattccatatagtatttctgcagttattatctggcataattaaatgtggagtgcaacccaaagtcaataaaggaaaattgccgctgacgttcctactgatctgagcataagcccccagagaaattaacatggcaagaagaaaactaaaaaaaccccaaaaccctgggccattagttaaagcaacacacatatcatagagtagggtgttactctatggagtcattgcctattgtgtagcatggttagtgcggtgataacagtaacttgggaatcctggaaggatataaatgttatcactttgccactgtcttactaggtttagtggttacttatttatttttattagagttggggtctcaccctgtcacccaggctggactgcagtgttgtgatcctgattcatggcggcgtcaactcctggacttaagcaggagcctggctaatttttttctttttaggtagaaatggggcctcactatgttgtccagattggtcttgaacttttggcctcaagtgatcctcccacttcagcctcccaaagtgttgaggttatagacgtgaaccactgttccggggccttagttgttagtaagtagccttattttactatattctgtgaagaaatgtttatttaaccttcggttattgtggtcagatgtctagttctatttaacatagattgcagtggtggaagatgtctagtctctttaaaaaacagatcagctgctgagctcttaggaggtggttaattggtgactgctgagactgagaggctccccatcccttccagctgatcccgcaggggagccagagaggaaagaaggatgcttcttcctgctgcttttccagaaagattgggctgagctcagttattctgagaagcaggaaagaatcagaccagaacatttaagtgactttggctcatgctaaagaatattaaaatattcttggcacatttacattttagaagtttctacaggacagacaagagggcaacattatatagggccagaattttcagttagtttggcatactttcagaagtttgtcatccttttttttttttttttttctttatttgagatggagtctctctgtcgccaggctggagtgcagtgacgcgatctacgctcactgcaaactcctcctcccgggttcacgccattttcctgcctcggcctcccaagtagctgggattacaggcgcccgccactacgcccggctatttttttgtattttattagagacggggtttcaccttgttagccaggatggtctcgatctcctgaccttgtgatccacccgcctcagcctcccaaagtgctgggattacaggcgtgatttctttttcctttttgtttacaaagaaagtcatcctttttttaattttacactgtttagattactttcatattacttagcttaattgtgcttagtagtttatttatgttttgctttgtaaatgactcctctttattttgcattaactctaaaggtgatcccttggcatttttattagcattcaggattgaaagattatcatgccataaactttggttgaagttcggttttggtaacttttctgttagtctccaaaaaagaactaattgttgctaatctatgagcagggattaaaagacagagtataatattgaatattaaatgtgcattatctcatttagtcctcaccactaccacctccccccccgccccctgcccagggttgggggtgggcagtgtctactttcctctttatccccattttaccagtttaaaacaaagagaatttaagcagtttgcctgagaccacatagttactaggcagccgattcagagctggaagtcacctctgattttttcttttattatactttaagttttagggtacgtgcgcacaatgtgcaggtttgttacatatgtatacatgtgccatgttggtgtgctgcacccattaactcgtcatttagcattaggtatatctcctaatgctgtctctccccccccacccaccccacgacagtcctctgtctgattttaggacccgtatacattacatggctaagtgcttgcttgcttttccttctcagctgcttctccctacgtttttcctacatgttttctacagctgtaggagaaatttgtttttcttttcgttttccccatctagggaagcttatgaagcttcaattcagtctttgatgaatctccgtttttcctctatagctttgtttggtgacacttggctgtaaataactacatggaggaattaaaaacaaataaagggccgggtgcagtggctcacgcctgtaatcccagcacactgggaggctgaggcgggcagatcacctgaggccaggagtttgagaccagcctaacatggtgaaaccctgtctctactaaaaatacaaaaactagcaggacctggtggtgcacgcctgtaatcccagctactcaggaggctgaggcacaagaatcgcttgaacctgggaggcggaggctgcaatgagccaagatcgcaccactacactccagccttggcaacagagtgagtcctagtttcaaaataaataaataaataaaaatcaataaagtgacctcaaaacaaagcacatagaaagtttctccctttgaaatttggtttggctcttgatgagcaagtttctcctattagcctctctagctgaagcaattgggactaatgatccttttctggtgtttacctcaaagggatattataagaattggatgagttatttgcaggaaaaacaatataatgttcagtattctgaaaattgcaccaagtttctccacaattttgcctggaactgattttatatgagaaagatgctgggtttccccactcccacagctcatttataaaatgtgccaatatttattcaagtttctttgagtccgggagccagatagaaatgcaaacatattatggttgtttgattcttattaagctatcagggctgtatgcagttctgaaatgagtacattggcctactgctcctccccaggagcttgcggtagcctgccctcacacacttcacagccagttacataacttgtgtcaccatggaagcatctcaccatcactgagctttttggtagactgacttcatatatttggttcctaattttttgttttgtttcttgagacagtctcagtctgtcacccaggctggagtgcagtggcgcaatctcagctcactacaacctccgcctcccaggttcaagcaattctccctcctcagcttcttgagtagctgggattacaggtgtgttccaccgcgcccagctaatttttgtatttttaatagagcaggggtttcaccatgttagccaggctggtctcaaactcccgacctcagatgatccacctgcctcggcctcccaaagtgctgggattacaggcatgagccaccgcgcccagcctggttcctaatttaaaacataaatgatcacatagaaaacaagcaagaatggagccttctttataaatagaagcctgaacgataaggaggatgattatagcatccaattaaatgttttagaatttggcattttcttaaccatgagatttccttcactcaaatgagagttgggtggtggtctgggtacagatattttcacagagggtattcgtgagatgcaggatgagaaggaagcgctgcttaaaaaggtctcagtgctttggatctgaggcagtagcctgttctatcaggtatagctcttacgtgttgaaatctctgttaagaacagtcccatggaaccagctcagggagatgcaatgactctttgggccaatcaacccaaatagcttgatgagatcacctctaggcttggtgggcagaggacttaagttcacttatgccagtgtcatcaactctctcctcaattatcataggtctgtattatatgtgtctgggagcatagagaatactggcactggttcaagactcctcatttctatctcacgaatgcaattgtccctcagtatccatgagagattggttccaggaccccgtgaataccaaaatctgcagatgctcaagtccttatgtaaatggtgtactatttgcataaaacctatacacattacattaaattatctgtagattacttagaatacctacaatgtaaattctatgagaaaatagttgttatactatttttattcatattattttttattgctgtatcaaaatgaaaggatctaataactcaacatttcttatgaccaaagtgttaaaacattttcacattttccccttcaagcaggctggatcaaatgaaactatacatacagatgggcttttaatttctctctactcctagcaaatacaacgttatgggatactagaaatatgtaggctcaagaatcacactgtctgtgttcaaatcctgattctgcacttacaaacaatatatatattgtttacaaactatatatattatatatatgttataaacataatatatatttttatatattgtttgtaatatataatattgagatataaaatgggaactatacttataaggttgatttcataggatatttgtgaggattaaatgagaccattcaagtaaagcacttaagagtgtaagtattctagaagtgctgtccctttacctattagtctgttctaaaacacattagtgatttaatgatcctcaaatgtgaaatagcttttaagtgagatacgagcttttccattgacaggcaaagcaagttagaagaggaaaagcccaaattgtaggtgatgtttgcaatcagttagtgagccctatgcctcatctgtagaaaatctgattgaccgtggagctccagatgatttaacactatacatagttctctgattcacttttaatttgttactaatgataaatatgagagttttttcactccattctgcaaaagcatggttctgctggtatggcgttgcttgaatggtagggcactaagctgcggggttcaggtgaaggtactctcatttaatcatgtaatgggaagtcacattcttgatgagaagcacagcacctgattcactatgctttcctccaaagagaaccatgcgtaatgttacatgtgaagtttttctgtgtttttttttttgttgtttttttttttttgaagcttcactggaccaaatgctctaagttgccttagaaaaacactggcacagaatataagtctccacatctaaaaagatgtagggggcctggaaatcatctggatctgggtcagtgtattccatctaatctagaaatttcttgggattaaaaaaaaggtggtaatgaatatactaagcttttttatattacagatgcccaattaaaattgtacatgcatttgtgttcttgattatacagaatagccaagtcattccagcttttagatatttcttcaactggataatgattacattgattatatcaccatgatccagagatcaggttagcattcttgtataatttagttaaaaatgagtgaatagattaaattattttatatttgattacgaaaataaaacataccgtttatggggaaaaattgtaaaaggagttctggtgaaaaaggctgggagtcaatgtccaactaattcatcctgctgggagagatggttctttcattctttaggttttagatggagctgcagagaggctttgtttcttctatgaacattgtttttttttttttttttttttttttttgagatggagtttcgctcatgtttcccaggctggagtgcaatggtgggatctcggctcactgcaacctgtgcctcccaggttcaagcaattctcctgcctcagcctcccaaatagctggaattacaggctcctgccactaaacccagctaatttttctatttttaatagaaatggggtttctccatgttggccaggctggtctcaaactcctggcctcaggtgatctgcccgcctcggtctcccaaagtgttgggattacaggtatgagccaccatgcccggcctattagtgttgttttttaattgatatatgaaggaaagaaaggtggaaagcgcacaaatgcctctcacgcacacttccctgatgaagcagtgtctgtgctcctgactctgggctcttttctgatacttggagcatggccaactgtattgactgactagccttcagctccctctctacccctccccaccatttgtgtttatgagatcttctttactacccaatctaattaagacttaaccagggtgcttccagatgtgacaaataagagattttcctgttgaattgatcagcctatctctgttctctccaagctgtctattggaagcctctttccaaatgtgtttgtgatgctgattaacagttttcccaccccactaccaacgaactaggggattagctggcttataattgtatctcacttctcccagagcatcaggagtgattaatgtgccacatgcagctgccttgcttaacgctgtatttctttatgtggaggctcaccagctctaggctccctcaccccacatggctggaaagttctcctggaagcagaaacccacttacttgtactagagatggcagaattctgaaaataagagaatgggggtgaggatttaagaaaagcagcaaaaacttcgataagcctcaaggaggggaaaacaactagctagctaaactctagccgctttctttatactgttaatgggagtatttaatctctctgatctgtagtctgtaaaacaagggaatctctatcttattgaactgttatgtggtaatttgctaatttaattggagtaagagcttagcatagagaaattggtgtttacttttagatgaatatgtttctgtttgagttctctatcatcacctgtttgctatagagatcagacactttgctcagcctatgctatgcccctgccaagaatcatactatttattgtgtttttatagctgtgagactgaggctttatgaaaaataagatcgggaaagcatggcacattatactggtttttagaaacatgctgatatgatttggctctacgtccccactcaaatctcatttcgagttgcgatcctcagtgttggaggaggggcctgatgggaggtgattggatcatgggggtgaggttcccctttgctgttctcgtgatggtgagtgagttctcacgagatctgctgatttaaaagtgtgtggcacttcccttctgcgcacattctctttcctgctggctgtgagaatatgtgcttgtttctcctttgccttccaccatgattgtaagtttcctgaggcctccccaaccagccctcctgtacaacctgcagaactgtgagtcaatgaagcctcttttcttcataaattatctagtctcaggtagttctttatagcagtgtgagaacagactaaatacatatgccgtcctttaaaaaagaagatggtgagctcgttgtacaggcagatttcagggtggacaggttcagtggtgattgtggcaaaaatccttgcagtagtcaattcttgttgctaggttgatgactgcagcagtaagtgtgagggtatcatgtagtttaagtgcgcagagtgaagagagggtgggaaggagccttaattgtgttgtttcagccctgaatgattgcctctttcagtgaacagtttcagcaataacagctctgttgtcatttccctgcggcattagatgctgtggagaatcgcccaactcacaagacccctcttttctggagacatctccacatatccatagggcaacaaggggaggttctcagcaggcttatttatagcaagtgactcagctcttctaactcattgctggttgatatcagatttcccactccaggaaactagaggtagaattgaggggcagcagctgtttctgtaactaacagaaaacagaaactctaggagttccagggtggacctggtctacccagaatgtgaactgaagagcgaaagaaaggaaaaaaatgcaggtaagcaaagagaaatcaaggaaaaacatggacaatgaacactgcggggatcttgatggtttttatgtcctaatttcagccctcaaggcttttgatccatgccatgcctctttataaatgtaataacttccccttttttgccctttcttgcttaaattagtcccagctgatgcctgttaattgttgcaacaagagttcttactaatggacatgtgtgtctacgtgtcttttatttatttatatatatggaatgcagcttagggcaacagatccaattcaaactgcaatccttcagagtcttagtcccacagagaagcagtaaggctgtctgttcttggctctatcaaaaggttgcaaatgctaccactgagtcctatgggcactcttttcactccactggtatgccggactgtgcatatgtctgggattctaaacatgatggaataacatatggagaagaataacatgtcagtgttagtccagatttctggctttggaaagcagaaacacagggtcctagtgaagaaaagttgggaatgggagctaaagagaagcagaaaagatgctgagttttagtgtggaacacaaatatggtttgaagtgttagagaggtaagctcagagaggatgtcattttggccaggcatggtggcttattcctgtaatcccagcactttgacagggcgaggagggaggactgtttaattaagttcaggagttccagcctgtagtgcactatgattgtgtcactacactccagcctgggtgacaaagtgagaccctattcccccccaccaaaaaaaaaaaagagagatacaaattggttgtcattcacattttgaggctattaatgcaatgtttttcttttctactaacgtaacagaaaccttgcagaaaagtcagtctttttcaataagaatggaaatagtcattcaaggcggtttgccaagtgatgttactctgtgcctccaagccctaggcattgattcttgaaatggctataggcatgatcagttgctttcagattgctaatttggtgattattgtgggccatggctagaaaaaaatgcattagaaatggaaaaaaaaatctggcaagggttgaaaaggatcactagaaagttactttttgatgaaaccaaatgaaggagcttagctataaatgaaagaagaaactattgacacatgtaataattctcatggtccaggggttagaaaaaaggagattgttctatcaatattttcaaaccaagatgagaaacttctgactttttttgtctaattttatatgtagacctctgcttccgtctgcatgaataccctccacataggctgagctgtcccttcagaaacaaaccagtttctgagaaaagaacagcttgagaactgtgaacagtagtttttaatctgatggtttctctaagaacggtaatgggaagcatgaaattctgagacttgggtgaattgcagaagagttggcatctcctctgccctctacagtgggacccttttcattcattcttctgctgtttgtcctgttccttttttgtccttgtgattttgtcattttcttagttgtcatccaatcagttttccttctagtatagctttcctctttatttccatttccctttctttggtttttaaaaaatcttttcagttttaaactcggcataatgtaaaaatgaggcctgcctttaaaatgatgacttgtattaattgagaaaagttttattcctgttcaaaatcaagtgagttttgccactactgtgttttttcattaactttttaatatgcctccaaacaaagaaaacaccaagttaaattgctttttttacttctgtgaaattcagctttaaaacctcttatgaatatgtgcctacacctgttgtatttgtgattttcctttgtccagatagcagagctatgggtgtggagaactgagacataaagtgtgggacacaggcaaaagcgtagagaagttagaatcatacaaattggggtttacaaattgacctcagacaagatatttaactgcattttcttatctgtcacttagggacaaaaataatgcctacctcagggtgtagatagaagatgagtattagatgatggatatagagtacttagcttagaactttaggcattctcaataaatgacagctgttacttttaataatgctattattatgcttctctgcggtcacctggtacttaagtattgaatgtggagactggcactcgacccaacaaaagagatgttcttaaaacttaaaaagcaacatggagtagaccactcctgatgtctttaattttttttcaagtagaaaaacggttaaaatacttttagaacctctaagttattgtgcgacatggcactgcttgctgcatgtgtctgtccctccaaggctcactttaggctcctctactttccactctctgccttccaaacgcatctgccatcaactctttcattgctgtgatgttccttcctgacttagagatgtcacatacactgttccctctacctagaatgtggcttatgttttcaacactagtaagtccctaatacaagaaagataaagggcctggctgccaacctaaaacttggataggagtgagaaaatagaatgagtttgtatgcatatatacatgtaggtgtgtgtgggtgtatttggtttgtgtctcttccccattcttaattgtaatgtctaaagtatcaatggcctaatttatttaccttctcccgtatctagagtacctaattcttaccaaaataaagtttcaatatatgtctgttggattaattgaatgatgcattgagaatttaggcaataggattaaaatgaagtggctctcctttcactcttaggattttgctggaagggagggagctaacatttactgaatgtttgctacacactgtggttatggagaattgcaggaaaaggaataccaagactgatatttgcagttgaatgcgtgaatgagaagtgtatggtgaggaggatgggagctcccacataagtagatttagtgggaattcttttgacgaatgtgctccaaaacaggtaaacccattcttctgactagtgaaagagaatattggccatcatgcaaatgcctttatggtatcctcccagtgttacagaatgatgctagcgtgccagtgaatgaccaaaacatcctcttataaaaacaaacataaagtcaggtttgtctaggaatttgcttaaatggaagtataactattgattgacattccatgagagagcatctagcaaagtatctgtacatgctatgggcttactatatagtaatcttcccactaaagcaaagttaagaaaattatttggcttcagttggtttaatagtttttaactggactgacttaatgatttggtatctaggaactatgagtactcctttcctataatcacaaaccattgagccaaaagacccgagagattgtctagtccaactgattcattttaatgatgaacaaagagaagtcaagcgagattaagtggcttgcaggggtcacacatctacttccttcttccttgatttagaagtaagcatatgcaatctgtgatgcccttcagtgaaaaggagagagataatgagagactgaattgcttacagatgaaaaccttggggtacaccagcagatgtagcacataattaaaacactgtttccatggttggattgttggttggtttctacaacagtgcttgattgaattatgaaggggttcctgaggatttaaccaatatagcccattactcccacaaaccaaatattgctaatctctctaaagagaaccgattgattaaaatgatgctcttactaatgagcacctatgaagtcccaggcaatatgttagaaactttacactcagcgtttcacttacactgtattgtagtgactaaaattgcatgtggtctagattaccactctggttttacagataagaaaacagaggctcttgggaaaccaagtctggcaaggttacagaaataggaagtggtgcagatgggagtctaacccaagtgtgtttgaatatgagcctctttctgttccctgatgcccatttcacaagaggaaaaggatggggaattgagcatttaagggtagtcatgtgagaaactatttaatgctttcttccaatatatgttagtgtaaacgctggaattccttttcaaccatctgagtggctttaccagcttaagatacagtggccactgatttacctggcagaagttaagctagaaagcacctccttcctattaagaactgctcattaattcaattcatgagcgataaaatacgacaagaagagaagcaaatttaacaccaacttctgttttctttctttgataaaataaccattatctcattcaccaaaactcattcattcattctttcactcattcaccatacatattttgaggacttctcttgtgccagacaccaggtagagaactgtgaatactgttcttcccatcaaggtgttcacattctcctgggggctgacaggcaggccaacgagtaattgtgatacagtggtaggggtaacttgacagaaatccacagagataatttgccacagagataatggtttgtgtttggagtctcaagtaattctgtatatatggacctgccacagaagtggagaaagggtatctttccctgcagcagctgatgactgaaacttctgcggtgcccttgctgatcctgctgataaatcaggctggatccagagtgtggttttccatggctgtccttgaggaaaggtgtcatacgactgctcggggatgagtgtaatggtttatgacttcagcacctgaagtcctatcacacagcaagttccctggagatggtgatcatacagagcgaatattgcttagctggtgataatgtcacgctgccacgctgagttacacggattgcctgattcctgcagctaaaaactcctggctgattaatcccaatgtcatgtaaatagagtcggtgtcaaggagatcataaatgagaaaatggatgctcggatggggacattagtgaggaatggagagccaccatcaccctactcatccctcagtcagcccctaacaacatcattatccaggtgagaggaggcacatcactcagccagatcctggagggcttccaaatcttccttgcctatcccatcccctgattctattttaaacagtgaatattttacgaatcacataaccaggctttctctttctcgtcatgccttcagagagaagttacaggaccattccattttatatatacatatatatatgtatatatatgtatatctgatatatatttatattttatatatttatatatatatttttatatatatatatacacatatacccctgatagtcaagcaccttaattaccaactagataaattggggcatgatttattcatatttttaaagacgcattagagagtccctttaagcaatgctctcatatttgacttacagaaatttaattgcacatgtaggctaggtttcaggtttgttgacaatccgctctttaactggtttatacccagagatgtacaagttgactcatgtcaattatcttgtaatttggtggctttactgtcaatgtgaagggtcatggcatggcagggtgtcacatcacactcagcacagctccgcttcccccatgacacttgctctcctcttttatcttttttcttctctctttctctgcgtctctttctctttaacaaaaccaaaaaactttttttttttttttgatggcatctcactctgtggcccaggctggagtgtggtggcgcaatctcggctcactgcaagcttcgcctcctgggttcacgccattctcctgcctcagcctgctgagtagctgggctacaggcgcccaccaccatgcctggctaattttttgtatttttagtagacacagggtttcaccatgctagccaggatggtctcgatctcctgacctcatgatccgcctgcctcagcctcccaaagtactagggttacaggcgtgagccaccatgcccggccaaaacccaaaaactttcttttaggagtagcctctactacaagctttaatcagggcatctctttcaaataaatttattcctcttaataaatgctttattctgctcacctaaagaaatccaggtgaacaacattttttctccatcttgttataaactttctgaaacattccaatgtgtaaaggaaatttaacccaaattcatttgaaaatctgcagatttgggtcatgtattccttacctccatgcctgtgatttccttttgatgtgtgtggggggatctcaatcctgcaacctatggtggattttcaggttggaattcatggggtcctggatggcagagacaagagcttttgtgttgtgtgaagggaggctgatgtagctctcaaggctgacattcagttgaccttcttcaaccattccagggcttatctcttcatgtcagcattatttcagcaatccctttgctggtcctcccacttgtgggctctcacgcttgctgactgccgttgtcagatgcaccttcctgaagtgctgtttttatcccataaaagactcccgtggttcctactgcctgtggaattaagttccagctccccagcctgacatcaagggtcctccagaagttaacctttgcctgaccatctgaatttatcttcctaaaacgtgtcaaagtttttaaattctctttggagtacccttgaaacagaaattgaccattttgttttaccctgtcatcagttattttgttttggggcttgtatccagtgtatctgatttgcttcatcttctctatatgcaaatacactaaacatcatgaaacaatagcaccacagctggccctagtttaaccctctaaatagcttccaggatagtttatttcatgtccaggcttccattgtaatttcagtcacctgattcaaaagagaggcactatccatgaaaggccacagaggttacaaggtttagctggagtctgcttgagccttcaagaactgtttatacccaagctagcatttattggggttgattccttctttcagactttgacaggcagatagttctaaatctgttttagctagaactttcagctggagtgttagaaatttatttttctttatagactaaccatttgcagggttaaaggttttaacattttcagtactttttactacctaagcaacccatttataagactgtgcctttcattttttagattttgatgtgtgacccttgatataacacctgacagaagtcattggacataattaatattactggtaacacactgtgtttcacatcaggtgattttgtggttgattattcagcttcacaacactctagtactgataatactaacccttagccccaagccagctagttaaatctctgctgattcttccaaaatagagtattgtcttctcccttaactgtctaaatccttctgtaatatttaataatagtcataaactactatattttaggtgcagtaaatgttttgcagccattttttttaaaggaccatgtcttttaaagatgtactctgtgaaaaaattaccaatgtagtgatagagtatatgggatttcctttaaaataatccaaaaataaggggagaaaatgggcagaggtacaaataaaacaagattgaccaggtattgctacttgttgaaactgggtgataggtacttttgtgctcattatgctactacctctcaaagcctacacacaaatcatgtgatcttattaaaaatgtagattcctgttacagaaatctagagttggcatggaattctgtatttctaccaaattccagtgccgcagtttggatatttgacccccagtgttggaagtgggacctaatgggacatatctggatcatgggggcagattccttgtgaatgtcttgatgccatcttggtaataatgagtcctcactcattagtttccatgagagctggttgttaaaaagagcctggtaactctcttctcactctctcaccccctctcttgccatgggatctgcacacaccagcccttacccttctgccatgaatgaaagcagcctgattctcttaccagaagaaggtgctggtgccatgcttcttgcacacccttcagaaccaggggccaaataaacctctcttcttcttttttttttttttttttttgagatggaatcttgctctgtcacccaggctagagtgccatggcacaatctcagctcactgcaacctccacctccgggattcaagcgattctcctgtctcagcctcctgagtagctgggactacaggcatacgccaccatgcccggctaatttttctgtctttagtagagacgtggtttcaccatgttggtcaggctggtctcgaactcctgacctcaaatgacctgaacctctctttataagtcacccagccttaggttttcttttttatttcttttctttttgtttctcttttttttagagcaacacaaataaactaagaccttccaggtgacattgatgtggctgatcctctgaccacacatttgaaagctttaggaagtaagaattataatagtttctcttaatttgtaaatatttgaaatttttcaaaataacagcaaattcctctatttttccttgcttgactgaggttccatgacctttttgacatcttttcctcccattttaggacaaattgacctctccttgttttaaacttcattagtccttccggtctctactatatattaatatgtaatcgtgtactatcttgaattattagtttgaatttgtgttatttttctaagactataaaaattcttatgtcacaagctctgctttgtgttttttggatacctgtgccctctagcacatgtttatgggattaaatttggtgcatgaaaaataagggtatatattgactaaaattctgcagtgctaaaatgaatacaaccagttaaaatccccagagaagtggtttggggacagagtggcagaaaaatgaaagaaaagttattagcctgagagggagagcccttgatcgtttcggtttgatgcaggaatgtcagtgtttcctggaaatccttgtgtggcagtgaaaaagcagtgtactaagaataaaaagccctggggttgggtcctgattctgcaatagcacaccatgtggccagcagctaatgatggctagaattacatacatacaggctctggactcagcaatttacatgcattatctgatgtaactctcacaatagcactgcaagtagttgttatgactccctctctactgaacacatactgcaccgtgaacttggactgaccacttatcgtctctgaacatgtgtcacatccagattcagatccaggcctcccactatggagccgaagcctttcatttactggggttttactctattgaaaagtgcctcaagtgtgttgtgctgtagcagagggaggattacccagtgtgtttcagctcctcccatcttacaccttgaatcagaatcttggaggtaagacccagaaatccacattttaacaagcaattcaagtgctttctttaccctaaaccctgaaccactgctgtgttgttcttctgactggtcaatttattatgcatttctgtagaccacagttaacccacaggcaaaatgaaggtggagttgaactatctaatcaccagtgtttaaccttgactacagagttaagtcacttgtttggtactgctctatcacctgtgtccgctgccttattgttagacataacagtggaggtgttagacatgctaatgactgtaggagatcttgagctcactactttgtgaactccttgagtccaaggagcttgccttaaggatctcttatgccaagcatatgggacctagcacataagggacctcaatgattgttaattaagggttgtttctaaagctaacattcggaaattctgctaaataatctttcacttgtcctttacagctgccactggacctcagtcatggttccacttaaagtcttgatttaagattggtctggactccggaccagtgtgtgtcgtcatttgtgttgttctaatgagaatgcaagttaattaacccggccttcaccagagttctttggaagaaatgaacatcctaaatagaagagagaagagatgcccaaattttgcatatggcagagggtatgccaagaaccacttgcttgtgggttctgaaacctccgtattccttcccttcagcccctgcaatcctcctccatcctggaaatgagggagagggccgttaaaatttcatcaaaacttctcatggaaagataactcaaatgttaattgctcaatattggagatcagagcgatctccacaagtaggagttggcagagctattctgcttccatgtttgtgacaatatcatttctctggtttttaaatcactacatcttatttaaaaatcttaatataaagtatttataaaacacagcttccaccaatcacgtaaagtagaagatgatatttgcttaaaccaaagcaaaatgtggttaatatggaacttcaggaagccatgtaaataattgatcaggctagtgaaaaagtttgaaatttcattgaaagatattttaactcttagggaagatactttatcaattgcctataacagtttgaaatgatagaattaggtatcaagactaagcctacctgactctaacatacttgctcttagtgaatttttagatcaagaaggtcacaaagaaacatgaaatctctaaaactgccctgcatttgggaggaggggttgggataaatatgcgtattctttttttttttttttttttttttttttttttgagacggagtgtcgctctgttgcctagactggagtgcagtggcgagttctcggctcactgcaagttctgcctcccgggttcacgccattctcctgcctcagtctcccgagtagctgggactacaggcacccgccaccatgcccggctaattttttttgcgtttttagtagagacggggtttcaccatgttaaccaggatggtctcgatctcctgacctcgtgatccacctgcctcggcctcccaaaatgctgggattacaggagtgagccaccacgcctggccaaatatgcatattcttaaattcacgaacagtttttccacatagccggtcttccttcccaggtgtaactactgtagggacacacacacagtttgcatttatagtatgatcccaaatgcaagtctgttgcttcatgcagtgtattcatgtgtgcacccaaaccctatgcctgtctctttgtatgcaaaatatcaggaatacaatagacattcaataaatagcaagactttctccctttttaaaattgtttccttctttattaaaaaaaaagtggagaaagtttaattacccaaatgaatgctctatatctataaataaaagcgtgtacaatgtatatagagacaggaaaagtgaagttgattaagttgagaatttagtgctgtagaaaaaaaatattttgcttagaaagtttagggattgctgctctgtgttgtccaaaattccttaaaataacatcctctgaataaaccacccaatcaagtctgaaatttttcatagcctccaaaattctttagaaaggtctgtttcttgatgagtagggaaagctataacaggaagaaaaacaggacacacaaattcagcccatttattttcccacactgcatgagggcttgggttcaaacaataaatcaccaaacagaattccctgaaagcaccttttgaggcatattgatcactgttaatagattatgtttaaccacaaaaacagctataaatgctaaatcaagcagattttctccctaaagctttgttctgtgtctttagtttgctaacatctatacgaacaaaagttaaattcttcaaacttatggatgccagcattccctcttcctccttccccaagggctgaagaggacagatattccagataacacttttgggtatcagatttgaacagaattctacaggcctactcattttgagtttgttctgattctgtactgcagtctatttactacatgcaattctaaagaaaggaacatttttattttaaggccattagtgaagtcctaagattagaggctgtgcatttggttagcataaaaggtaaagacattagtcctattcatatcttgtttttatcattcttgtctgggcacagtgacttggataatttgaggtaaaagcacttatcccaaattgacttcatctcagaggtcattgcctttcatggtcactgcctaggaagaaggagtgggatggccttggctcattgaattttaggtccatatgtttaatgatttcattgcttctaaaactccttgtcagattttctgtagttcacagtgattgttccttccttggggccccagagcactcactctgtttgcagctcttgctctggcatttactttccttgtctatccaacagacttctctgcagtagctgcctccctaagtagattgtaagtttcaaaaggacagagatagtcatgccccaatgggctcagtacagcacacctcacgaagtgcacgtctgacagatacctgctgttggaaataaatgtacagcccatctgagcatgcctttggcatttctgaaattatagttataccttttgattgaatggcatttcccctgcttggacggttagggcattaaatgggttgcctgctagaaggagcctgcagagactgaactatgcatcacaggaaagaaatggcagagtgaatgagctctctctttctcagcagatcctgaactaaaagttcagtctggaactttgcaatctgattgagctttctaatttagacgagcttttaaaaatcctagcaataacattttctgtggattcccaactcatatttctgtggtagtcattctgtcaataaaaatgaatgatagggactatgctgagccagagtacatggtccattgaaaaacagacactactcaacctttactcagctgttgtcatcaggaatttgagccaaggactgcatgatcgtctaatatttaatagtaacttgaaaagcaatgtttatgacatctgatttttcaaaaatgtttattttttaaaaaatacaggccatatataatggctacaggctagatctacaatctacaaatacagtttacccactagtctgcatcatatatttatgtgatgcttaggagtttacaaaacagttcacaagtgtaatctcatttaatatttacagctgagatatgagctgggatcctcttcacagatgcaaaaaaacaaggctcagattgttaaagtgagttacctaaaattgtatagctattgaatagcagagctgagcctagaagctggaacttcaagttatttggtttagtgttgcttccaccaaacggtactgttaaaagcctagattatttttctttcagttttaaaaacgttctttcttattaaagtgtaacgtacatacagaaaagtgcacaaatcatgaagtcactgttcaaaaagttattataaaagaaacatttctataaaaccatcacccctatcaagaggcagaacattcctagagctccagaaaatcttgtcctgctgcctgctgttggagaggaaagttgtttttttttttaatttttttccttctttacctattgctaggttcatggctgaggcacttataacaaaaaaattgattaacaaaagaaaagcatacaagcttaatataagttttatatgacataggagccttcagcaatgaaaactcagagaaacagggaaccctttgtattttttatgcttaggtttaataaagagtggagagttggctgggcatggtggctcacacctgtaatcctagcactttgggaggccaaggcgggtggatcacgaggtaaggagatcgagaccatcctggctaacacggtgaaaccccgtctctacttaaaatacaaaaaaaaaataaaaaaattagccaggcgtggtggcgggtgcctgtagtcccagctacccgggaggctgaggcaggagaatgacatgaacccaggaggcagagcttgcagtgagccaagattgcgccactgcactccagcctgggcgacggagcgggactccgtctccgaaaaaaaaaagtggagagttgtggagaagtgtgcttggacaaagggcatgtgatctaatgaaaatcaactagggggaacttagcaagaccagtttattcagattcttctctgtgccactgtgtctttagagataaggacattcatttcctctgggtatagggtgggcacctgtctcatgagagtcttatgagctgcttcagaggaaggtcagaaaatttttttgtgtcagggcatggtggttcatgcatgtaatcccagcactttgggaggccaaggctggtggatcacttgagatcaggagttcaagactagcctgactaacatggtgaaacaccatctctactaaaaaactacaaaaaaacaaacaaaaaaatagccgggcgtggtggcacgcacttgggtgctactcaggaggctgaggcaggagaatcgcttgaaccagggaagtggaggttgcagtgagctgagatcgtgctaatgcactccagcctgggtgacagagtgagacgctgtctcaaaaaatatatagaaataaaaaatttaaaacttaaaaaaaattattctgtggtctgctttggggaagaaggcaatagaagatcagagagtgagttcctgcttttgttgtttcctcaaatgtcatggtactatattttggagtagtgaatcctgaaccccatcattgccttttctgtcaaagctaactatactcctgacttcaactccgtagattgttgttgcctgtttttgttccatttgtaaatagaattatacacactattattttgtgtctgttttttgttttgtttgcacagacttgtgattctgagatttatttatattggttatttcgtgtagcggtagtttgctcatttcattgctttataatttctattgtataaatattccagagttaatttatcagtttcatggtttatgggtgtgtgaattgtttccagtttttagttgctacaaatagtgctgatacaaacatttgtgcatgtcttttaggctcaaatatatgcatttttgtcagttacatctagaagtggaatttctgggttatagagtaagcatggcttaatgttaactctcaaacacttttgcaaagtagttaatgcaatttacagttccatcagccatgtaggagagttccagtggctccacatttcaccaagtcaatattttcatgtctttctattctttgctagtctaattagtatgtacagaatatcactgtgattttcgtttgtgttttcctaaagaataatgaaattaaacatttcaaaaatgattattagctgtttagctctcctgtgaatttcttgtgttcgccctcttttttctctgttaggctatcttttcttttgattgaaggattctttatatatttatggtatgagtcatctattacttatatggattgcagatatcttctcctactggataccttcccttttcactctgatagtggtttcttgtgttgggtagaggtttccaattttaaaatagtcaatttaccatgtttttgcttttatggttagtgcttaagtgtcctattaaagaaatccttgtttactccaaggtcacaaagattttgttttatatgatcttctagaaatctcattgtgttgccttacacatttaaatgtacaatcgacctataattgattttttttttcttttttgagacagagtcttgttctgttgcacaggctggagtgcagtggcacaatctcatctcactgcagcctccacctcccagcttcaagtgattctcatgcctcagcatccccgaatagttgggattgcaggtgtgcaccactgcacctggctaattgaattgatttttgtgtgtagtgtaacttaacagtcaggattcattttctgttttcccatatggacgtatccagttgactcagtgccattatagaaaaagccatcttttctgactattctacagtgcaacctttgtcatatattatgcacgtatgtcttgtgagccaatttctgagttctatgttcttccatgtttgtcaatttgtctattcttccatactgtcttatagatttattaaaaatattcatatctggtagtgtagctctctcaaatttttattatttatgacattcttaaacctgctcggccaattgtcttttcctattaatttataattgattgctaatagtctatttttaaacatttgttttatttcaataggtttgtggtataagtggtttttgattacacaggtgaaatgtatagtgataaagtcagagattttagtgtccccatcatccaagtcatttacattatacccaatatgtagttcttatattaatagtctattttgacttaggtattttctattccaaagttgcttctttgagatctttacaaatctgtcacctttattcaaaattatacaaatgaactcttctaattcatcaaatgttctcaaggagataatggggaaagagtccttgcaaaacatctgtcctcattgttgaagactatagatcattgagagagccaggaggccatgtgttgcatgatattgtattattatagtttccattttgaaattatttgtgactatggatattgttttcatatacagcatcaattctcagtattttgattccagaactgtcactctccaagacagggatgtttctgcttttgagcctttgtactcactgtcccgctgccttaaatgcttttccctcagttactggcatgcctaactccctcatctctgtcaactctttgctcaaataccaccttctgaatgaaacctaagaacatcactttaaacctccttgccctgctctatttgtgtgtgtgtgtgatggcaataacacaagtcaccttctgacataccatacaatgtacttactgagtaaggcccatctattttctatctctccacaacagcagaggtcttggctttgttggctaacatatcccaagggaagaacagtactatgtatacagtaggtgctcaacacatatttgtagaatgcgttgaatgaatgatttccttcatggaatcatagggttaagcgtaatctgtttctaccggtgatttagatatagggtatactctggtgaaaggttgtagctgccctagagaagtcagtgttcacaagggtctgaggagcctccttgcaaagaattcatcctgaccctaagcatgggatattgattcagtaatatattctcttagtagttgcaagggaagggtgatcctgaccatattccaaccacaattggctattccttcctttaggaattcatatcagcatccttagagggagaaaagaatgtggtttaagaatatgtacatattcaaactcatcaaattgtatgcaataagtttatgtggtgaaaaggtaaatttaaaaaagtaaaactttttttctctagaaattctgtaaaatatcttcaaacgtgaatgtccatcagagttatttggagggctttttaaaacacagactgctgggttccacctccagcatttttaaattttggtattggaccagacaatttgcatttctaacagattcccaggttatgcagatgctgtaggtccaggggccgcactttgagaactgctgctataacataacagaaagcaagggaattcggttccattttggctgtgacctaaaggaggaaagaagcattttggcaattcctagtttctcattttgccatagaaaactttgcaaacttttgacaccttgaaacattttaacagctctaaagtatccacaaaaatggacagtggcccccacaagagggctgatgccctgcaacactaagcaaaggccagaaaaaaagctggaagatgttttcttccttctcccctattttgtttctttctctctctctctctctctctttttttcttttctttttttttttttttttttgacgcagggtctccctctgtctggtccaggctggaatgcagtggcatgatcttggctcaccgcaacctctgcctcccaggttcaagcaattctcctgcctcagccacccaagtagctgggactacaggcatgcgccaccacacccagctaattttgtatttttagtagagacggggtttcaccatgttggccaggatgatctcgatctcttgtccttgtgatctgcctgcctcagcctcgagtcctgggattacaggcatgagccactgtgcccggccttttctctctttttaagccccctccaagggtagccagaaataactgggtgggccttctctgtggcaatctagagattctaaattagcaggaactagagtcaagagtcacttgggtgactcatttttacagaccttttaaaccatgataagcttgttagaaacaaaatcttcaacaacctggttctgtatccttgtagcatgaggaggtcagacacgctggcaggaggagtcctggagggaatttatggtgtcattgcacagtggatgttttatttaattctgtcttccaaccactggccaaaggtagcctacaagctgaggtggttctggatgctaataaatatccctaaagagctctttaggtttcatctaggcttaattacaatgtgtaaatacaaagacagccccattattgatgttaatcctactgatactgcaggaagggagagaacagcaatgaaataaaatacaatggacaatggtctcttattagcctactcaaagaaaaagtgagtctcctgctggctatctgtgtgtgactccaggttaacccagatctgattaccttctgcttggtgtcaggttccatctcagtgctcagtggagttcctggctagatctgaaacctttccacgccatttattttaacttctgcaaggtttcttgctgaatttcagtgaaacctggactcggttaaatgtgacccacattacccaacttttcctagtagcttgatcccttgccctacctcttccaaacatacttaaggcaggtgaattttagttttgtgaagggagcctgccaaaagccaaggggcagtgttcagactttctatttgtttatttattcaacattaattagctaccaactgtgtaccaggtactctacaagcccctagggatatggaattgaatgctgtttcctcgaccttaaggaactccaccaagggagaaaattggacacattgacagataataggaggccaagacatgaagtggcattaaggaggtgtagaagagaaacaagcaactcaacctggaagagacaggtgcagacatcttagtggagttcatagcttaggatgcatccttcatatttggtaagagttaaggaaatggggaaagagaggagctagccaaaacatgcacaatgttataaataaaagtataaagatgataaatcccatggtatctgtggggaactataggattaagaaagtgatggaggaaaagggtcacagtgagttaacagtccttctgtaccaggttctgtttacaaagtagtggtggaacatgtggacactagaggcagattaccttagttccaattctgattgttccatgagctagttctatgacactggacaagtaacttcacctctctgtgcaggttccttaacctcttcatgtctcaatcttcacctgtaaaatgaggatgatgatatctttctcatagctatggtgaaaataaaagttaatatataaaaagtgctagcataataaaagctaaatgaatactagctattattatttattatcaaacacttatgtatcatgtccattattcccaccaaaaatcctatgagctgtgagcatccctgtgtgaattttttttcctcaagcctgttcaactccagcactttggcttttaattgttatactacactgcagttctgcaaacctctgctgacatatctcaaatgtctagccataaagatgggaagagggtgtgagggatgagactggattgatacccaaggctattccttgaggctaaaccacaacttggaaaatggaaggaaagcgtgaaattgcaactaagcaaaaatgtccctgtttcagtcttagacaaggtcttggaggaactcacgaaaaaaaatctgctgcaataacagttgattctacctgttgtctgggcacatttgaacatgttatcttcgaggaactgcttctgatgttaaaaattactaaaaaaatgataaaacagtaaacatacttgtgggcttttcttttcttttagaaataaagatctccttatttcaccagtccttacaaatataaaattgtgatatatcaatatttaaatagacaaccttgtgatctagtgttttataacccagaatattccaggtatggcaaattagctggttctttacttaggatctccatggcatacagtaaaacagcctggggatagagaacccccatatacagcaaatggcttttggtgtttggggaggttaaaaataagtaggagaattgtaaggagaaggtgaaacattctgtctgttctcttgtattatctgacaaatctctaggcatctcattggtctccagttttgcaagaggtaacttgtccagttctttggagcattggaattctgcaaggagttgtggatagctgtgaagtaaaccttgtggctgttaatgattgaacaagagtccatgtagcatctaatggagtgatcattgggtagcttgcagggcagaagcaaagacacagcatttacaagagaaggagagcaattgtttgaggtttgcatgaatttgtctggagacaaacatgcttttctcccttttatgtggaaggtcgtgtttcttatcatctgctcttgatgagtttaatcactacattccattgcagactttcaattattcccccataggaggcggcattggcataagaagtgaaaagtggtttaaggaatacgaactgacaagttttcaatgctgtggataatgctctgtgaaagggagagtgggtctaaaacagacccaagaaagagggctttattttgtccacagccaaaaagttaagaggtccataaaggaagctgctatttatcagtcacctgtcagcattacttggtgattagggcagaattattattattttctttccttctgaggttcctgtcctcctgctcatcccagtgtgtgggaattgccttcatccgtctaggcagatcttacagcatgttgaagaatcacaaggcttggctccatgtggttcagttgacttatgcattttctggtggagcatgtgaaaaaatcactgtgttcctgtctcagtggggtgatatctggtttgaaagctctgtgagagaaactgaaattatctgcaagacacattcactatagcggaaaagaagccatgcaggacacctctgccaatagacactgcgattgcctgttatctccattggaagctgcttatgaactcggtcttacaaaaggaaggggaccgccaacttattcagagatctgaggcctctcaaaatgacccacaggccccacggttagctcagttgttcaatcagctcctattaactttcctgagttgggctgatggtccaagttttgtgctttgtggataaggcaaacgcctgatgcagcttgacgtcacaaagcggtggagaaacacatctgcaggggagatgaactgagtgatggatgttcaccgatgcaggatgtttaactgaatggcattttcttttccataaaatggaagaactcattcagagaaactacggaaacaaaaaaaataaagttatgccttgtgagcaagtaactaggcctcaactcagtggagcatgattaagcatggctgggattttctttcatattctgtcctgcagagcgactgtttgaaaaattttctggcccagtgggttttcaaacttatttagcagggaaccaattttataaatgaaatcttttgtgaaatctcccctactccatcctttagaaagtattaaaacagcatttcatttaacaaatgtataagttcatgtgcttacaaactccatggcttcaaatattgaagttatattgatgaacaaacatttgaaaacaggtgttgtggatgactgttactaattttagaaatacgtttgatgcagtgattagattcttttttcagaactgagactatactggcttccatacatagttccacatcataagtttttcaacagttcaaatttcaatcttaagatatacttcagtttttctactagtcttctttccatactgaatcggtaccagatacacttctgagttctgacttgtgaccctcctgggtttcttttacttcattacttatattacgtattgtctccctatgcacctattctttgtcgctctgataataattatttgcatctctcaataggtgaaagagcaatttaaaggaagtcaaaaaacaggtttcttagtaagtctaacattttcgtcagaaaatacttttgtgcatattatgagattgtgatattttcaattatatatatgtttttaaatcttgcgtattttggtgcctgtcccagcaactacatgaaacagaagaatttatttgctttatatgttgagtacaaacttaactttgaatgtcattccagatattttatccatagtcctaaactcaataacattgtgtcctgtgttatgcttattttgctactaaaaactatattctattttaaggagaaacagaaaagtagtgatttctcttctcaatttaaacattcatacttgcccttcgtgttgatcagaagagctgaacacttcagttaaaaaataaaaatctggaactctctgcccaaataattctaaaatgtctgtgatttgtgaacagtatatattgtattgtctaagcaactgtaattgaaaatggtgctactccatgcaacacacaaaaacagcctgataatatctggggaatagcttttataagggtcacaacattttacagtttttcctgttgttgctttttcaacgtctatatgcagatgtcactgcatttttgccatacttgatcatgtatttgaaaaactaattcagacccttcagaattttttttgcatcgacgtggaataatttaaccaaataacaaatcttcctggtatctctgtatgaccagaacttaccaaagcaaacaaaatagagagttataataaccatttgttttgtttagttttgttttgagacggagtctcgctctgtcaccaggctggagtgcagtggcgcaatcttggctcactgcagcctccacctctcggattcaagtgattcccctgcctgagcagcccgagcaactgggacgacaggcacccgccaccatgcccagctaattttttgtatttttagtagagacggggtttcaccatgttggccaggatgatctcgatctcttgacctcgtgatccacccgcctcggcctcccaaagtgctaggattacaggcatgagccaccgcacccggcccatataataaccatttttgagtgctgttgaattctgatggtctcatataacccagacttaagcaaatttatccagtatgcagaatgtactttcttagctccatctctgaaatacattatcaaatattgtttctaattgtaccgtttaacacaacctattcatcaatctacttatttcaatgacaatattagaggcattaactttttgtctgttgtgggaacatctttcatgtgatgaagccatttatcttaaatgctacaactgcattttaatcaaggtatttgaattatctttgcacgctcttttaaataacatttacatgtttagttgtcccagagaaaatttagaatgtatatttgtgttttatataaaaatgaccttgtgacttggcttgaacactgctttgcataattgtactgcataaattacattgagggtttggacttctatcaccttaaaaatggaaaccaatgaaattgtactgtctttttgagtggctttatgaaaaatactggcaactctactattttatgtactattgaagttgtcactggcactagatgaagaatcgtatgatgttagtatagaaaaaactgccctctcattttgaatctaattgatgctatcacagtcttttttaaaaaagaatttattaaactaatactccatttctaatgtgaataattaacctacaatagacaaataaataaatctttagacaacatacaaagcactttataatattatcatgggaggagctgaaatttagatcagcactgaaattctacaagagtatgttgtatattcatcacctcctggccttttggccaagaacaagtgaagaatatgttgtatgttcgtttgttattgcacagctatcaagtaagcgtaattgggcctgagcctcgcatggtattcaatgggatgtggcctagaggtgctgaagtgtagttagtgtattctctactagaaggctcatgtgtgaaggacaaacacaggtctgagtttttataatgttttctaaagattcatccagaatgttctacttacctatttctgtgttaccaactaccctaaaactttatggctaaaactccaacatatctttattttggtcatgaatcttcactttgggcaggacttgccagtggcagttgtatgaggcgtgaactagagaggctcagcgggggctggaggatctgttttcaagatggcttacccacatgactggtaagatggtactggctgttgcctggaaactcagccaggggacatctttccactccattagggtctctccaaagggttccttgggcttcctcacagcatggcagctcggttttaaggcagagtgttccaaaagacagaagtggaagctaacagtttgttaatgcctcatctggaaaatggcacagtgtcactcctactgtggtctattgtcaaaacaagatcctgcaccagttaaaagggacaagacaaagaccccctctctgccttgggaggaggccaaagaatgtgtgactgtctttaatcaccacacacagttaccactttcatagtcaatgaaccttttgaagacatttcaaatgattacacagggattgcaggggaagttttagaccaaggttaacacaaaaactaattactacaaaattgagaacaaactagatgctaagcgtaggtctagtcgggacatggagatacaagggaaatgacttaacctagaaaaaattaacacttcgtctctggaatgttaagatttgctataagcgcatttgagtatgtaaatttgtttataatcattgaaaaatgaaaatataaatttaaaaggaatgagaataatagaagaatctgcagttctgtgggaggtactatgaaagtaactattttcttttttttgagacggagtctcgctctgtcacccaggctggaatgcagtggcacaatctcggctcactgcaagctccgcctcccaggttcacgccgttctcctgcctcagcctcctgagtagctgggactacaggcgcccgccaccacatccggctaattttttgtatttttagtagagatggggtttcaccgtgttagccaggatggtctcgatctcctgacctcgtgatctgcccgcctcggcctcccaaagtgctgggattacaggcgtgagccaccatgcccggtggaaagttactattttcatgttctcttctttgaaagtccaatttcttttgccttccagaaagaaacagttctgacttactacttattacccttctggggttctttcacctgttcattacttatattaaatagtgtttccctgtgccatctatttattctcttgttgctctgatttaatacacctgtttttcctccctgtcttccttgtttctttcattgaacagctgcttttctagtacctgtcaggtgctaagcacagggctagctgggatacagacacaaggatataggttaagagctttttgtcatccatgcctccctctctcctgctgcattgttctaccaggaggacctagaatagggtttatggtatattaaggtgtcaataagtatgtattgagtacataaatgagagttcagtcttcaaataactcaaaatctaataggagaggcataaagaaataaagctgctgtgctgtgatatgtattaaattggacaatgtagggaaatatgaaggggaggtgggtcaaaatacagcctaaagatgacacacctcagtcctcaacaaattaccacaaaatcaagaatgggcaattgatataattttctatcatggtggtatagaaattgaaatatttattgattccaaataattataggttctcatttggatagttatagttaggtgtcaacaaacgaataaaaatgggactgaaatcttcatataattttaatatcacaaaatatgtgagaatcatatgcctatttttgtcattttaaaatattgtatggtcccacctcattaaataaaatttccccatgattacaacagtaaaataatcttattgtggaaaatacatagggtacagaaaagtacaaaaaaggaaaataaattgtgcagaattttaccaagagataattatgttaacatttattataaagtgtacataatatgtaggtattcatatggaaaaaagggaatacaacttttagaacataatgcttgtgcagtttttaaaaaattcctgtctttcagttaaaattttatcttcagcctttatttgtgaaagttttcaaaaaaaaccataatttctcatatctatatgattccacatttaaaatttctgtatttagaacaatctctagtttttaaagtttacatagtgttcagctttttctccacccccatccctaccccccgcccccgaaagagacaaagtctcgttctgtctcacccagcctggaatacagtggcacaatcatagctcactgcagcttcaaactcttgggctcaagtgatctctcaccccagcctcccaaagtgctgggattataggtgcgagcaaccaagcctctcttggcttttcattttctattataaataatgccgtgatgggattcccttatgcggagatctttgaccatatctcaattatttccttagagttgattgctgtagctggaattttcttagctgtgaccaccccggggctcttactctatataggcatattgtttttcagtggtttacattaaaatatctttccatattggcaggcaactggagaaagtttaatcagggctggatgacttgctgcttttgttttgtagggtcactgctttggctttctttagaaattcactgtcacatacacgcacaggcccacccacccacacacacataccagcatatttatgggaatttataattttgtcctttaaaaatgcctcgactagagtgcagatgaaaagttttatatttttaatgatgccagcctgcagcccaaagtatggacctatagaagagtattgtaaggagggcttcccagaagagtagccacttctggtaaatcacgaggtttaatcaggaaatgatatggtttggctgtgtccccacccaaatctcaccttgaattgtaataatccccacaagtcaaaggtggggtcaagtggagatgattgactcatgggggtcatttcctccatactgttctgatgagaacagtatgaataagtctcgagatcttgtggttttataaatgggagttcccctgcacaacctctcttgcctgctcccatggaagacatccttttgctcttctttttctctccaccatgattgctaggcctcctccaccatgtggaactgtgagtccactgaccactttttctttataagttacccagtcttgggtatgtcttcattagcagtgtgataacagactaatacaggaattaccaaagaagggaactgaaaaatgattgtagagacctgtttaggaatacaaacttggatatcaggagttattacatacaatgccagtagtattctctgcttttttttttttttttttttttttgagatgggatcacactctgtcgcccaggctggagtgcagtggcgcaatctcggctcagtgccagctccgcctcccgggttcacgccattctcctgcctcagccttccaaactagctgggactacaggcaccagccaccacgcctggctaattttttgtatttttagtagagacggggtttcaccgtgttagccaggatgatctcgatctcctgaccttgtgatccaccctcctcggcctcccaaagtgctgggattacaggcatgagccaccgcacccagccgtattctctgctttaaaaagggatttgttgtggattgcttttgaatcatgagtttctgttattccctgcccccttccttcttcccaactattcagggccatgttaattatgtaacaagaggcacactagtcctgagccagaggtaggatcttctctgtgagatgccttcatctcaggcagcctccttcacaaggccagagactccatccagaattagaccgacactgcagataatgtcattaccctaaggattacagtacaacatgatgacatgatggtgcatttttatggctagatttttagatctgaaatagacactaagaatgcattagatccaatattctgccttaggcccttatttaaaagattaatattcttgttgtatgagatagctaagaggaagtgagtctgtggattactacacacacacacacacacacacacacacacacacacacacacacttatgggaatttattattctctctatacacacaacacatgcatactttggctatacataaatatacaaaatattcttatattgctaccccattggaaggatgctgatatgagctgcaaatatattacttatgctgctaagtacctattgtagaacaacttttttttttcctttttgagatggagtctcactctgtggcccaggctggagtgcagtggtgtgatctcagctcactgtaacctctacctcccaggttcaggcgattctcctgccacagcctcccaagtagcggggattacaggcacccaccaccatgcctggctaatttttgtacttttagtagagacaggtttcaccatgttggccaggctggtctcgacctcctgaccgcaggtgatccacctgccttggcctcccaaagtgctaggattacaggtgtgagccaccacactcggcctagaacaactttttatagtaatgagtgggcccagtgatacaaaccaaagctgatttctgtaagactgtcagtcccctaatggaatctcagtaacaactcccaccttgaatgatgcatgtcagcaattagtaggacaaaaggcatctggcacttttacatctgtgtttaaaaataacccttgttatttcctctaggttttaaaatcagacttgttccattatgaagagacaatcatggaacctaccggttgcctcttggtggacacatacgacattctctgtgtggaatgcagcctggattttctaggcacaattatcttagtttgcaggtatgcaattccagcaaacatacaattcatgtaatatagcatattcaggaaagctatgctatgtgttcttacattctcccaggttttgggagctatagaaatgagaactcattagctatagtttttgcttcattatgtgctatgtgggctggagacagttgctcacagtgagagagacaaggcatctaatggcccaaaagagtggctgtttctcaaagcttcctaaattagtctcaggtaggagctttcccaggctcctggtctgacacagtaattaaaggagactgggaagattcactcattccataattatttttagttccaatacggtctgaccttactaattcagaattattgagagagatattagtttggcttaatgagaagcatgaaaaatgtaacattttaaattgaatcatggctttattacttagggctatattcaaaaccacaaagtaatagcttaacaccttttgtggtgatgctcctgggcctgctttaataatgagataggatgatttttaatttgctcagggccgttcttgtccttggcatacaaattcagtggtcttcgctgtgttcatttgctgtgtaacacattttttaagatttatgtattcttggatattttttccttcagaatcataattgtgacacattactactgtaagaacccaaaggaaaggaaaatatatgaagaaagaaaagttaataaattccttctctttcaattcaaatctcacatataaccaataataacagattggtgtgaatccttttagagccaggtttaactgcctttgccggagaacatagaagatgcttaataaatagctgttaagctgacttgaagcaaatacctgcttataaacagtttatttcagctgggtgcagtggcttacccctgtaataccagcactttaggaggttgaggcaggcagatcacctgagggcacgatttccagaccagcctggccaacatgatgaaaccctgtctctgctaaaaatataaaaattagctgggtgtggtggcacgtgcctgtaatcccaactacatgggaggctgaggcaggagaatcgcttgaacccgggagacggaggttgctaaatcgtttatttctatctcttacaatgtcctacttccttccttcctattactcctatcccagattgaacccccatgtctttgcttataagtagattactaaaaagccttctaccaggcttcttcaccagcaaacttgacccccctctgttctgtatacgatgttggagtaattggtctgaaacgtgcctcatcctacatttccctggccaagagtcctcccattgcactccccactgcctaaagaggtaatgacatttcattttagagacctttacatctggcaccagcccaacataaccatattccctttacaacaatccctgtcacacatcttaaattccaggcaaactacacgtttaaaaatgccttgtctacactctgccccttcctgcctctctgcctatttttatgctgagcttcattttgggattcaatttaacattaaggagctcctctgttcaagacttgggctagtcactccagagactagcctggtagtcattaggaaaacatttttattatccttcaacccaaagtggcaagatgtcaagaaatttatacaaaaaaattctttacatgatctctattaaatctcccactatttttgcttctacaaataacatccatcttctagtgttctctcaaaatagtcactgatatcttcctttcctacccttccctaaactggcattgccccttcccctcacccctagtctcacacttcatacttggcctcatattatatttatttgagcccatatgttgaagagtatcttagatatatgaatatcacttattatcttgtatttatttgttcaatcttcttgcctgtaaaaactaattgaaacctccattttgtgtaagccaggtattagcttgaagcatacagaaattcaggtttgaggtaaaattgactttttttttttttttttgagatggagtcctgctctgtcgccaggctggagtgcattggcacgatctcagctcactgcaacctccacctcccaggttcaagcgattcccctgcctcagcctcctgagtagctgggactacaggcgcgtgccaccacgcccagataatttttttttttttttgtattttagtagagacggggtttcaccatgctggccaggatgatctcgatctcctgacctcatgatgcacacgcctcggcgtcccaaagtgctgggattacaggcatgagccattgtgcccagccaaatggactcatacctaaaaatcttcccaacatttcagccggttttggggggaaagatgggagcatgttctcaggaccactttgacatcaactgctgggtgtgcattgcacacagaaggtacaaacttctctctgttttttacagtaacaacattttaaaaaattatttatttcaaatcattgttaattctgcggacttaattgctgatggggagagggtgatgtggtgtcactgggagtacagttttctgccctatcataggtgagttctccccttctcccacttctctgcttccctcctcacctgattctttctggcttgcccctagaaaccccaaactttccctcctgtgatgcctggcccagctgacatctgctgagatttttttttccaaacaacaaaccatgatccaggtatattttcaaccaaatccaatgttactcttaagaagaattctggtatcagttattaagataataaaatttccccttatcctgttacacttcagaaatcccgttttcatcatgaggaagtaaatttgagcccagcccctggctgaatttgtaaaacctgaattaaggaggtataatctggaggctagtgcctgatttggaaactagaatggctcagaagtccctgaagctaaattattgtttgccagagccaagcttctgctggtgcaaatggaaacagtttgtcttgtaagtcaactcaaagtgatttctcctctgacaaagtgaagagatgagagaaaaaatgtgtaccctgaactccagaatcctgtttcttctgtgtaatttaaggccagggactaagcacgttttcttaaatgaaacaaatggtgctataaatggtaatagcaaccatgcatcttcactttttgatgtggctctgatgagctcctgttaatgaaacaggacacagcagatgcaaaactgtcagagtagaagatggaaaatgagattccatgtgaaatacagacttcagtgcccagagatctgatcttagagaagacaaatgatgtttgcctatttgtgtgtgtgcatctgtgtgtgtgtatgtatgtttggtggtggcagtggtgtgtgtgtccatatttgccagtttatgtgtgtgtatgttcgtgtgtgtatgtttttagttgttagaagtgctgggcattacctgtttttttccattaaacctgaattacgtaaatctatattttaatgcaggctcttggaaggcattttaggacctgtcttcatttggcaaaatgtggtactttagaagttttcttactacttattcctgaagaatttacttagagtcacctctgaccaacctcagattccaagaattattcagcgccaaacttctgtagtcagcaacaaatgggagaactgaaaaataatacaaggacatacttcttaattgctcatttcttgtctttgcagtctgattctactctagagactgttagctttactaaccacagaaattaatctttgcaaagtcctaaacttttggagctcagtgtatcagagaggttatttttagaggagatataaccaccagttttttaaaatgaggtattggtgtgtgtatgtggtagggggtggattggaaacatttcgtgctaatgaataattcagtttgatttactggagaaatgaaaggggatggcattctgcccttctcttaatgtaaaaaagataatagtggtttcgcattaactgtatatctgaaagtatctaatacagcttatttttgttccaggtcaagttgtcagcctttaaaatagtttaagactggttgtcatgttaaagtgcacctttaagaataaaaggagtgtgagatgaaattgtgccatttgctccattatcccacccctacctaggtctccttgcaaaaacaaaatgtgtttcttaattgaacatcaaaaaaatgaaagaagccagaggttgggagtcctcatgacaagaaaggccatcgtgaatgaccctagtagttcaggtaatcaagccagctgtatgagtgctgttattttgacactgcaaaggcatgagctttcagaagccgagcttattcttgtagctattattttgcatgaatagttacacactacccttagctcaggcacttttaaataagaggccaacgaattatgtaaaagcagcggatataaacatgtgaatgtatgtattagaatatgtttatgaaattatggggcctgacattcgcacaaggaggctttgcacattaagcttctcttcttctatttgcaaggctgctcgtctgttgcatttaagtgaggtcttctccttaattagaagcagacagtgaacaaatctgctgaatctgggaagtaaccagaatatatggtcacgaatgcaaagtccttcctctttcctctccctacccatgcacctcccactaggggaagtggccatttgagagggcggttactgggaggtggtggagaaggagcttgggagacagtggagaaagaatgctacttagtgtgttggagagaagtggttcaccaaggagaagcatggttttgaatttatttactgtcttttgttgttgttgtttttctgcaaaatggccaggttatactcttacccttgaaaccacagtgtctatataaacattttaggaaagccattagtagaggagtatatatttctctcatttctgatgctactttgaaaggtttcctaagtaaaggaaactctgtctggtcttgtttatagttttccttcagatgacttgcaacatggcttctatgtggatgagtgtaacatgcttagagatgagatgaattggggcagtgttttactgggggctgagttggggagaattgttctgtagcagcataagtaatttagtatagtccagatgttgtcaaagagaaaagcatttggtcaaaataagagaatctgtggcagcagtgaagtgtcaggagcatatcaaagctgcaagcatgggaaaatgagttgtaagttcagaggcagtgacagtcagggacacagaggtgagggcaggcacacagagtgtggctcaggggacaggcggagttcaccaactatttataagacacccactgtgggccagacaaggtgctgagtctaaaggtaagtaatggatggttcttgccttcaggggagttaaaattaccaggagaaagaatatcagagaataatttaatgtggtacctgccttggaatggcagcgctatatgtaagggcttaaaggaccaggctaatctggtgcagctttataaagaaaaaaaaaaaggatgttaaagagaatgttatgcagtcctcctacctctttccttttccctaaatgaagagaaaatccaagaaaaaaatagcaatggaaattgagtcccatatgtttctcttgtgattttagacatatttcctttcatttttagaaaaaaaaacatggatattactttataactgcaagataggcactaagcaaggtttcctgagtattggaaacattgagtttaagtctcttacaaattgggctgtctcatcttcccaaagagtaccagcactaatcacattatgcaggcgacacactctggtcatatcatccagaatgatcagcacttttcttgcctgctgtgatatcattgggatgcctcatttgcaaatgggaaaattgtagggctgaaaacaatatgcttctgatttttttggtacgacgaaaggcaagtggtggtcaggataatgtctgagagaacttgtgcatttgactttcatgtgtggttataactgatttctaaggatcctaggggccaaggttgagctcaaataattcactggtatagggagaaaaatgtgcctcagcagaaaaatatgcattttgtctgtagcatacccttctggtagttatctgattctatgaaagctattttataattatttaaattgtagatgaatgatagcagtgcaaaataatttttagctatagacaagtaaattctgttcccttgtatagaggctcagttgactcccctgaccccaggtagttttgcctgcatttgtacatttcatttctacattctattttttttttttttttttttttttagatggagtctcgctctgtcgcccaggctggagtacagtggcgcagtcttggcttactgcagcctccccagttcaagcagttctctgcctcagcctttccagtagctaggattacaggccaccatgcctggctaatttttgtatttttagtagagacaggatttcaccgtcttggccaggctggtcttgaacttgaacatgatcacagggtggtcctgatctacccgcttcggcctcccaaagtgctgcgattacaggtgtgagccaccgcacctggcctcatttctacattcttttaatctgtaaaaagtggtgctttttgaacttctcctttgactggtcacaacatttgccaggttcccttgttataagtaaaataaaatctttgacccaaatcctttttatgcctgtatgaaaatcatgattttgtttttttttaaattatcacttagcattgtattattattgttgctgctactgtcactaccactgctgctgcaattgcttactgtttctaccatgacgaatattttttgagcaatgtcagtgctcaacttcccatgtagccctaacttaggaagaaaagagcaatttgatgcattagaaaagcaacacttcggataacttttatgaacatgtatctcacccagtgaagtgaaggcaaaattccacagccacgcaggacgtttttttccccataccttcccaacttgtaggataacctgtgggtagcttcactttgataatccatgccagagcatagcagaaaaaaacaaaacaatacaacctgctgaacaaatcccgttacttttcctgcccatccagacagatgtagtacctttttattcaaactcatttctaaggctgttcttctattctctgttaccctgttcttactttttttttttttttgagatggagtctcgctctgtctcccaggctggagtgcggtggtgcgatctcggctcactgctagctctgcctcccaggttcacgccattctcctgcctcagcctcccgagtagctgggactacaggcgcccgccaccacgcccagctaattttttgtatttttttagtagaggcggggtttcaccatgttagccaggatggtctcgatctcctgacctcgtgatccacctgcctcggcctcccaaagtgctgggattacaggcgtgagccaccatgcctggccggctgttcttactttttaactgctaatatccactctcctgtatgttttattttccgacgttcagttattactaatagtcattctgttgacaaggtttccatttaacttttatgaggaaacggatagattcactttgctttctatgcagaaacggtggaagggcaaaatacattttggtgcctgcctctaggaaatgtcaactcttaagccagtttgctctcaatgagttattgcctcttcatcttctccttctcttcaaaaatattcagcaccatttcagaatgttatatcctgagttgttaaaccttcaccagtattttcacattcaagtaatgctaaatagcacgtttgccagcaaaatttaaattgaatctgaaccattacttttacttcagggcagaaacagctcagtggcatatacttctgtctgaaatagttttaatcaactgctaaaatcaaaattgccatttaaattgatagcattttcaagaacaaaatggtttcagagtccttttccaaactgtctgttggcttaaatatgggtcaattgctatatttgtgtctatgccatccttatttgatacttctatggtataatcctatttttttaattcccggattacttagcactgaattacatactgaatagtaacatatactggtagacaaacagatacctgattatattactttctttgactcctaatttttaagacattcagcatattccagacagatttttgtcgtgctgtagtcattttacataaagagctgaccccccaaaaatcaattttgtaggtaagagaatttcagtatcatgcaggtttcctgaaagtccttgggactagatttaattagttttaatgggcttgtattaatagcaaagtgggtttattgtttttactaagaccatgaattatgaatttgtttgcttctcattttcttttttttttttttttttttttttgagatggggtcttgctctgtcacccaggctggagtgctgcagtggcacaaccttggctcactgcagtctccaccttccaggctcaagcgatcctcccgagtaactgaggctacaggcatgggccgcattgcctggctaatttttggtacttttggtagagatggggtttcaccatgttgcccaggccggtctcaaactcctgagtcaatcaatctgcccacctcagcctcccaaagtgtagggattacaggcatgaactacggcacctggcctcattttcccttctatatatgaaaatttcccttctttatgttacatccttggaaaaataaaatttactttgttgcttttcaacttttaaaagaatattttttttccctcatgtatacattcaaacaaagtgttgacagtttcaactgtgaacactggggcatgatactgtacctgatttgagctaatacttgttacagaatgaataaaatactatctagtttttagctttaagaaaataagtttttaaaagaaattcctgcatactcttctggaagtcaaaaattctaattcagagttcagcctctatcatgtcctttgtgtccttgatagttaagtcatgtatctctttgctactcaattttctcacctgtaaaatgggactgataaaaagtagcagggatgctttgagagtgatattcaagtgtgaatatagtttgcactgagatgtaataaaaaccaccagtgcagctttgtgtaaagctgatgtcacaaacaagtgaggagtctactgtcagagcccatgcacaaagatttcctgaaaagacatgtatgggtagggtttccagccctacttgggcatctaaagagttgcttagaatgttgactcgagatacagtatctaaacctgacatgaaagccctgtaagaaattagccaggcccggctgggcgtggtggctcatgcctgtaatcccagcactttgggaggccgaggccggcagatcacgaggtcaggagatagagaccatcctggccaacatggtgaaaccccgtctctactaaaaatacaaaaattagctggacgtggtggtgcatgcctgtaatcccagctactagggaggctgaggcgggagagttgcttgaaccagggaggcagaggttgcagtgagcctagatcgcgccactgtgctccagcctggtgacacagcaagactctgtctcaaaaaaaaaaaaaaaaaaaaaaaagaaagaaagaaaggaagaaagaaattagctcggcctggtgtagtggtgcatgcctgtaatgccagcactctgagaagctaagatggaggattgcttgaggtcaagagttccagaccaacctgggcatcatagcaagatcccatctctacaactttttttttttaattagccaggtgtgatggtgtacacctatagtctcagctactagggaagctgaggtgggaggagcactggagcccagaaattcgaggctgcagtgagctgtgattgtgccactgcactccagtaccttgggcaacagagcaagactccatctcctaaaagaaaagaaaaagaattagttggattttagagtggactagaaaaagggggtctgcaatatagatcattaggaactacctataggttttccatcttggaaaaaatgttagtaaatgtatggtatttttttactctgtcatgatctattgcttttaagtccaaaaccagcctctcttttcctggcttgagcttatccagaagaccactccacttcctcattctcatgactaggagaggaagtctgagcactgtgaatattgggacgaatatacggaagtcaggggctcctttgtccaccatgcctgtgcttttaagctcatgacgaacagtgcttgagagaggtgtgtaccgagaagtaaatacaaacaagcatccaacagcctgtccattgtgatcctgtgttgattgctcagtcttcacctttttattttctatatctctcttcactcttaagtttttgaggcaatattcacaacgagtcacattataacatgcaaagtttaattgcataaaatatttcgtctttttcagatctgtcactggtggaagtggagataaaaaagatccaaaagagtaatttacttttacgctcagaatcagattctaaatgtagaaattaatgagacgtttacatagttgtaaaaggaagctgcaaaaggaaaatgcaaaaatgactttatacaacctcaacttcatcctccctcttcttgtctctcctctttccttgtctgtctttttctctttactgtctttctccctattcttttccctttcccccttctagtgatttttgtaatgtaccggggagttaaaatccagctctgctccaggagtaataattttttaatcaaaaacagataattattagtgatattcaaagccaaaaatcatggatttacccattcttggttctgttgactctgtttcaaaaggcataactacttttgtcagtgaagctgacaggcataagtagaggactcacatggagaagatctgttcagagaaaatcagttttcaagtaagaattgcccactataattgagatctgtgggctttcaaacatctcaggccagctcaccagttaaatccaactagaagtgctctcattgttttatgttttagtttcatttatttgaggaatagaaaggccaggatgtgggtgtcatcttcctatccagcttgtcaaacatgtcactgtggggagaattactgagccatttgacttctgcaaccagaaaacatgaaagctgaaataacactctggctgctagaacacgtgctgaataggcactggtgtggatggaaagctctcctgtatcccgagggccttccgtgtcaaatataaaatgtaagtcgaaggcaatggaacataaagttctatgctgtacctggtatttgacaaatgggtgaacataagcataagtcagattagttagtatcatggaatactgaacaggtgaaaaagtggcagctttcttttcaacatgatgtggaagaactgacctccagtaaccaatggctaggcatgaaggttcctttaagcaagattattttagctgcattataactgtgaaatcacaaatttaaaatcattcattttgcaaaagagtagtgtgcctcaaataaaagaagtatttatacattttcttaagttacaacctcttttaatgagattttattttaattggtggtttttgtctgtttaattttaacagtgtactcacaatttttcagaagtagaccttatgcattaactaagtaaatgcgatgcaggtagaaatggaaaatgggagatgtgaaggtctacattttctccgatctccttaagtcctgtcattcttaattacaaacgtttggtccccatttgcccttgtgatttgtactatcacacgtcatgacaaaaggaccagcattcgttctgaagaaagaaaaagttggctgggtgtggtggctcatgcctgtaatcccagcactttgggaggctgaggcaggcagatcacttgaggtcaggagttcgagaccagcctggccaacatggtgaaaacccatctctactaaaaatacaaaaaatagccaggtgtggtgcctcacacctgtaatcccaggtactcaggaggctgaggcaggagaatcacttgaacccaggaggtgaaggttgcagtgagccaagatcacgtcactgcactccaacctgggcaacagagcaactccatctcaaaaaaagaaaaatttgaaatagcagtagacttccaaatctgttagaaggccttgtttttagaatagggcaaatgtttgctttagtcagagcttgactggatgagatatgttaggagagtaacagtctcctcttgctacttgtttctgagcaggtaatctaaaaaggaaagccctatactactccagaggtattttcattgcaaaagaaatgtttccaaggtggcccttctttgcacctgttcaataaatgacctttaacattaacagcaacatgaatcaggctgaattaagaaaacatgggtaggccgggtgtggtggctcatgcctgtaattccagtactgtgggaggccgaggcaggtggatctcgaggtcatgagattgagaccatcctggctaacatggttaaaccccgtctgtactaaaaatacaaaaaattagccaggcgtggtggcgggcgcctgtagtcccagccactcgggaggctgaggtgggagaatggcatgaagctgggaggtggagcttgcagtgaaccgagatcgcgccactgcactccagcctgggcgacagagtgagactccatctcagaaaaaaaaaaaaaaaaaaaaaacaaaaaaaaacagaaaaaatatgagtatataaagagaagttctgctttggaatggtttatataaatgtatataaatgaagggacacagtgcctgttgctgcaaccagaaagccctatgcaagaagggggagaggatgaggattagaaagtagaaagactgctgggaaaactacattgtgagtggaccttaaagtgtcaaaagtgccctgctgaatggaaacaaggaacagatcatgcttgaagatggctagtagagaaaaggagtgagagttaagttcccatacatcaagtttactgctgttagtggacctggcagaatcaaggtactaccaagggagatagacagcctcgaaggaaattttaggaaaggcattggagtattcttttttttttttttttttttttttttctgaggtggagcctttcactgacacccaggctggagtgtggtgatgcagtctcagctcacctcattctctgcctcctgggttcaagcgattttcctgcctcagcctcctgagtagctgagattacaggtacccaccaccacgaccagctaattttttttttttttttgtatttttagtagaggcagggttgcactatgttggtcaagctggtctcaaactcctgaccttgtgatctgcctgcctcagcctctcaaagtgctgggattacgggtgtgagccaccgtgcctgggaggcacttgcagtattctaacaccatttacattagaggaaaaaagcccctcctagggacgtttgatccttgtctcatcagtacaagattctattttatagaatattctctaccactttgcttagtatactatagttttaagtgatgggacttctggctttttcccctgggagtttattacaaattctgaaaatatttcagtgttacaattgtgttaaaaagtcacattttgagacctgattttttatttattgtagagcattgcaaccatttatagtgctatatgagtgttaaatattaatgcatttttcctactctgccaattcccaggcatcctgcgagtgtataattctggaaaggcagtcaaaagatttctaggagctgtcccacattagccttaaaaggtgaccttcttgcagaattctaaaaaaaaaaagtaagaatatttactcactttttgacccagtagcttcctggataagggattctttccagaaggaggcagattttttcagacgctaagacgtccaactgagagactgctgtaattctcaaccctctaattccaactaatgttaagcagtcttaccttagccagtggtagtgagagataatatatttttcatccaccagccttcttatcagctgatatatgaatgctgtccttcctctgttacacatctgaaaaaataacaattttaaagccaccaacgttttagaacttggaagtaagtggctagattcctttgctccccaggtggaagtgagtatggcatgactctatagaataaagatgctgtccaaagttggcaggtgagctagcgatcaacgtctgcctttcccactacttctgttgatggcttaattggtcacaatacagaaaagtcacagggcatggaaagaaatggcagattgatagcttcctatattcttctgtaatatagtgagagagaggaagatgagtctggtgaaatggcctttactataacagggtcagtatatttctgtttttatcaatttttgttaaagttggccctgagggaattcaccttggataaattcagaaaagaaaagaaaaatcttcctaggacataagtgaacaagtgattttgtaatataataaaaattattatcttatttaaaatagggttaagaaagtagacagaacttgaaaaagacagggttgttattttaagaaggagccccagagtgatagtggaacagcttattaccaggttttctgcaggtaataattataaattctgaggaagaagaaaaaaatctttgagggcactggagagggatcagcaacagacagaaactgaatgggttttaatccatgaaagaggagaacctcagtaggcgggaactatgtttatacagtttctcccctgagggcactgcccggtccgtaaggcattgggtggctatgcgccaagaagagagctgctgcacacaggtgtccatgggtagaacgtggggcttccagagtagctagagattgtggagaagtcccaagaatgaagaagccatggaagttagagcctcaaaatctgagtgaaatacttgctgattcctgaattctaaggagcaggtagaaactactgtcaagactgaaagagctgagagaggatttcagtttctgatcactgcaggggaaacagactttggagtttgaattctgccatcttagaggagcttagtaagtagctgagccttccatgaaaacacactttacaaataaagactatgtaccagaataaaggaattttccagaagcctaagtgaaaatccaaagagtctcatccaaagaaaatgtaaagctaagcctctgcatgttccaggttatcagccagtaattttttaaaagcctattaggagtgaaaaaattattcagaagaagaaaagatccagttccctgcaacatcatccgtaaggttcgatgaacaatcaaaaattactagtcatacagagaaagtggaaaatgttacccattgtcaaggaaaaaagtagccaagagaaaccaacctgaagatagcccagttgttagagctaacagcaaagacttaaagcaactattgcaaatatgtttaagggcttaaagaaaaagatgagagaatagatgggggtcacagaagagaagtggcaactctcatgaaaaaagcaaaataaaaattccagaagtgaaaacatacgatctaaaatgaaaatatttattgaatggacagagtggagactgtgtaaggaaaggtcattaaacttgtagacgaatagaaattatccaatctgaggaaaaagaaagaataagtctcaaaaaataagcagagctttagtacctgtgagaaaaatatcaagcaatttacaatctgtgtacatagagtaccagtgaggaaagagagagatggggtataaaaaagttacacactcacagacacacacacacacacacacacacacacacacacacacggttgtatatatattcttaagaatcaacttcatattaggtaacagtcttgtctaaaataaattatggaaataatgaatattttagcagtttgactatggtatggctaagtatggtttcctttatatctagcctactttgggtttgttgagctgttgagcttcttaaatatgtaagttttttaaaccaaatttggggatttttatcatttttttacacgtgtgtttgtatatatatttgctgtacatatgtatgtgtatatataggttatacatatatgaatatacatgctgtatgtacatatatatcatgtatatgttaaaagtttccaaatttgttttcaaaaaacttaactcatttaagatagatatacaggaacccacatttagccatatcgtaaactgctaaaacatagtattcattgttccacaattcatttctgacatgactatcacctaatatgaggttgattcttaacttttaattgttacatcatgatcaccactagaacacaagcatgtggaaggagcttactagatctatgaagagatagacaaggattgggtcctgtatcttacacttaatgactgaacccttggggaaaggggtactctgtgtcacatattcatcatctataagattgccaataaccatagggctgttgtgaaagcttaaatgagtccaggctcggtggctgatacctgtaatcccagcactttgggagaccaaggcaggaggatcatgaggtcaggagatggagaccatcctggccaacatggtgaaaccccgtctctactaaaaatacaaaaattggctgggtgtggtggtgggcgcctgtaatcccagctactcgggaagctgaggcaggagaatcgcttgaacccgggaagttagaggctgcagtgagccaagatcgtgccactgcactccaacctggtgacagggtgagactatctcaaaaaaaaaaaaaaaaagcttaagtgaaataatagtacatgaatagacttcacgtgttgtcttgaacatagctgacactctgtagacattcatttcctttcctatttccattcttttcttcaaggcatttagagtgcctttaagcgtaattctgggttttctatgtagcataagacataaggatatattttataagagaaaaaatacacttcgtaatttcaaatcaacttcaacttggtttataacgtatttcatgtaatgtttccactcaaaagtcattggaggatatgcatggcaatcacagaactatgactacatgatttgctcaccctattttatttattttttatttatttatgtattcattttgagatggagtttcgctcttgttgccctggctggagtgcagtgatgtgatcttggctcactgcaacttccacctcccaggttcaagcgattctccttcctcagcctcctgagtagctgggattacaggtgtgcaccaccatgcccagctgattttgtaatttcagtagagacggggtttcaccgtgttggtcaggctgatgtggaacttctgacctcaggtgatccggccacctcagcctcccaaagtgctgggattacaggcatgagccacggcacccggcctgcttgccctatatttttcaacaacttaatgagaaggtggttcatgtttactaatgttttcatcatattcctgtgtccatgaggtttcaggattgaaatcagctgtgaaataagtataaaagtgtgtgtctataaagataaaatttaatttcatgctctttactaccacatgaatggtggtgataatagtaacttttacaattaagaatggtaggccaggtgcagtggctcatgcctgtaatcccagccctttgggagacccaggtgggcggatcacgaggtcaggagataaagaccatcctggctaacacggtgaaaccccatctctactaaaaatgcaaaaaattagctgggcgtggtggagggcacctgtagtcccagctactcaggaggctgaggcaggagaatggtgtgaacccgggaggtggagcttgcagtgagccgagatcgcaccactgcactctagcctggatgacagagcaaaactctgtctcaaaaaaaaaaaaaaaaatggaaatcactatttaatttctgagaaattaagtttagctctgtctaaagtcttgcaaaggaatcagaaatgctttagacatctgttgggcaatttccttgtgagtaaataagcttgtgtccgtgggaaatatgtaaaaaatataaactaatcactcttacccataagatgccatgctatcttcctaaaatccgactttctgattattgagataatacttcagtaggacgtccttgtctttatggttcccttttataattgactaaaatatgtcagccttttaaaatatgtggttcaagtcctgtgatacataacgtgtattgttaacttccattaacccaggaattggtaaaagccattagttcctgcatttacaattttttaataactggcttttctttaaaatatttcaccagctttcttattaattatcaccctacttctgaataccaagttagatatgacctttacaagttgccattaaggccctagacaacttaaaggtaacaagaattatgctgtttggtcctcctgctagaaaatttcccacaattgctacggtttaggtgatttaggctccagttttgctggtgctgctcttccgtgttaagttcttcaatttagtgttttgtagtaaaatcagacacagagatggcagcgtatgtttgaacttaaatctttaccagggaacactattccttagtgttcctggctactattcctggctacaaaataggggcaaaatctggtttcagagaccatgggcagtgttgcttacgggacctctaatagtgaagaaaagacaaatagctccttgggaaataggaagcacttcttacttagatagctgactcttcaattattgtatcacagaataaaagcaaggctgatagggtcctcattgtcctgtggaaagagaagaatgatttcctctgattttagaattctacacattaggttgtctactacctatgaggtaaagtatataagaaaataatactagagtgtaactgtaaataatacaagcaactatatatatatcagaatattatcagttttaaatttacccattaatatgttgcttccctagtgttaatttctaagaatagaaatatgtatatgtatatttatatatagaaatatgtatatgtatatttatatatagaaatatgtatatatatttatatatagaaatatgtatatatagagaaatatgtatatttatatatagaaatatgtgtatatatagagatgtatatatatttatagaaatatatatatatataacctcctctgagataatgaggaaataaactgtatattgatgccaaaataaatatttaaaaatcactcatttgcatgtctttttttttaagcacctttggtatatcattcatttgatcaacagttattaaatctctgtgccaggaagctaggcacttgtgatataaggtgaatatagtaagatctctggtatcaaaaagctctcaataggctgccttcaggactaatcaggtgttctttatttggttattttcctattcttagaaattaacactaggggagcaacatattaatgggtgaattttaaactgctaatattctgataatgttggaatgcagttttagtaaactgcagccagcaagccaaagctttgttatttctagtatacttaatcatcctggctgtatcttttacctgtaatagtgattcctttaaggaactgagggcaaagtcaaatccgtaagaaaaacaaggcaacagagtttgtcttaacggttgaatgccttgaaaagatattgttcttaaatgttgagttcgaatagatttctggaaatggtaatagtttggtgaaagacatgtgccccctactcccccttaaaatctaaaccagcttgtcatccttgaaactgggcacagttctctgtttacatttctgcatttcacggactaacatactgtgaaatctcaagctaagctgtcttggctaatgaatatacagtatgttgaaaaagtatgatccttaccatggaaggcagaagtacaattttgttagcaatttctgtatgtcaatatttacttagctatatgtatatacacacacatacaaattaatattatccttacaagtcagcacagtgaaaatcataggcatcaagtcttggttgagtctaaagattatattttctttgactaaatttcagtaatggcctatcttgtggttaaaggatctaattcaaccttttctacacaatctaatcgaagactacgttccaattttttaaattatacctgagaactcctaggtacctaaatccttaacagaaataattactgtgcctcggctaatgtatggatgcctgattcttggtgacctggaacttggaactccacaaaaacaatgaaagtcaatatgtttgaatgggtgttggggtcagaaactcaggaacccgcaatggatgttttgtgcttgcactatttcgtgggcttctcttaggagatccatgaagacttcaaaccctaatagacaccaggagcatcgagtagttgggaggacattcacaggaaagagggacaggaagaacaaacaacaaaacagtctgttatatgctccttggcaatgtgatgaggagccttgtcctgctttcttcttttggatattggttattttcctgagcacggccattttttagtatgcctcaggctattgttggagacgagaaaaaaaatcctcaaagatgaaaaatgcagttattcttttgagtcctctgagattataagtacccaagggaagtgattacatcatctgcctctgtgctctattttgaaagaatgttggttgtatgagaaagataatctgcatctttataattgaagttctttacctagagttaaataaatgaactttagaaagttgtcccagcattttgtttgtagttggtgtttattagaagtggtgtatgtcgcatccatagctctcatcagacactcaaaaaagtttttaacctcaaaaaagagccaggtgcaacaagctcagcactcacaattgcactagaattcagatttaattactctcccaaagaaagcatttggacagactcctggtggcagacaattaccacaaatgcattcttgcaaacagattgaaactcctttagctttcagtattcagtgttttcagcaacatttccttcctgttgtatttatttatttatctggagggaggggtaagtgttaagcttcttgcatactgacaacctaaacacattttctataacactacactcctggaaaatagactttctgagtcattcctatctaaattgtgatctttttattggttcagatcccttgaaacttaaggaattgcttgcattgtgtcacccagttgtttttttttttcctcataaacaaatgaaaccttcagttcaaagttcaaggaatcaagcttaaacgaaataaattaaagccccctggggaatgagtgttgaaggagaagaatgaagaattgatgacctgttaacagttataattctccactttgaattattgacagcatgtgacattataaccttacaaattgcaatctataaagcttagaaaatatgacctttgcattacagttggtcttataaagctttcagcatattacaaacagctaccaccagcatattttcttgtaggctgcggaaaagaggaaatatgtataacaggagcactggatgctatttagacagagctcagcaaggccacttacaggcagagtgatagatggtgagtggcagaaaaatttctaagccagggtgaaggtatgagaagtttgcttgtcattgatttgcagtcacctaatagaaataactaattagtgaaagttggtcgacttagcactttttctcctccacttttgaaacaggcagggactgagaatttataaacaggacagagttgctccagggtatttttgccagtatttctacctactattgttctccaagatagaaggcaactaaaagtcatcaaacttggtttaacatgtggcctggtttttactgttaccagtggtagaataaatgtttataattcctttatgtagctttggcaaaaaaagtagatcacaggcatacaattattacatgtttgttccaatgtgctacgtttgggcataacccatggaaatggttagacacattggcccaacatcatctctgatttgctttttttgtttgttttccttcttggttcagggcatgcatttgttagattttacaaataatcctcaatgtatttgtggtggaatatgctcagggttttggaaattgctctagagtctttggttctgccaccaactgccaatgtggacttgggcaatttatttaactttttaaaaagctttcattcaccataatgatgataatcacaatatctaacatttgaaggactaccatgtggctgggcttcacatacagtatttcacttgattatcatcgtaatccaatgaggtaggagctgacaatgttctataccttcatgatgaggaaactggagcatctagaggttaagttacctcccacagtggcagagtgagggcaccagcctggcagtctgactccatagcgtattcattgaaatcagcctaaacaaacttaaatgcctgagagggccacacgagtgatggcagagggctcctgtgactgaatggagagcccatatccttcaagcagcaggtagctgccacactcttccagctaattttgttatgtgggaagataagcgcagtacctccagatcttccagttttttttttgttttttgtttgtttgtttgtttttgtttttttagagaagcaaaaactccagtctgatatttttcaatgctgagaactgagccactttattttagaaacatactgagggctaataatttgtaggacaaaccaaacatgatttgaggccactgttgtttgctggtcagttcatctgatacaatataaaatgaactaaataatctctaaatccccctgtagcaccagaattctctagaattctgtgattatcttgactctgggttccacatgcatatcttttttaattactgtcttacaaacttcctaaggaagtttttctggagtgggtaactaagaagaccttgcctgtcaaaggtgcctttatgctcccagttctctttgtttaaaaccataaaaagatattgttcattctcttaccttttcctataaagtatgcaattattcaccctcttttttcctggaacaacttttcttttttggctccatttcaactcccaccaccctgggccaagcctccaaaattttataccagtacatttaaatagactcttaaatgtcttctctaccacttatgtctctagaccaggagttggcaaactacagcctgagagacaaatctggctcattgcctgttttgtaaataaagttttcttggaacatagccatgccgatttgttgacatattgtctatagctgcttttgtgatacaactgcagcattgagaagtaatgacaaacatcttgtggtccacaaaccaaaaatacttactatttagtctttttttttttttttgagatggagtctcattctgtcgcccaggctggagtgcagtggcactatctcagctcactgctacctccgcctcctgggttcaagggattctcctgcctcagcctcctgagtagctgggattacgggtgcacgccaccacacctggctaatttttgtatttttagcagagacggggtttcaccatgttggtcaggctggtctcaaactcctgacctcatgatctgcctgcctcggcctcccaaagtgctgggattacaggcgtgagctaccatgcccggccactatttagtcttttaagaaaaactttaatacttgctaatccgctccttacatggctgtcagattaaactttgtatttctagtactgtatgtgtcacctctgtgctcaaaaatctataatcgttttccatactttattatacacataaagactcctagggatttcttagtctggaattagagaccactcacaaaggccatcctctatcttttcagtcatattttctaacatcattctgatctcccaccaggctggttaaaatgattaaccacaggccaggcatggtggcttacacctgtaattgcagcactgtgggaggccgaggtgggtggataacctgaggtcaggggttcgcgactagcctggccaacatggtgaaaccctgtctctactaaaaatacaaaacaacagccggatgtgatggtgggtgcctataatcccagctactcaggaggctgaggcaggagaatcgcttgaacccaggaggcagaggttgtagtgagccgagatcgtgccttgcactccagcttgggcaacaagagcaaaactccatctcaaaaaaaatgatgaaccacaaacatatcatgcgcactcgaactctgacattttgggaatgtgctaccattttgcaaagcaatttgcagttcaacattctttatgatatttagtagacatttatgatttggactaaacaaattatttatcgaagccgtactatgtgtcaaggttgctggtattccagcacaaataatctcatttgtcccatattggctcatatttaaaagatgcatatttgtatattgtgtaattgtcagtaatacactgaaaatatactggtgctttctttatgtcaggtgctgtcctagcacaagaaattataaaaacaaaacaaaattcagcgggaacaaattaaaaaaaaaaaaaaaaatccaatgaatgacacaggttaaacaaataatagaagtaatttgcttcagtcataatagaagcatgatactaaagaagcacagatgattgtctgttcactgatgaacagacaacctaagaatgggagaaaatttttgcaatcgacccatctgacaaaattctaatatccagaatctacaaggaacttaaacaaatttacaagaataaaacaaccccatcaaaaagtgggcaaaggatatgagcagacacttctcaaaagaagacatttatgcggccaaatatgaaaaaaagctcatcatcatggatcattagagaaatgcaaatccaaaccacaatgggataccatctcatgccagttagaatggcgattattaaaaagtcaggagacaatagatgctagcaaggctgtggagaaataggaacgcttttatactgttggtgggagtgtaaattcgctcacccattgtggaaaacagtgtggtgattcctcagggatctagaaaccagaaataatttggcccagcaatcttgttactgggtatatacgcaaaggaatataaatcattctactataaagacacatgcacatgtatgtttattgcagcactgtttgcaatagcaaagacatggaaccaacccaaatgcccatcaatgattgactggataaacaaaatgtggtacatatacaccatggaatactatgcagccataaaagagaatgagatcatgtcctttacagggacacagataaagctggaagccatcatcctcagcaaacacaggaacagaaaaccaaacaccacatgttctcactcataagtgggagttaaacaaagagaacacatagacacagggaggggaacaacacacaccggagccaattgggggtgagaggcaaggggaaggagagcattaggacaaatacctaatgcatgtgcggcttaaaacctagatgatggcagccgggcgcggtggctcacgcctgtaatcccagcactttgggaggccaaggtgggcggatcatgaggtcaggagatcgagaccatcctagctaacacggtgaaaccccatctctactaaaaatacaaaaaattagccgggtgtggtggcgggcttctgtagtcccagctactcgggaggctaaggcaggagaatggcgtgaacccgggaggcggagcttgcagtgagccgaaatcgcgcagctgcactccagtctgggtgacagagcgagactccgtctcaaaaaaaaaaaaaaaacaaaaaaacctagatgatgagttgataggtgcagcaaaccaccatggcacatatatacctatgtagcaaacctgcatgttctgcacatgtattccagaactgaaaattaaaaaaaaaaaaaacagatgaagcaacagatttccctgtcaaaagaggttgggaaggcttcatggaggagatggcttttttttttttttttttgagacagagtccaggctggagtactatcgcatgatctcggctcactgaaacctctgcctcccgggttcaagcaattcttctgcctcagcctcctgagtagctgggattacaggtgcgccaccactgcccgccaatttttgtattgttagtagagacggagtttcaccacgttggccaggctggtcttgaactcctgacctcaggtgatccacccacctcggcctcccaaagtgctgggattacaggtgtgagccaccatgcccagccaggagatggccttttaactgtgtattggaaattgagaaagctctgggggcctgaacattcattgtggttcaaagaagagcaagaaggtcagtattacaggattgcagaattgcaagaagtggcagcagacacaaccagaaaggaaatatgtgctatatagaaaggactttggatgtcttattgaagaatcaggagttaatcctgtaggcaagggaaccttcagtgtttctgaagaggagagtgacaatcagattctacctagactgtaaattactgcatggcagaaattacattttgtgcatttctttttctccctcagggtctaccagctcttccttgaacatagtaaaccttcaatagttagttgttccttgattcatttcttcccaagggtgaagcatttctggctggcttgtagccaacagcattttgagttttctctgagcccgataaaatgctgacaccaacacagttttttaaaaagcagcaaatatggttaaggtgatgagaagcgtcagattcatgacatttctcagtgcctgtcaccttcattctagtagccagaagtgttgttttcagctttcagcaaaatgttggcaaagttgaaactacctaaaagaaactggaagtttgttctcatttaaaccatttaaggtaaggttgggaaattttggatctctaaactctgagggaagcatgctgttactattattatttaaatcagatggaaattagataattgagaaactccctgaagtagttgacagaatgggagggttttgcttttcctccagatgtgtaaaacccaagcctttggccttctgtgttgtaagcggtaggaattatcagcctgcactaactgtcaggagttgccaggagtgatggagggctgcaggcattgctgatgtgaatgttagacctcaggttttgtttgtggcattgacaatttaaaaagtagagacattttgagatttgtcatgtgaggtagtttagctcccaaggaactgttttgtttccgcccttaacaaaaccttggattgcattttcattctcaaaactgcgtaaagctgggataatagagcagctctacctttgacttgattttaagaagagtaccagggtccttctttcttttgacctgagccagtttctcctactgtagttctgctgcagacagggttggtaattagcagggctgataagtaatagcttcaaacccttgctttggagactgaatctggttttggtttctggtgtctagggccaatttatccaggggccacagcctctagagcgtgtgaaggtcaccctgcatccttgtggatctcttgttaagcttctcctgccacccttctctcagtgccatcctccccatcactgagttgtaccacatcaccatattcactctccacccaaacatcactgggcttcacatttgcattcctctggtctcacaaagccttctgtattgaacatgcttcacattttccagccttttggctaaataggcctggatacagtgaaaccatctttataaaacctttccagattcccgtctccctactaggcattttgcatacacttctatcataatacttatcacattatataaagttgtctgaagaccccaaggatcaatttaagagcatagaactcattgttttgttgcaatggaatatccccatcacttaggccccatgtttggccacagtaattgcaatcataaaataaataacagtagctatgatgtcatagcaagttaccctgtgctagtcataacatcaaatgtagtagcacaagtaggtgctcatttaacccttgtaaatggaagaaaaagcctcatgactgactctcactccaccctatcctactccagatccaaacaaattcctgttttgcaaggacatcacctttatctttattgtgcctgcctccctgccaggcactgccattcaataattctgccaagtggtatctttcctcctgacagaatgctaaacagtgatttattgcttgaatacacattgctttcatggaagtgatttgtttaaaacaacgtaaaacactaaataaattattcattccatgctaattcttcacttttatgtgctgtagtaagtgtcaaaatgagcagcctgtggggcattttatttttgccacattaatcttggacgatttaagggggaaaaaaatggaaggaaacctaaaggagaggttcaattttcaagaaaatagattttttttttctagagccgccagcagcagcagttctagcagacatgcttgtctctcctgcccccaggggctctgtgagtcacctacaagacccccttgcagtcttattccatgttgtgaacagtggctctttttcttggcagagagtgattcacaatggccccaagccttgtcacaaggccaggaaacaagtggattctttcctgggagatttgcattttctggagcagacagggtgttgggtttctaaatttcactggtgtcttgattttggattaagggattataaagtgagagaagcagcagggacatacttacccattcctgcaacagagttcccacttggaatagaggtatcatttgtttctagccttccttaaccttctttactggaaatctcctttctttgaactggggacattggagtgattttcagtttaggaaagtcttccctgagcagaggagaagacagatggtcttgttgtaaattcttgagaagcttcactcctcttttctgaacatgaccccttcatgttttatacctgctgagggtcgagcaagggtttgtgctctctgcccgtggaatccacggagatctcagtgaatgtgatacaaagatgacccctcagcctcaatggtagaagagctagcacaagccatccttcaaggccgtacttccagatcagaagccaagaagatccaggattaaatacatactacccaagccccagccagttttcatcttctgtaagagagcaacaaaaaacatctccccattgctatagaatggattaaatgacatactgtgtgtgaagcacctagctggttgtaagagattgaaaaggtccctacctgcatctagctagagattgtccccttctctttattcccatagtaattcatctctaaagcattcaactcaaacctttcagcttggtgagtctctacacagctatgatgggtaatgagagcaggtgtctgtttactcttgtctacggcactgagctttggactcagactgttcagattcaaatctcagcccccccacctagctgatcttgggcaagtcactcaaactttacggccaaaaaaaaaaagaagaaaggtaagacatattgctgtaaaggatagttgagaaggatagattatgttattcagaatgcttaggagaatgacacaaatcaaaaataaagtcaattagtgataatccagttagaaggggaattctaattttttttttttttttttttgagacagagtctcgctctgtcacccaggctggagtgtagtggtgcgatcacagctcactgcaacctctgcctcctaggttcaagtgattctcctcctcagcctcctgagtagctgggattgcaggtgcatgccaccatgcccggctaatttttgtatttttagtagagacagggtttcaccatattggtcagactggtctcaaactcctgacctctggtgatccacctgcctcagcttctcaaagtgctgggattacaggcgtgattgattacaggcatgaaccaccgtgcctggcctggggatttctaattttatcagtcccctttaataataaaaacaggttaaatgaattaactaaagtcatacaaagtgttaaaattggctctgtaaccagaatccagccctttcaacctcttgcattagccctcaccctgccaccatacatactctatttggccttgctcctattacacagaagaagagattttgagagtctcagaggaaatagctgaaaaatctggaattcagactttgattcaaaatctgcaccctgttatatttgcactgacccagggctgtcttttcctagatagaagaaactgacagaatggaaagtggatctctgcagtgtcctggccaaccttcaaaaatcccacagagctgtgcatgaaagctaacactcttgaacgaaagaacaggaaaatcaataaacctttggattagatcatagacatgttttacaactactcagccctcacaaaagagttacacagcattgaattatgtgtaacatttaatcctttaatcagcctaagctttcaagaggaaattcaaagtatttggaatgtcattcctaaaattggaatttgataaaatggcaatgctggtagattgcaatttctcagggtattctgatgtgactcaactcaagaggctagttacaataattgctcatgtaactgaaacatgttgttaatgcctggaaaagtccatcatcaatataaccacagtcattcagtcagacgatccacaaatactggaattccttaggtcagcaagaggatattacatattagttcacatggaattctgagaggatatggggcactggcgtgatgctgatttgaacatgagcacaggagccaggccattcttacttagaggtcatattttgaaatttaaactttaagatcagtgagaggctacagacatgttttaaggagtgtggaaagatgtttagactgctattttttaaaatatcgtggtggcaacagtgtaaagggtgacctgaggaaagcaagataagatgctgtaaaagttgttggaagcaggccggtcatggtggctcacacctgtaatcccagcactttggaaggctgaggcaggtagaccacctgaggtcaggagtttgagatgaccctggccaacatggtgaaaccccatctctactgaaaaaaaaaaaaaaaaaaaaaaattagctgtgcatggtggcgggtgcctgtaatcccagctacttgggaggctgagtcaggagaattgcttgaacctgggagttggaggctgcagtgagctggggtcacgccattgcactccagcctgggcaacaagagcaaaactcagtctcaaaaaataaaaaaaataaaaagagttgtcagaagcattgcggtcttttggttgatgtagcccagatcaggttgaggtgaggttagatgggagaggtatataaaccttagagactggttgggtgtggtggctcatgcctgtaatcccagcaccttgggaggccaaggcgggcaaatcacctgagatcaggagtccaagaccagcctggccaacatggcgaaaccctgtcatctctactaaaatttaaaaaattagccgggcgtggtggtgcgtatctgtaatcccagctactctggaggctgaggcaggagaatcgcttgaacccagaaggtggtggttgcagtgggcagggatcacgccactgcactccagcctgggagacaagagtgaaactccatctcaaaaaaaaaaaaaaaaaaagagatgttggttacatttggagggaagaaggggataatagagtcaaggaagactactcagaattcttagtttgaacaatgacaatagtacctactaagactggcaacactgaagatagagtaggccaaggtattccgcattgaatggtattgtaatcggaagagacccttgcaaacgtgtagtgcagccatagaggaaactgaagcccaaagaagtaaattgactttctcccatccaagtactaaccaggcccgaccgtgcttagcttccgagatcagacgagaacggacgcgttcagggtggtatggccatagagtatattgactttcttagtgtcacagagtattggcagcggagcctgggctcaggtccatatctcctgattcatagcctaggactgctaaaatggatagtttcattgaaaaggcttaatgagcatctaatggggagtcctatctgaaggtgaatttacagtgaagctaatgaagcttaagattcagagccttcatgggcactggctcctttgaatgctgggagtttgaggaggtgtcgattgttccaggtggagagaggaagccagggtggaatcggaaagcatttctgtatactcatttccgctaaaccacctgaacatatctcagaacaaacgtatgtctatctctaaggcactattaatttcttgtgatctaatttcttgggctagtaaatatgaagttttagatctcgttttctttatgactttgtattatttttcttaaagagaagctcaacattgaataactttcatccccacaaaacctgggtctagtcctggtcctagatctacttctttcaactcttccatctcagaactggcccaatccagtccttccttctgtacctaggcctgcttcagggacaaaatcagcaaatgatatattaagattattttttgctctcagatattccttattcaggaactggttcttctaaaagtataacctacactatttgtgaaatgaggtggttggagttagatggagttagataatctttccagtcccttccaattttaagtttcttttaaaagagtaacaaaatgctaaatttttatacccacccactagccatgccattgtaaagaattagaactagaatcacatggaaacattttggttctgtgactaaaagacaaggaatatataaaaatcacttaacctccgtgggatttttccctaacagaaagtcttgttctttattaatacattttacttggaattttaagatgttacctaaattttagtttcaagccagattttttttaagttttgaatttccttttaggcaaattgtgtctcaccacaccttagcactcagacaaggcaaacaaaagatctgctaatagagaagtcagttgttattgttgattgactataatttcttaagagagtaaaatgtttttcttcctcccttgcctacattaagactttcccatagtaaaagataagatctgatacttgcttattgactctctctggtgttttattcttgttgcttttgttagttgtactttatggtaaatgagaggagataatgaaaaaaaaagttaaaagcttgcattcttttcagtttttattccagtttcttattgaggtttatgttctgacacttggaacacagtaatatgcatagcattatttattggcttcctgcaagtgtcttgtgttaaccttgaaaaataatactttttagaattgagttgacttcttcagacctgtgaataaacagcataaaaaaacaagatggcgaagtggaaatggaaagacttgcttcatttcttcctgttgaagctaaatatataaaggcataggaacagaagggcccctcatcgttaacacacagtttgctgcttaatagtgtgttcactttgtgtgtgggttctcacatagaaagaatattaatatttagatagtgtctataattcagacagatactgatttgagagcatggaaatctgtctttctcagatcatcacatcagggaagttggaagagaatttctccagctcttacttcccttccatctcgctcctacaaaacctgggttgtatccctcttaagtattggtacatcttttctctttttttttttgagacgaagtctcgctgtcgcccaggctggagtgcagtggcgcgatctcggctcactgcaagctccgcctcctgggttcacgccattctcctgcctcagcctcccgagtaactgggactacaggcacccgccaccacgcccagctaactttttttttttttttctttagtagagacggggtttcaccgtgttagccaggatggtctcgatttcctgacctcatgatccgcctgcctcggcctcccaaagcgctgggattacaggcgtgagccaccacacccggcattttttgtctttttttttttaatagactttcagagagaagataatacaataaatatttccttattgttttacagctctaaactgagaattctgtgcattttctgtgtttgagcagctgtgtatcaggtgagctaatttgagtaggtactagcttaaagaaggttgaatataatctctctccccttctaagcactggaggggaatgagaacaggatttatcgcttgtttctttaactataaaacaatgggcttgcgcaagatatgctacgtggtttcctccaactgcagctctggagacaaccatgctaagttgccagcttctccccctattccctggccccagttaatttcaggtcttgaagccttggctttgggtctgtaggcctgtttcatttttctattttactatccatatgtagaaagatcttgtcttgaatatgcattttcctcacattttgtataattatctcatcttgctactcttttgggattacattggtgcagctatttggtttttttctagaaaaaatatttaatttagcatctcccttattttcctggtttaatgtaaaaaaaaagtcaaaatcatttaaggcagaataatttaccaagaggaagaagaatatgcagtggtcagctatgtattatatatggatatatattttgagaattatgctctttttattattcaaaataaagaacgggagaaggaggtggcaggggaggaaacaagacaagtgtcctcagactctctggtttggcaatgtgaaattaatagattttggagggagtgcattttttttttttttgagtggatagcatctctgaacttgggaaatagaagaacctgtcaaaggttaaatgtgtcccctattttcaagatttgcatcaaaaagcaacttaagtctagtggatttgacaagtttagttttatttactgaatataaagacctgactctatgactagagtctgatagtttggtttaaccttattataagcttattttttatttttatttttattttttgggtttgttactagcaggaaggaacttagctttcagcaaagggagaaaacccatgagttcccttgagtgagagctgcagtatttctcacatggcagctcctggcacaggaagagtcctgcaactcaggtgcagattttatgtcttagctacaaatgacctctggctctgtggagaaacagagtcaggagggtatagcaaatttacaaaaagttttttgctcttcacgagggctctccatgtgctacaatttgctgtgtctaatgttgattcggttatctgtatgtccctagctctgtctgcaacactgttggttggcttgccttttaatttcctcaaggggtatgcagtggctgtttcactcaatttcagtgccatgcagaggattttacataaataaacatgacattaaattatgtgtgggctgctacaaaatataaagggcatttagggattaaatacttttcagaggcaaaaatccactaactgctttctggatgctttcttgtaccccaaattagtccactgtttctaccattttttcatttcgtcaagtatgtttgtctagaccagattacttttgtctgttgacttcacatgttagtgtgtgagtgtgtgtggtgtgtgcgtgcatatgtatttctatcaccctttcaactctcctctggagcaccttgatccagcttagccattattgatttctttcccctttgataactcaaaaagagtgtaattatgcattcacttaaatctaaatgatgatactgtaaaaccatctgtggaaatctgcagttagctgcatgtgcattcgctgtcaggaacccctgatccggcagcagccaagttctccagtaatttaaatggaaggatcagttcctgaagaggattttaccagggttcaaaactttaaaaaacgtaataattaaattttaaaatgaccacaaaatgccattgacttgaggtcagtaaagagtaaaaactcaagcatgtctatgatcaggaaaatatattccagcaatgtctagaagaaggcagagtgagagaagggtttgtgactagtaccatgtctgacaggtaacagggctccaataaatgtttttgaaatgaacagaaagcgagggcatttcagtggttctgccttgcctctagtaatcatcatgcccatattagacaggataccagagaggaaagtttagcacagggattaggattccatatgtgatgtgacttagacttcaaattactggcttagtaatttaacttacttagcttctctgtggctcaatttcatcatcataaaacaatcagataattgaaatttcttaattatgatatctggcacacagagtagacatcaaatagacgctacaagttagttcaggactcaggcgacttactgaaaatcacacagtggtacaccctagtatttgctactcagcagccattccccactctttctttgctggcagaacccacctctgatcatagaaaatgtcaagtggaaataccagttccttgttttctccatctttattgaactgcatgtgggcatgtggcaggatcctggttggtgagggtaaagggagttttgccggcagggcttttgggaaagagtttcttccctaggtagaaaaaaatacaacaaaaaccacaaaaacccatgtatacaccagaggcctttctttactctgctgagtatagccacatcttcaggtgatgaaaagaagtgttatgaccactttgcaaacatgagggtaagtagcactgagtgctgacactgtcagaggggacacgtggacattgcttaggtccttgatgacattgttgggctaaattagtcctggaactgcgtaaactctggacttcctgctatatgacataatgaaccacttattgcttgagtcactattagcattctgtttcttgctgcaaacggcattctactagatctggtggctaaaccaggactcaaaatctggtcttggccaggcatggtggctcacacctgtaatctcagcactttgtggggctgaggcatgaggatcatttcaggccaggagttagagtccagcctaggcaacatagcaagaccctatatctaaaaaaaattaggcctggtgcagtggctcatgcctgtaatcccagcactttgggagggcaaggcaggcagataaggaggtcaggagatcgaaactatcctgactaacacagtgaaacaccgtctctactaaaaatataaaaaatttgccaggtgtggtggcacgcacctgtagtcccagctacttgggaggctgaagaaggagaatcgcttgaacccgggaggcagaggttgcagtgagccaagatcgcaccactgcactccagcctgggtgacaaggtgagactccatctcaaaaagttaaaataaaataaaataaaataaaatattagccaggcatagtggtgtgtgcctgtagtcccatccacccaggacactgaggcaggaggatcacttgagctcaggagttcaaggctgcagtgagctatgagtgcatcactgcactctagcctgggtgacagagtaaggccttgcctataaaaaaaataattaattaaaaatcaaaatctggtcgtcttctggttccaaagccttttctgttttgagcagagcacactaccagcctaatatttaaggtcctccacaatagtgccaaagcctatctctgtattctgatattgtgttgggtccctgctcatactctaacctttaggtaaaccagaagacttgaccttttcttaatgctctctgagctttctccctcagttcctttccttgcagtaccctttgtatacctctcgtctttatcagaatcacactcatcttctgggatttgtcttaaatgcatccttttctaagaaatatctcttgattacatctctcttacttgctccttgaaagatagaaacacttccctcctgcttcacatcttttttcctcatatttcgtgagtacctgtgtatgggtctgcctctcctaagactgagctttcagagactcatatcaaatatcattccttgttttgtatcctcacagcatgtatttttaaattattgccttttaacaaagcttaataaatgtttattaaattaaatctgcagaattttggagctgaaagttcttctaaagaaagctcttgttttctgaaaattatggaagttcttattcttggatgtatggcccccccccaggattcaagagatgagtaatattattaaagttatatttattgttttatgcccataagttgtatcagattatattcttaaaggattcttgggtccccaaaagaatgagaacctctgtttaagttggaaagtcaaataaatacttagccaaagacacacaatctggaacatgcatattttgaagaaaactagtgctgtgagtttgctgcttttccctaaaattggagtgccaagaaaacaatcaaaaacaaatttctggccgggtgcggtgcctcacacctgtaatcccagcactttgggaggccgaggtgggcggatcacaaggtcaggagatcgagaccatcctggctaacacggtgaaaccctgtctctactaaaaatacggaaagttagccgggcgtggtggtgggcgcctgtagtcccagctacttgggaggctgaggcaggagaatggcgtgaacccgggaggcggagcttgcagtgagccgagatcgtgccactgcactccagcctgggcgacagagcaagactgtctcaaaaaaaaaaaaaaaaaaaaaaaaattctggccattgaacactgctctcttattttatccaactctttgattctcatgaaagattattccaaatctcttcaggctccttattattctcttcccccatatttgctttcctcaggatctgtaaatacgtctaaacaattggtctccagcaagctgctgaaataagcagagaggtagctatcggagcttggacaatgaaaaaacactaaggcctgctgtaagatggtgggagcaggacaaaggtggccagcatcagcaccgcccaacatgctggcatcttcaatatggttgttcccttgctcacccaagccagactatggcccaccccaggcaagagcaattatgaccattagtatggctaagtgctgtggagtcttcccatgtgttacacgaagcaccagcccatgccatccctgaatcactagtggttgagagaaatacaaaagaaatagtgctgttttatagactaggacctagtcatcatctacattattcaggatttggaaatatagaccataaggaatggaagacattttgggattgtgtactctaatcctaagcccatacttttgtttcttttgagatttgatactgcttccacagttggacatagaggaaaacaagaatgcaaattattattaattgaagagtgaagagatatgtccccattttctttttcttttcttttctttctttttttttttttttttttttgagatggagttttgctcttgttgcccaggctggagtgcaattttgcgatttggctcaccacaacctctacctcccaggttcaagcaattctgcctcagcctcccaagtagctgggatgaaggcatgcaccaccatgccaggctaattttctatttttaatggagatggggtttctccatgttggtcaggctggtcttgaactcccgacctcaggtgatcctcctgcctcggcctcccaaattgctgggattacaggcatgagccaccacgcccagccctgatatgtccccattttctaagacatccttggatgagcagtaggcaggctaagtatccttacaaatccactgacacccccccaacctcctgatgcaaagcaggtgaaccccacaattggggcttagcttgggagggttcttgacttcactcaggaaagaattcaagagtgagctgatggtagaagaaagcaggtttgttaagtggcaatgtatagcagagtggcaactccttccagagcagggctaacccagagcccagagtagcagtgtatgggctgtttgctagcaatatttatacccacttttaataacttgcaaattatggggtgggctattcacaaatctctagaaaaggagtggtaacttgcaggtgttgctatggaacttctcaactgtcatggcactggtgggagtgtcttacgctaaggagagcagtgagggcaactagagattgcctttgctgtcatctgctagttctgcaggtttcttcatttcaccctgccaggaccaggaaataagttcctccagtctcctgcctcacttccatcgcactttctgtggggtgaattctttagtaaatgaagagaggaagacgctatgtttttgtttttaagaaaagaaatggaaaattcctgtgcttctgtttagaaaagcatagaaaaattttggttctctaccatctactacttagttaatacacaagttttcaaaagttgctgtatgtagaaccagattaccaggaaggtgttctcaggttccttaaatgtttggagtttcacttctaaattatattttatgttaataataaaaccatgctgtcatagtcaaaggtgttacatgactgataattggcataggagagactgcctgtcttatgctgctggcaggttagttcatttcaacgcatacctgtaaataaggctttttgccctactgttttgatacaaaagaatatttttcactgacttttggtaatttacagtggaacagtcttattagtcatccatataccagcatctgtttgtgaatgcttttgttctgtaacccagtgcagaaagaggttggggctagaagggaggaatgtaattgacattctcctctcacagagtcctttgtgatggtttctcaactccctatccagaaggagtgagggctagagttgatggaattattcagtaggagctttgtaagggcctgagcaaagggtcactaatagtttgggagcccgggttatgaaaatgtggctcagtgctgtgggagaagaagcccttgcccactcccttggaccctctcccattcctgcacagaacctgacctggcactgtttctggcacccttctaccctccaaggaatgggtgatttgagaacagcagcttggtgagtgggcactggcatcctctctctaagtatggactggctgggcgcagtggctcacgcctgtaatcccagcactttgggaggctgagtcaggtggatcacgaggtcaagagatcgagaccattctcctcaacatggtgaaatcccatctctactaaaagtacaaaaattagctgggtgtggtggcgcacctgtagtctcagctactcgggaggctgaggcaggagaattgcttgaacctgtgaggcggaggttgcagtgagccgagatcacgccactgcactccagcctggcgacagagcgagattccatctcaaaaaaaaaaaagaaaaagaaaaagagaaaacgtatggaccaagtgaagttcctcccaaaagttgtgtaagcgatagatgtggcaagaaggagtcacagtgaaagaagtacaaatgtcatgtgctgacagcaagtcctagactggcgagggggatacttgaagcatgtcactgtggaaatcccagaaataactggatgcagaggtcctggtatggcataggtggaggttatcaagtcttagataatttgggtcatagctatttaaagataatatcctaagatttagagaggaaccttaaaaagctagtaccatattgtgaccacttgttttgaatcagggatgttttaacactgtataatgaaaacaagatacagaaataaatggggtgctgatggatatgccactttgtgtgggggtatatatgttcatatgcattttgagatgtatatgtgttcatcaaaacagctttgctttttgattgaacttgaatactctacacttgaactcagtttttctatacatgaaaattgtgtgctgaatgaataaaaataaattatgtgtatattatttaagcacatacaacatttcacttaattgaaaagttccactgaaagctggacgcagtgtcctgcacctcactcccagctactaaggaggttaaagtgggaggatcccttgagcccagaagttgagaccagactgagcaatagagcgagactcccatctcaaaacaaaaacgaaagcaaacaaaacagcttcattttgccccattttgagtttgaaaaatacaacaaaaacaacagagaataaaaccagaatagggaggcaatttcattttttcacattttctcatttaaatgtagtgattttggctctggatcccttaacagaaactgatttgtgaaatagtattgctgtcacagaaaagcaaacaaacagcaaaacatatctaacataaggatgcatcgttgttcagtaataagatggtaaataatgcacagaggcagtgaagggaaaaaagaaaaagaaatctcaaataatcgattgaaaactaaaggttagcagttgtgccttctttcttgctcttgttctgaaaacagaaagattaaatagattgattcaagcagatatgctttcaaatgtcataaaggactctacttctggtgctgtgttgataaactgcctgagtgtatcactggcatttcagttttactagccctgcaagaagaggcagggagcggtttctacctccctgcccgcctgccctgggattgcttaaacaatttctgtgtgcttgtgcaagtggctccacaccatcacatgctgggttaaagggttccttctccggggcacctttgaattccctcatcacaagaatgggagacacagcctgtgaccagctgaacttcattatttagtttactgcggtcttgtatcaggagagcaactacctagaaatgctttatgcccacacccctattttcttggtgggggatttataggcttattcggcaaaattgtactgaggtggagtaggaacatcattctgtgtcttcaaacaaacagccaccctgctgccactgatcagcgttcctgggatggcggtgattgaaatttagcactgagagcgacttaattggcacatggatctgttaagcatatgcccccaccacaggcatgccatctgatgtgtccatggggtgccccgcacctcacacatgctcacgttttgctaaagaagcaagttttgaacaggacctggaaggaaggaagctgtgctgtagtttaggagaggggcggccttagatgacaggtactcagggatctctgcctgtttttaagttactgtaatttttttttccttgaactcagaacaaacctaaggtcagggagttccagtttgcttgctgtgaaattaaaaagttaagaatgtgttcactgatgcttgtgccttcagtaaatcaaacgctgtgctagtagagtggaacttggactcagcattcctcagcagcttacagccccggaatttaaggttagaatgttctatgcttactgtggctagaactgatcccttggccttcagagaagaattcaggaaatcaatgtcaacatttttctgctgagttggaaacagctgggctgggccaaatgttctaggttatgagtaccaggaggaaaatacgaacttcgacagaaaactgagcaaacccataatgtttttcccttatgtaagaagagcaagtaaaaggtggagaaatcagtggttaggaacacacactgctctgtggaatcttcgcaagtgtgcttgggctcatgtatttcaaataaccaggtggactctgttcattgctgcagacaccaaaagaagctgtcttccggagcagctgtaacgggaagggttttggtgtgactgagaaggggtatatagctctttatcaacttcccttttctttcatgagcgcttctgtcctaactggatcacggactcatagacggaatctgtttttctttgtgttctcttctggcgtcagacaaaatcctgggctcctaataaatgtttaataaatgttcgttgaattctgaaagaatgaaatagtttaggttcctctgggtaaagttggaaatagtgctgctttctatttcggaggaggatttgctgtggagcgaatatagcttaaatttagcattccacaattctacggcttctttcctgagacctgttcctaatttttgattttctctgtttcttatggagggttccataagaaatatattacacggtaattatctggaccccatgaaatagatttgctcgttaaaatgctgtcgtttagccctgccaatgtggcttctatttaatggctttcctagaaattggaagtcagaagaaagttaaaaccaagctcacatagagcaaagggaaggaattaacatttaagaatcctatgctaggccaggtgcggtggctcacacctgtaatcccagcactttgagaggctgaggcaggtggatcacctgaggtcaggagttcgagaccagcctacccaacatggcgaaaccccatctctaaaaatgcaaaaaattagccgggcgtggtggtgggcaactgtaatcccagctactcgggaggctgaggcaggagaattgcttgaacctgggaggcagaggttgcagtgagccgagatcgtgccactgcactccagtatgggcaacacgagcgagcgaaactctatctccaaaaaaaaaaacaaaaaaaacaaaaaaaaaccacatgctaatagatatgtaatttgtatttatttcctaatttaacttcaaacagcaattcttttgggagatagcattactgttcatcccccttaataaatgagcatactgacattctttcaaataattctttgctgtctcccaaaaagatggtagctaggcacattgggtaatctgctcaatgcacccagctactagggctggaaactaatcattgaccttcctttctcccaggcatctgctcagtgagtacctgagttgtgtgcatatttggcagctctgccagccttccctaaaagcgctaaacccactagggaaagaaatgcctgcaggagcaggtaacccttgctgcagggtgacagggagaaagctggggagaggataggcctaagcaattcagtggaaggcagaaagacaagccaacctttccccagtcagtgtggcaaatgctgtaacaattcattcaattatgttaagtgactattaaaggaatcctaagccctcccttgggccatttcagttctaagagattgtaattgtttgagactaaccatgatttcttcttttgccttcaggtgattctcattttgacaaagctctatgactataacctggggagcatcacagagagctcgctttggaggtatgtagataaatggagctaataattaccgtgttatttaagcatgatgcctgctactgctgtcccacccactttttcctggcaggaaggttcctggtgatatgcactgcttgctttctctctttcttctctgtttcctttagtgatgcgctgggctttatctccaggcaggccagagctttactttctttatagaccaattcttttagtcagccagattcttttgctaacctgtatgataggttgtgtttatgcactgtctcactgacctgtgagtttattggagcagaagtgagactggaagtctctttgcagaagaatcagcacagcctctaggtctgcagaacgaggctctctaccagggaaactttttttttttttttgagacggagttttggtcttgttgcccaggctggagtgcaatggcgcatctcggctcagcgcaacctctgcctcccgggttcaagccattctcctgcctcagcctcccgagtagctgggattacaggcatgcgccaccacgcatggctaatttttttgtatttttgatagagatggggtttctccatcttggtcaggctgatcttgaacttccaacctcaggtgatctgcaggcctcagccatccaaaacggtgggattacaggcatgcgccaccacgcctggctaatttttttgtatatttggtagagacgtggtttctccatgttggtgaggctgatcttgaacttccgacctcaggtgatctgccggctggcctcagcatcccaaaatgctgggattacaggcatgagccaccgcgcctggcccagggcaacattcctttactaacttcccttccatggtggtcctgcagctcaccagcagcacaggcatgcatacccacactcatgcacacccttatctttgggattcacactgtattgcttcacacatatagagtatggaaatgatacaggattttttcagtgcctcttcgccagccagagacctccacagccggcagtgcctctgcttgagttttgcttgtgcccacagggcttgctctgcccacttagcccatcaggctgcactcagctcatactactggttgatatctcatgcctgccaagggcaagccaggtgcgccagctgctgtgatggggtgggcagctccagcattggctctgtgcaaggctgtggctggaccaggtgtatgacaaggggcctccgccttgggcgctggtgtctggacgaggggaatgcggtggcgccttaaaaactcggggacaccagcaatcatggaactgcaaagggggtgttacagcataacacagccctggcttggggagccgaggtctaggcccccagaagggtcatagctcttctctccttcccaccagccacagtgcagcaaacagggtgggggtgggtttcacctcattcgtgttacagctcgttcagtcccactgctctgctctagcccatgcctcctaggctggcccagcgccactgctacttcccgttgtgtggggcagctgcctggcgccaacagaggacaggaaggctacagtattacagctcctttctcactcgctgttgggtgggtcccaggttcttgtcctgcatccaagaagagttttattgagtgacggaacagctctcagtggagaggagacccaaagtgggtagtccctaccagaaggcgggtagtcccaacgtgtggctgagggcagggtttttataggctcaaaatgggggaggtgcaggccgtaggtagaaagagaaaaacatattgggtctcggaggagcttcccatccatgattttagacccatggtagcccaactgcccagtcatgctggtattcaaggagctcctctacgctaagggatttgtacctattcatttgaaaaattattgtgatagtagtagaaggccaacaaattcctaggcagatagggacaagcccccaatgaaacccaaccttcaagccacaagacagcctgaagcctgaaaactaagcttccagttctggatatagtccctggttacagggatgtaactgaaagtgtgggaagtttggtaggggacttaataaaagtataattttttgtgcattaaggagcccgcacctactatattgcttcaattctgtaacccttcatcagaatctctgtgactctgagcaacttcatacttccctgatagatttctctaatggatctccatgtataagagtaaaagccagcatttttttctgcagtgcattttccatataaagtatagtctgcatattagaaatttaatagataatgcagttttgtctcactgggacagaggcttacgcagtcataactctccacctgcacagtggaaagaacatgcctgcagggcctgaggagcaggttgccctagactgtggaagctcaggttcagtatgcttttctctccatgaaggggcattgttactgatggcccagtctaagaagaatgtccttttcaaacttagtggaaagggttaatttaaaaaatggcatcacatcccattagtatcaggcttcccttctgaaggagcagtctacttgggtgaaatctgggaaagtgtggcgcgaatgacctgctggcttctcaatcttaagatgaatttcactgaaggatgcatactgtcatgcactgcgtaatgccatttcagtcaatgacaccatatacaatagtggtcccataaaattatactgtatttttcctgtatctcttttgtttagacatatttagatacacaaataccatgatgttacaattgcccacagtgttcaacacagtaacatgctgtatggatttgcagtcttggaacaatagggtgtaccttatgcctacataagtagtatgctataccttcgaggtttgtgtaagtatactgtattatgttcacacaatgagaaactcacctaaggtcatgtttctccgaattcatccacctcattaagtgatacatgactatatatatatacatatagtcagccttccctatctgtgggttttagatctgttaattcaacccatcttggatcaaaactgttgggggaaaaaaatttaaaaacaacacaacactatcaccaatacaagtaaaaaaatacagtatagcaattatttacataatatttatattttatttggtgttacaagtaatctgggaatgattttaaatataccaaggagaaggtcagtaagtcatatgcaactactacaccatcttctatcaggaatttgagcatctgcggattttagtattcatgggggattctggaaaaaatcccctccaggtactgagagatgaccatgcgtatacacacacgcatgcacacacacacacacacacacacacacacacactatacccacagatacataatatatttctaaaatatacgcctaatagtcatttgccatatgtcatatactggtgtgactacttcaggtatgtgatatattagaaactggtaattttatttattttaaattattattattattagtagtagtagtagtatttgagacagaatctcaccctgtcacccaggctggagtgcagtggcatgatcacagcttactacagcctcaaacacccagataaaagtgatcttcccaccttagcctcccaagtagctgggactacaaatatttgcgactaccctaggctaattttttattattattattttgatagagacagggtcccactttgttactcaaactggttttgagctcctgggttcaagtaaccctcccacctcagcctcccaaactctcaggattacaagcatgagccaccacgcctggtcattttagtactttaataggaatgacacataccttactgaaaatgtaatttagaaaacagagaataaggtggaaaaatatgtataatacttcatattataatatataatataacatagtataatataatataatataatataatataatatataatgtgtcatatatgaaacctcggtaggacttttgaacagctcacagtgcccgtactcaagagtttaggaaacctccataggtatgttaatacagaggaggagtgggacaggcctgggtgggtagaggacagggctcaggaagagaaagccttatggttctgagttgtctagcacagccttgcttgagggaaactaggtggcctagcacaaactgactttctcctgcaccagctcatactgttaccaaaacaccagggatccaatctcagcccttctggtcactgcacagaaagccaatcactgagacaactattattgccaaggaagaaggctttaaccgggtgctagagctgaggagatgggagatgagtctcaaatccatctccctgactcactaaagttaggggtttaacatagcagggaagaaatgtaactgtgttggaaaacaggaactagggaagggtaaggagataaaatgagaggcctggcatctcattgtctgaatgcaatgagctagtgagttttacttctttgatactttttgagaggcttccagggcctttcctgaggagggaactcagatgaaacaaatgttaagtttcaagctttaagacaggaagggccaattcctatttttatccaaaagaagtgtctatgggactattggggaggtttcagtactttatgctcagaaaacctgcctatgccaaaaattggggactatgacctcaggcaagtcttagacatctgcaaggtacccatggccccaagtacaagacttagcatatagctagtgctcagtaactgtgtttttaaacagagcagtgagcacaacagacttcatggtcatccaaagataattttattatattgtattttatttcttttatttattcaacagtgttgtattgattaactcctttatgccttggaatgatctggtccagtgaggggaaggtgtgtgtgtacctagatcaacagcagataggctctgtcctccaggtgttccgtttttttttttttttttcagagacggagtcttgctctgtcacccaggctggagtgcagtggcgtgatctcggctcactgcaagctctgcctcctgggttcacccgccattctcttgcttcagcctccctagtagctgagactacagatgcccgccaccatgcctggctaatttttgtatttttagtagagacggggtttcaccatgttagccaggatggtctcgatctcctgacctcgtgatccacccacctcggcctcccaaagtgctgggattacaggcgttaaccaccgtgcccggccagatgttcctttttagagggggacaaagatctgtggacagtcaaggtgagagggaaatacacttgcatgtatccctccttatgtaattgtattgaataagttattgaagcagccgcccggaaatgccagatcccagaataagacagatataatgtaaatagactttcacacaaccataagtgttgtaataaaaatatgagataagtgttgcttctttactttcctcatgtggatattttctcttcgtaactcatctttgagtccttgaacccaacaccttgctcgtttagtgataataatgataatggtaataatgacaatactggaaacctttattgggtattcactgtgtgtctggcatgatgctgagtgttagacatgtgttattacatcctcttaattcatttttatggtgtgcccaaggtcgcacaattagcaagtagtagcctatagacttacagacatgttactgaactccatacgttcattgcttatctgtcttccagagctctgccttctggtggatctttctatacccaaacaagcaacaggatattttatagaaatatatgtgtatattattatataatatctatatatgtattgtgtgtatatatatacacacacagacacacacacgtacaaacaccatatacagagtgaatagggttttctacgtgctgtaacattctgagcagcaattgccttactcctgaaaaatactgggtgacagagaaatggcttcttgtccaacaagtagatacgtgcacttttcaattgagcccttattctttacaagttttagcagctgaagagtcagaaaggggcaactggcaaatgcccttgaggtggtagggtagtcaagaggccaagaggctgttgaccttatagtgatgtcctagggctgtaagccttgctggatatcaacaaaccaggcaagacagaacgagatgtcactgtaccaaattaatgagcttttgctcccggttggtcttgtcattgattacacattaatcttggagcaagttggtgatttttgtttcgttttgtgttgttcttcactcagggagtcaaaatgagaggaaagggggatgatttgatgcagaacaattcactgcaccttaaaattgtcttcactttatagtggattaagctttgagaattggagagcgtggtggttttatcatattggtacaagataagcttaaaggttgagatagataaattgtcaaaatctagaatatggtacttctgagaagaaatatattcatcttttttttccctgttatactagggcaatcagtactctgttgagagaggcttagctggtgagaaagccctaggcaattctggaaggagctggaagtctactctcttaaagcagcacacaacctgcagtgtctgtctatcttagaggttgcctgacatggctgacttctcaaattcagtgtcctgttctcagatccacatgggacacaagcaggcttctaagtaggtctccagaagtatgtacttctcaaacagcaaaacctgcttttggaggggcacaaagcaagtgcaatttaaggagagagaatgtgttaggcttttgatgtgattctgtattggtagccagccctgtcccattttctcaggagacacaatttcgtggccattacgcatcatgattatcaagagaagttccccagtagtgtttgtgaataatggccttgagtcagaggctgtgtagggatgagggcagcctgtgctctctggagaactccctaggttcaggctggagggaactcacctgtgtgtttgttagccctctgcaagccctgtgagtgagtcccaacgcctcccttctcctccacgccacgtccaggggaagagcagtgggtggcttgggtcagattgttagtccctgctttgaaagatgttttgctaccaaatccagttttcactctgctacaaacacaaggctatatgcacatcctaaaaagaaaaaataataataataaaaccagagtgtgataacttccaggcaagagaatccttcatgtcacacagatttaatgatgctgttcacacctgtgcgtacaaatgtttagtacctctccagagtctaagggagctagtcaagcgttcaggcaggatccggaggtgttctggattgtggctttttggattctagattcttttgtgttttgtaactcccattccatatttgtgtcacttggagctggttgtggttcctgaacttacacaattaaaattctttttttttttggatacagagtctttctctgtctcctaggttgaagtgcagtggcgtgatctcagcttactgcaagctccgcctcccaggttcatgccattctcctgcctcagcctccagagtagctgggactacaggcgcctgccaccacgcccagctaattttttttgtatttttagtagagacgcggtttcaccatgttagccaggatggtctcaatctcctgaccttgtgatctgcctgtctcagcctcccaaagtgctgggattacaggcgtgaggcactgcgcccggcctacagttaatttttttttttttttaagaaacagggtcttgctctgtcactgaggcagtggaataatcatagctcactgcagccacaagcagtcctccagcctcagcctcccaagtaactggtactacaggtacacaccactgtgccagattaatttttaaatttttttgtagagatggggcctcaccttgttgcccagactggtcttggacccctggcttcaagcagtccccttaactcagcctcctaaagcactgggattacagacgtgagccactctaccctgcctacatttattttactaaactatgtttttttaaaaaaaatcacaaaagtaatgtatgctcattacaatgagccagaaaaaacacagatacattttttttttttcaaaaaactgtaaatagtttcttacataccacctagattcagctttcctgatatctgtagtggtgagttattgttttttttctcttcatatctttgtgactcaactaaaaagtgtcaacagatatatacataccataggtctactttttcatttgtttaagaaaatagaagtatactattcactggattatgacaacctgatttatttcacttaccaatgactcttgggtgtctatccagatgaatgcattgaaaaaaatgggccaggcttgtaagcatcccagagtatgcatattgtacagtatatcgaattaaacaactgcatgcttaattaacttatgtattgcttcctacataccaagaagtgttttcagttcttttatccttttaacaaccccataaaataggtactgtttgtagctctagtttctttttctcttttttttttttgagatggagtttcactcttgtgaagagtgatggcatgttctcggctcactgcaacctctgcctctctctggttcaagcaattctcctgcctcaatctcttgagtagctgggattgcaggtgcctgccaccaggcccggctaatttttttgtatttttagtagagacagggtttcaccatgttggccaggctagtcttgaactcctgacctcaggtgatctgcccaccttggcctcccaaagtgctgggattacaggcgtgagccaccgcgcccagcctgtagctccagtttctagatgagagaagtaagacttagaaagatttagtagcatgcttaatggtctgacagccagctagtcagacagagctggctcctgactattctctgaatgcctgtgctacactgcttctccattacctttccgatagatctttagttcatttcgtcaagagttgttactacacacagtgctccgataaacatatctgtaaacatatccttttactttggtaattttacctttataaagtacaatagaattcttaagatgatattgttgtatcaaaaatgaatgcatttgtattgtaaatgatactcgagattacattccaagaaggttgcaacaaatcatacacgtgcaagcaataatagtttgcagatttccccaggctttcatcaggactggaattttcaatacgtaacttttaaatcagtattttggatgaaagtgatgtcttgatctcagtgtattttaatgggtattttcctgaccacaagtgatggtgatcatcttttcatatgtgtattggactgtggcactgtggacctctctctttctccctcactcctcaggcaaaaataattgcttctttctcattaatcttgtagtgaattatgtatctttgacttataatggttatcagatgtatatttattttgttcaacaaacatctcttagacctacctgtatgccatgccaagcagtgtactagatagtcagtgggaataagcatataagtaaataattgttcctgtcctacagaaaccccaaatctagttaagagcagactttcagtggatagttacagaagtgtgctaaatgcagggtaaaatgtatgcataagttattgtgatgtttgtctgtttccatactgtattattagtctgttcccgtgctgctaataaagacatacctgatactgggtaatttataaaggaaagaggtttaattgactcacagttccacagtgctggggaggccccacagtcatggtgtaaaatgatggaagagcaaagccacgtcttacatggcaacaggcgagagagtttgtgcagggaactcccatttataaaaccatcagatctcgtgagacttacacactaacatgaaaatagtatgggggaagacccgctcccatgattcaattacctcccaccaaatccttcccttgatatgtgggaattatgggggctacaattcaagacaagatttgggtagggacacagccaaaccatatcacatactaacctggaaatccaaagactatgaccatgtcttattttcatttggttcatacccaaaatagaactggtcttattaagtatcattaaatgctttttgctttgaagagtatgttatgaaatgatttagtgtcactgaaagccaggcctatgtcatacacttgtttctatcctaaatttttaacctactgccttatgtgtaggtgatacagttctgaataatgtgctacgtgacctcgagaaattccatgacattgctgtcaaagaagaagagcataaccagtgccaagtgggaaaagcccagagattcaaggcaggaatctgttatttccacagagctctaggcattcctgttcagcccccttgattttaacaaaatcttagaactcaccatgtgaaagctcgttctataaggatctgcatgtattcatccaaaagatgctatagaccttcctgagatgtgtgagaccatctgtgagagtctggcctcagcttgcacccctgctctccttgtttgcctcagtgattgacaccctgctgagttccccacttttccttttagcaagtaatagatgaaatacacagaaagcaaacactgtcctgaggtcctaataactttgccaatataagctgagaaagcaaaggcaaaaaattttactagagaaagcaaagcaactgacattctgatatcaaacctggttatagattcaggaagcatttagaatattaattcccattttagtacattggtatgaacaccacgtggtaaaattctacatctgtgaagtcccttgagatacagatcaccaccatccagttaccttccacatcctcatagttcctcagaaggctttcctatgtatttactgttttggattgtccttttatgtcaaaatttaagcttaataagcaatcaaacaatgaaaattaagtgctatttgagtatagtgtcctgtattgggcacaaagaaagtcagaagatcctcagaacacaatttcataccttctaggaacacaaagtctctttattctttcagcatgaccagatcctccatatttttcaggtcataatccaaataccaacttctttttaagaagccattcgtatctatactattaaaagtaggcttggctggacatggtggctcacacctgtaatcccagcactttgggaggccgaggcaggtagatcacttgaggctaggagttcaagaccagcctggccaacatggtgaaaccttgtctctactaaaaatacaaaaaaattagctgggtgtggtggctcatgcctgtaatcccagcctctcgggagtttgaggcaggagaattgcttgaacccgggagccagaggttgcagtgagccaagatcacatcactgcatgtcagcctgagtgacagagcgagactccatctccaaaaaaaaaaaaaaaaaaaaaaaaaaaagaaggctctttcttgcttctttctaccatagctctctttgtttctttcattcactacatgtgtcatgatctagaatgattttattcattacttctctattgtctgatgccaccattaaaatataaactcgctgagggcagagaccttgtctgtcttattttctgtgtccaggaaattgcctggcacaaaggtattcaggtgaaatttggcaaattaattgaatgtataaatacgtacatacatagatccatgctaactggtataaatccagatacaaagaagatcatattgttgtccttaagtaatttgcagcctgttggggagacagataaatacatgagagattatgtcagtatgtcaagtgccatagtagaagtaccataggttctctgggtggggaaggaagagctttctggaggagaagagacctgaactgaatccaaagaaggagtaggaattagactagtaagggaggctgattatttagtgagtacatcccatatttcaggcgcctctaggtgctggcagcatggcttattgaggaaattgcactaaatcacaatacagtctgtgtgtgcaattggtcagttctgtgctaagtattctgacatttatcccagaggaactaatgcatctttgaaaggtctggggcaagtaaaagggttgatgagatatgaatttcacacacaaaaaattaccttggtgtcatgttatggattcacctggcaaagaacaaaactggtgaccatgaacaaagtagtcagtgaaacaagaagtaagagatgagaaggggccaacctttttagagagtggaaaaatggagtatgacatatagagtgtgggggtgattttaatagattttgtaagggaaagaagcacaggaccagttgttgggtgagttagaaggtgaaagggagaaacatatctgcaatgactttctcacttttgtcttggacattccagaggatggtgagattattttctaggagaagacggaggaagacaattttggaatgggagatggggatgaggtgaagagacaattaattaattaattaattttttgagatggagtctcactctgttgcctaggctggagtccagtggcacgatctcggctcactgcaagctctgcctcccgggttcacgccattctcctgcctcagcctcccgagtagctgggactacaggcacctgccaccatgcccggctattttttttttgtatttttagtagagatggggtttcacagtgttagccgggatggtcttgatctcctgacctcatgatccggccacctcggcctcccaaagcgctgggattacaggtgtgagccactgcacctggcctattaatttattttttaacagattgaggttgagatagagttagacaactcaaatggaaattttcagataattaaagtatacatggccttggagtccaggcagaaggactgatgtgaagacatatttggaaggcatgagctcaagcagtagaagctgtgttcataggaacctagggagagtgtgcagaagaaaatgagagaaaaactgaggagatccccagttcctagacatacagaagtctgaggaggagttggagttgctgctgcttgaaagttggaagaaaaattaggcagaggaacaagtgagaagaacattaaacaccacagatagttaagtaagaaaaatatgtgtgaagtagccaccaaatttatcaatgcagaagacattggctcagctgaagtgccggagggaaggttgggtaacaggtggctgagaaggtacatctgtctgtcctagtgatgcccactgagcacctctgactagtggatgagcagtcagggaatagggacaggatatgaagacagctctctcaagaaggagctgtgaagggaaataaaaggaagagacgtgattttgtagaaaggaggtgacagactaaaggaacattttcctttctttaagtgagaacaaacctggccatgtttacatttcccagggagaaatcagtgaaaagagactgaaaatatagaaaaattagtggagaatagaactgatagagaactgatagagaattgagtggtagagaaggtatggaatccaaggtcaggtggaggaattatccagtcgtagtagatcagggagggcaaggggtggaccgaggggagctttccttttaccaagagaggaggcaaggatgccaggatagggactcccacaaatcagctttcctgagccatgtgggttaaggggtgtcctgccatttggttgtatgttgagtgggagatggacgtgagatgggacttgacattttggaagagtcactgagaagacaggagagggacagctcaggagctggcatgcactgtgctgaataatgctgagatccagatgaagccacaccctggggtcagcatgactgtgctttttttgttccagtgagccttgtgtaacacacaagaaggcatttggttatgattccaggaggaaggacaagaggttggggaactgaggggcttgagtggtagataagaggtcttgaccaaatagagaaagaagaaagggaagccggaggtgggaggaggacaaacagtgaaacagtaggaccttcgatccattcatatttaagagcctgaagaacacttaaaaaataatacccagaggagtgtgaatttttgtattataaaacttggaacatgtcttgtccccggggaactctgtgaatgggaactggtcagagcaggtggagttaatcagaaaagccttttataaaagctacttttaagaaattcactcagctctctaggagaaggcactgctatttttctgcatttatatggaacaactagatctacttgtcaattccccccacatccctgagttatttgtgagtgacaacccacctccacacctttggggaacactaagcagccttctccatcctggttatgggagattttctccaggcaactgtctattcccagaactaagacttacagattaaccacaaccggcagtccctgtgataccattgtcaacacagagtgagtcgctcagatattaggctgaagtaatactggttttcttgctagtcaccattttttaccctgctccttactctgaagcccattccaaaatttcttttccttttatagttaaaaatatattttttagagtttggttttctggagtctaagttgaccttactttggcttctccaatccctctcctactgggagccacattccttggtattgttcatttcacttactaaaattctcaataaaggaagggtattgtgtgttctagccacggtgaactacttataggttctgccaaggcaacacgtgcccttggaaggccatccatgtcatgggtcagcacgtgggctttggccttgggctgtctgggcaggaatccaggctctgtccatttactagctctgagactgtggggagattttttttttaagtctctgtgctccatttcctcatcagaaaaagtatatttatctaataggcttatggtgacactgatgttgagtgtggatcacctactaaacatacattaataatacaacaccaacagacaaacacaaatcttggatcttgtacttctgtggtctttgctggggatgcctttccccttctattcaatttgcctacaaaataatactgatagccatttatactgacaatttactatatgccaggcatggcttcaagtgctttatatgtattaacaaattcccaaaatatttttatgagattggtactatcgttataccctttttgtagacgtggaaactgaggcatagggaggtaacccgaacagggtcataaagatactaagcagtaaagaagagatctgaaccagtcgagctccagagcccaggctttgaaccccacaaggaccatcttttgtgggatccttccctagccatctctatccacacagagaataattttttttattattattttttgagatggagttttgttcttgttgcccaggctggagtgcaatggcacaacttaggctcactgaaacctccacctctcgggttcaagcagttctcctgcttcagtctcccgagtagctgggattacagccatgtgccaccatacccagttaatttttgtatttttagttgagatagggtttcaccatgttggccaggttggtctggaactccttacctcaggtgatccacccaccttggcctcccaaagtgctgggattacaggcgtgagccaccatgtccagccaagcctacttttaatagtatagatatgaatggcttcttaaaaagaagccacacagagaataaattactgctcatgtgctctgttttacatatttttccttttgaatgtattggtttgaattgtaagcactttctattcatctcttacctttaccaggaacatttcgaaggacacatgctaccttcttcatttttgtatacccaacaccaagtacagaccttggtgcatagtagtatgttcagtaacaagaagcgccaagttaaatgtaatgaggaaaggagattttttaaaaatatgttatctgtgtcatctgtgggtttaattcatataaagcatgtcccatattagttatcacaagtaatcaatggttaacagaatatagtttactcaaatgtcatgttttgctctaatctattgtcattgcacttgagggaggtgacagatattaatttaatttcagcaggttgcttgacactgctatgctgaatgtctgtaatgatgctttcgtgagtgctggaagcttatctaatgctaaagcagaggtacatttgttcaaatacaaatgtaatgtctggcgcattgaattcccagtcccaagggctgcaccttgtgctgtctcctgacagttcactttaggaaacaggacacaggtctccactacggacctggctcaactttgagcaaaggccaccagaggtatgtgtggcactgaagcgagtatccatggctcaacaggcattatatcgtaggatgaggaagatgagagcaatagtactggagaactttagaaaaacctttttcttatttcaggtgaagtttccgaaatacagtactgctcctccataaatcaggctggggtgctttcagctcttctcctccttccaaagggaaatggtgtgctgaagagttattcctcagcacagctttatttctttctcctgctgggatgtattagcaaggtcatcacctttggtttattggcttcaaacaatctgtgattgcagaggattatgacttcttagcttgcagaagcaggagatgcaatcaattcctgaaaggcacaggactgcgttttctttcagaaatgtatatttatttctgccatcacttctggggaccaaaactttaaaaagacttttgaaaggaatttatctttgaatgtcctgcatcatcgccccttttgaatgagaacattgagtcagaccagtgtgaactatctgagtttgaaagaaataagataatttcacaagtttgtcttccccatctccaatcctaaaccaaattaattgggaaatttatattcattgcattattccaaacgtataccctttgaaataatcgaagacttggattagccatgcctgcaggttgatgaatacattctctttgctggggcaagggaaatgtccggaaatctttggaacttgattggtatttattgtgatgtcagttttctttctaattttgccattatctgtcagtttcctagattatttttcttaaatttggtattgcccttctcccaattaggaatctatcacttctgacctcaaaaacgagtcagaatttacactattctcttccttctacattacatgggacgttttccctttagggttacaaaaacacagtcccaataatctctctcttcaaaacttaacaaattaatgtcacaacatggagactatacttttgctaggcagcaggatgtcccagcctacaataaccttagcagtcagagttttgctgacaccaagtgctgcactgttaatagaggtctggcctctgagttcccattttggcagctccccagaagtcaggggttgatgttctgatgctgatatgacatagggatttgtggactctgcttagaataaccactttgtttgtttatttgagtagttttatggaatctacagaaccgcaaaactgttactcaaatggttgctgcctgcttattctttgggccatctaagcacatgatacaattgctcctcctgtcaccaggaagcatgtgggaaggaggaaggaatagtgtgagatcagctactgtctggactgcaggatgcagggtgcatctgtaatggctgtatccatggtcgtcctgattagcttagctatactagctagcgtggtggcctgaggtccatcaatttgccacttctgctcttgggaactaagtcatccatgttccccatctctccaaacataaaactctacaggatatcatcagactgaaaatatcttcaggccatttttcttattagactcgttgtagtagggcaaagatcaaggtgtagctaccaagccagtgtataatgacaaacatcaacttgatgtgctaagttcctgaaataggcctgtacactagagcagattgagattttgaattttggtccctcttctctctacttcctggacctgctttcttcattgatttgacactccctgccaggccctagtttctacatcctcttctcttctgaattatttatccttgtaaagaagatagagttgagatggatacctaatctgtccaagctgtggttaaggatgccctctctggacctcattttcttcaactggtgtattagaccacttcctttctttcttttttttttttttttttcttctttttgagacagagtcttgctctgttgctcaggatggagtgcagtggcttgatcttggctcactgcaacctccgcctcccgaggtcaagcaattctcctgcctcagcctcccaagtagtggggattacaggcacctgccaccatgtccggctaatttttgtgtttttagtagagatgggatttcactgtgttggccaggctggtcacaaactcctgacctcaggtgatccacctgcctcagccccccaaagtgctgggattacaggcatgagccaccgtgcccagcctagaccattttcatactgctatgaagaaatgcctgagactgggtaatttataaagaaaaacaggtttagtggactcacagtccacatggttggggaggcttcacaatcatggtggaaggtgaaggaggagcaaaggcatgtcttatatggcagcaggcaagagagcatgtgcaagggaactgccctttataaaaccatcagattggccaggcacagtgactcatgtctgcaattctagcactttgggaggccgacaagggtggattacttgaggtcaggagttcaaaaccaccctagccaacatggtgaaaccctctcctactaaaaatacaaaaaaaaaaaaaatagctgggcatggtggtgggcacctgtaaatcccagctactcaggaggctgaggcaggagaattgcttgaacctgggaggcggagggtgcagtgagctgagaccatgtcactgaattccagcctgggcaacagagcaagactctatctcaaaaaaaaaaaaaaatcagatcttctgagacttattcactataacaagaacagcatgggaaaaacctacccccatgattcagttacctcccaatgagtccttcccatgacacatgggattatgggagctacaattcaagatgagatttgggtggggacacagccaaaccgtatcatctggtaaatggggttattagtacttctgcattttagactggagtggacacatatatgctagtttaagattagattgagtttatagtatttaaccacagcataagtttatcagaagtagagtggtcatgaagaattgctagtaattttgtccttgaagaatagtttcctaccatatctgagaagtcaactattttgttttccattatccccttagagttgaaccttgcattatattcaagagcagtctttgcagttgatgcttcctcttaagggaatgaagatacaacttttctcagggctttatgccagtcttctcatcatcaaggccatacctgatctttggaggaaatcagagttcaggaaattcctgaacagtagctctgccagcattcacaaaaacttattccctcacatatttatctcatatagacttattgcaaggaagaagatatttgaagctccagatgaatagtaggatctcattaaatgtgagttccctccattagtggcatgttccatacattcttctctgcttgatgccagaaggtattggtgttggtccactgaaagatgcactagggttaggaaaaagcctgctctgagattgtctaaccaaatctatgttcctgtcttggacttgagtagctcttcactgcatttcatctcagttttgtgctgtttctgggaacaggattccatggaatagttagcaaccatcttgttgtttgccttagaagattatgcaactgagtgcccatgagataccagtcaggatgtaaatggaaacaggaaggaaaaagactggtgaagggctgtgtcccaaagtctaagcacaactgatggcttgaggccaagtcaaaaattagagaaaaggggaagtgagattttcagcaattagtcagtatttaagaatagatagcttcctgcaccatactgcaaagatcacttttgcagattttcaggaggcagtaaagaatagttaacattcagatatgctccaatcagatgataataggggtaatttgagtttacaggctaccagttcttaaatttaattctcaagtttcaaagtactttctagaaatgttagaaattctaaatgcaaattgaaatagcttcacctacttgaatttccctcaaacttttgcaaagacaatcaaaacagtaaaaagggacattatcactttgatgaatcctgtgagaagtaaatagtatgttctgtgcatattgagagtaggtgtgagcatgtcctgtgttctaaacttagcactgccactaattgtgtgatcttgggcaaattgttttatttcatagaatcttggtcttctcatttttaagaaaaagaatttgtactagacagactgattttcaacctagctctaacattctacatttctaataattgctgccccaaatatttgccttgtttacagcaggtatccttgcatattttggaatgctaatgataaaacattgctgttcctatttcttctaggaattttttttaaaaaatgtatccattataactcattattggttgactgcaggtagacccagacaggtcaacccactatcattttgcaggtaggaagccaggtattttgtgactactaaattagaggacttaaaatggtaaatattagaatattatctccaccaagtttccatatctctttggacatttatttctatattctatattagggataataataatttgatcaattaggttacagtgaagagtaaatattttaaggaccctctaggcacattctaagaggtagaaacataactgaaactcagctcttctgattgtaaaagctaactgggaaaagagctaactataaaatacctaaatgcttctgagtctcagtttcctcatttgtaagtgggtattccaaaaattattttcttttcttttttttatttgtaagtatttttttaatttcagtagtttttggggtactcgtggtttttgattacatggatgaattgtatagtgatgaagtctgagattttagtgtacccatcacctgagtagtgtatattgtgcccaatatgtcattttttattcctcacttccccttccgccctcccttttctgagtttccagtgtccattatgtcactctgtatgcctttatgtacccatagcttagctcctgcttattaaatgagaacatatggtaattggttttccattcccgagttacttcactgaaaataatggcttccagcaacatccaagttgctgcaaaggacattattttgttcttttttatggctgagtagtattctatgatgtacatataccacattttctttatacactcaatcgttgatgggcatgtaggttggtttcatatctttgcaattgtgaattgtgatacctagtagtgggttcctggattgaatggtagatctacttttagttctttaaaaaatctccatactggccgggtgcagtggctcatgcctgtaatcccagcactttgggaggccaaggcgggtggatcacgagggcaggagatccagactgtcctggctaacacggtgaaatcccatctccactaaaaatacaaaaaaaaattagccgggtgtggtggtggcgcctgtagtcccaactacacaggaggctgaggcaggagaatgacgtgaaccccggagaccgagctcgcagtgatctgagatcgcaccactgcactccagcctgggtgacagtgcgcgactccatctaaaaaaaagaaataaataaaataaaaaataaaaaatctccatactgttttcccaagaggctgtactaatttacattcccataagcagtgtataaacgtttccttttcaccacatccacgccaatgtctattatattttcacttttgaaattttctttcttttttttttttttttttgttttttgagatggagtctcactctgttgcccaggctggagtgcagtggtgtgatctcgactcactgcaacctccgcctcctgggttcaagtgattcttctgcctcatcctcccaagtagctgggattacaggcatgcatcaccatgctcagctaatttttgtatttttagtagagatggggtttcgccatgttggccaggctggtcttgaactcctgacctcaggtgatccatctgccttggcctcccaaagtactaggattacaagtatgagccactgcgcccagccaaaaatgtttttcatagttgaagttgctattgatatctggtaaagttaatgatgctccgtgtgctctacaagttgtagagtcctctgtgggtgttagctatccttacttgggagttggagcaggtaaaacttgacctttgtgctttcctctgccatagctgggggtgggggggcatcctggatacaactgtctgttcagatatcattgtgtttcactattggactccttgagagtaagtgtttagtttgcaacttcttggccttgtagcaccagagttaccacatagtggtactcattaactagttgtttaataaatcaatgaattaataaatcattgattatattttagctaccattctattgatcctaagcctggaaatatgctaaatacattttatactcagtggctgtcaatcctgcgaacattaacatcttctgggggacattttaaaatagtatatgtgtggccccacccaagaccaattgaatcagaatctctaggactgagcccaggacacaggtagtgtaaaagctacccaggtgattttaatctggaaaatacagagaatcgatgaactttggcccattatttttctggggtttgcttgactgagctgctcattagtgttgctgataccttatttctgggcttcctagtttcagtgaacatgttctcccatcttgccatttgtcatggctaaaatattctgcatttacaaggatgcaaattcatcatctacatgtaatctcttttgcatttagacctgaacacgatcgtgctgtccaggtaaatcataaacttagatccctttgtggtgtgaaagaaatacaaattaggatggggaaaattaatgttgacagagatcactgatatgctttaaattgcagaggcccgggtctcagattggtttcagaatcacagctattgataatcattctataacattataaagtgaggaggcagtgcctggaaagtggtttgaattggagtctaatccccagttaagcatttagcttgcaactgtgttggcacaaaccagctaaaatttaccattgctgcgaggggagtgctcaccttgaaggtgcttctgattctacagaaggcagagcagacaagctcattttgcatgtttgtcaagggtgtccttagagcaaaacttggtctggatttcttggaattatggtgctttgtttctcttggatagttaacattttcattttcctgagtcttgctaaggtgtcattttgtccaagaagcaagcataagttgagctggagacaggcatacacacatgtggtgggaactggggagaaagatcactatcactctaaggcagcaaggtataccttttctttgtcaccagtgacaaagttaaataacaacttaagattccagtaataacacaggtgacagtagtgctgtgagttgcttcaggaaagggggatttgatgccaaatgcatggtatcaggggagcaatcagcagccaaatgtgaagttatttttactcaagacaatgctttctactttgtttttttaaaaatttcaggatatactcaaatatatcaaaaaaatcatgtaattctcaaaaataataatatatttgtagactatattaatactatagtatgcttctaccagtgtgtatggaaggggataaaaattcacataacatcagtgctttgtaaatgggggatcaaattgactaatgatctgcttgacacctttccccatgagaacatccccagggtataactgtcaacgtccccaaaccctgtgctttcctaagcttcctggaagcattcaagtctgtgaatattactgctgttatggaaaaattggcttttgtttttccccatgagatatttttcctgtcttactagcatgtatgaccagcatttgcagtgcatttatctcctattacccttttgtttttctttttgctcttacctttgattccagaaatgtttttaaaataatggatgatagttaatacacagcatggcaggcaggaaaaatgaacagcagtgagttcattttgatagactatgctgtctgcagataatttaccagggcagagtgctgacatacacaaccctaaaaaaaggacttatccctgttcttaaaccaaaatcattcttgaaagtttccattattcataaggcaacatctctgaaaactgcagggggctttcccacgatgatgcctctgagctagtggctctctggttcaggagttacaaacgagcaaacatctgtatttgtgcacttggggagattgccagctttcagaggactttacactgaaggccagcatggtgaaacagtttcctgtccttattaccaagtattttccccacccgcttccatgctcttctcagtgagttctgacttctgagattctgctcttgcagttgtttttgtagctccattgtgttgactttatttcatcacttttctgtcctactgctactgtaaaccccttgatggtaggaccacgtttctttgtatgtactggtttactggagtgtacattaagtaggcttatcaacattgaattagttaattaacagccaaaaaagtatttctggagctcgctacataggatttaagtacaaatgcctctcaagtatttttggtccctgagagtcttctaggagaagaagggtagggcaaggatttttatgagtcttcttaaaattaggaaggaaattagacaaccagtgtatatttttccaggattcaactccacagcatgtggtttttccagaatcacacggctataatttgtggtaattggtggggattataaaaccacagttatcagcattaatacatttcatagccagttccaccacagttgtatcttaggaaattctgattgcaaaactcccctgagatctgctgaaattaccttttctttgaagggcagattccccatgtcttgattgagaaggctttgagcagatgtggtttcagaaggagttagtggggaagcattagaacactaggttccctggacttttgaagaagtttcacctagaagccttatctgactaaccatattattaaaaaaagaaaaagttctgactcctaagaaccatcatatctttccaaattctgaagaaaaaaaccaaaacaaagcaagatgaaacagaatgcacctgattcaagcatgcgatgttataaagccctcctgtgttggtgttgtgcctgtgagctggctattttcttgaatgtgaagataataatttataatgagatgctcagatacataaatacacacatgaacatacaatgccagcttccgtgtatcccagtagcaaaatgaagcaaggagagctgagggttctgcaaataatttgtattcaatatacagcagccctgccacttattttgcagggtagctgatgactgtttaccctaagcataagcataatgagtctgttaggagtgacctttcctggtgattttgtaaccaatctgtcttaaccttttaattcatttttgtttttttgttttttttttttagagacagagtctcgctctgtcgcccaggctggggtgcagtggcacgatctcggctcactgcaagctccgcttcccgggttcacgccattcttctgcctcagcctcccaagtagctgggactgcaggcgctcagcaccacacccggctaatttttgtactttttttagtagagacggttggtatttttttagtagggatgatttaatatgtctcatcaccgtgttagccaggatggtctcaatctcctgaccttgtgatccaccctcctcggcctcccaaactgctgggattacaggcatgcgccactgcgcccggccatcattaattttcttaagcaaaagaggtcctcccatccattctctgttagcaagcattcattttatgccatattcgaaatattagtttaggatttttaatgaccatactccatttattttcatctttcttgctgggatctcagcaaccaagtgctctgattaatacgtgtgtgtgtgtgtgtgtgtgtgtgcacgtgcacatgcctgtgccctcacaattgtgtgtggtcatttgtttgttataggaaccttgctgactactccaaaattcagccaggaacagcagcttaagttgacgaagtttgatttcccataaactcaggctactaaaacaatggagggaaaatgaaccagaaagcctgcaatgtaggcgttttttggttgatctgcttttccagaagctgattagcactctaatctctctcagtgtggtttcattgttagagacggaaaaagaaaagagacagggcttttctttttataaaaggccatgttagtagggagggaaagtaaacataagccacatctctgtagatctcagttttccctaatgggccaattcacatctctttttaattctgataccccaggtcttttcccttctttctttctttccttttgtgacttgaatttttctattaactgccacagggatcccacataaaatgtatagtggaaagaagatagaaaaaggatgagtaatgcacaatttctaagggttttagaaatcatttgttctggggaaaaattcattctcttctgatctaaaagtataatccccttctaagtctctcctctaaggctaagccacccttgaacatgaagcagttcttaactactgaagcatattcatggagataaagtgacacagaaggagccattgctttcatacctatgagagcctgtgcatttcttatggatgatttaatatgtctcatcatcagcatgctttaattgcatgtaactgcaattttaaaaagatttgttctatttttcctataaaattatatatataattttaattttataattcagtgaatatatatatataggtatatatattttcactaaaaaatggaaaaatacagaaagtttatttgctaaaaggcaaaaaatagataaaaaataggtattgggggtaggtggtcagaagctgttaattccttttccccttttgagacaccttttagcctttctttttcctactcctctttctcccttcccgggagaataggacacctctgctaatagtctatgtgagatgtgaggttgcatgctcacatgtggctttgcttctgtggggtattgagaggtgacagtgtgctggcagtcttcacagccctcgctcgctctcagcgctgcctctgcctgggctcccactttggcggcacttaaggagcccttcagcccaccgctgcactgtgggagcccctttctgggctggccaaggccagagctggctccctcagcttgcagggaggtgtggagggagaggcgtgagcggaaaccggggctgtgctcggcgcttgcgggccagctggagttccgggtgggcgcgggcttggcggccccgcactcggagcagcctgccggcccctggcaatgaggggcttagcacccgggccagcggctgcggagggtgtactgggtccctcggcagtgccggcccaccggcgctgcgctcgatttctcgcctggccttagctgcctcctcgcggggcagggctggggacctgcagcccaccatgcctgagcctccccgccttcgtgggctcctgtgcggcccgagcctccccaacgagcgccgccgcctgctccacggcgcccagtcccatcgaccacccaagggctgaggagtgcgggtgcacggcgcgggactggcaggcagctccacatgcagcgccggtgcgggatccactgggtgaagccagctgggctcctgagtctggtgaggacttgcagaacctttatgtctagctaagggattgtaaatacaccaattggcactctgtgtctagctcagggtttgtgaatgcaccaatggacactttgcatccagctactctggtggggccttggagaacctttatgtctagctcagggattgagacaccaatcggcactctgtgtctagctcaaggtttgtaaacacaccaatcagtaccctgtgtctagctcagggtttgtgaatgcaccaatcaacactctgtatctagctactctggtggggacttggagaacctttgtgtcaacactctgtatctagctaatctggtggggacgtggagaacctttgtgtctagctcagggattgtaaacgcaccaatcagtgccctgtcaaaacagaccccttggctctaccaatcggcaggatgtgggtggggccacatgagaataaacaggctgcccgagctagcagtggcaacccgctcatgtccccttccacagtggtggaagctttattctttcgctctttgcaataagtcttgctgctgctcactctttgggtccacactgcctttatgagctgtaacactcaccgccaaggtctgcagcttcactcctgaagccaacgagaccacgaacccaccgggaggaaggaacaactccagacgcgccgccttaaaagctgtaacactcatctgtgaaggtccgcagcttcactcctgagccagcaagaccacgaacccaccagaaggaagaaactccgaacacatccgaacatcagaatgaacaaactccggacacgctgcctttaagaactgtaacactcactgcgagggtccacagcttcattcttgaagtcagtgagaccaagaagccaccaattctggacacagtattacattagaggctcaaggtctggctatgacaggatcatgcactcaggttttttctatcctgtcactctcatccaagtacctacctccaaaaaactgtggtgacaactctgagccatgtagtattgtattatgtattattatattgtttttctttctatttatttttcactccagtaactggatggataaactcatactacaaccaacatagacatttgtcattctctctctctctctctctctctctctctctctgtgtgtgtgtgtgtgtgtgtgtgtgtgtgtgtgtgtgtatatatattccttagaaattttggaggaagaatggctatggtttgagacccttgatctagtaccatcttaatgctactaaaatccattaatgctactaaaatccattaataattattttacttcagagtaaaaacctgctatatttgtgtttgttcctatggatgagactttatactctagtttgtttactgtcttgttagttttaacgatatgagattttcaaatgttgactacatttgaactataaaaatggcagttttatgagcctcaacctaataatagtaaatgttcaataaaaggtaactttataattggctaagcacttcaagggtatcatctcatttaattctcacagcagcccattcaggcagttacttttttttaatccccacttttcagatgagacagttgaggctcaggaagataaggagatgagttcagtattaaatagctggttaggaagcaagctactattaaaactcagttatttttgactttagtctttttattcaaggcacacgattatttaaaaagcacatattcttaatggctgcataatggcttgtatggatttactttatttttatcttaaaaacattaaccccctgcttatcatttaggtcatttctattctttcattaccacaaagaatgctgtgataaacataactcttaaggatacaaataactatgctttagctgggattgaatgcacttgccatatcttgaatctactcctgtgttgtgcattgatggataatatttgatataagcctcgtgatttgccatctaggaaattatttttcagtcttttttttcttccaaagtgtcttagaattgtttaaatatcaaatttctgataaagtctataaaacattatttatttttcataaattgtttatacacagttgtccaggaacagaactgttttagagagcccaataaacctgtcattgcagccccttaccaagtcttaccaaaatcattagctttatctctccatggaatggaccctccgttgggctctagtgttaccatcaaatatacagtgcaattgttctctgttgtgttgttttgctgggaaggtacaatttcatcataaaaacacagaaatatacttgaagtaatgatatgtaaaatgctgcatgaacaaattttaggttatctagatataaaagtgaaagcttgttgtttgagctaaaatattcttacttctcaaaagcctttgttaagtggagggaacagtgagggaagagattgctgctggcattggagagactcaatctgactttgtcttgggatatgaagaggttacatatcagtaagcaagcttgagaccatcaggaggggccacctcttagcctctgtatttcaagctaatttcatgctaagcagggtgtcagtgtaatttgagtaagtttctgctgcagggacagccagttaagtgtgggtcccatccaggaatccagaagcatggagtgaatgctataccttgtgcagcactaatcatgcagagagggcagcctgagtgctggcccacaaagggccctggaggaaaatctgaggctgctctggcctctggcagaggcagataggatagggaaaagggcctttctgctgtacaaaaaaaaaacaaacaatagagaagacaatcatttatgcagaattgtgagtcttcctcttctccaaatgagcaatactgccagagctttgatattttaatttgcaaatactcaatcattacaaaatgatttttaagtacataagatatgatatataatatagcatataaaagtactatttttaaaataatttttgaagtaaatatggtttagaaagtatgtgtttctttaatgtaaatatatcttgtgagtgaggaaaagaattgtcagtttgcatagatcagaacatctgaagtttgttgaaaacagaatgaaaacatataaacctgagatacttatgaaagttacacaaggaatacatcttgcttgtccattcttgtcaagatgaaaagcattaattcacactgcaatcaggttgccttaacataaaaaaaaaaaaaaatccatgcagttaaatgtaaaaattgaaaaaaaaaaagacttgggaatccctgttcatctgtttctcagggctgtcactagcagcagcaccaacatctgtaaaaatagaaagtgaggatggtggacaattatttttgacaaagtccttccataccacctatcctcttgttcttacgcttcctttcttttcaatttcctcttttgccttttgcctccatatgttttggagtagctcctgcccaatgcaaattagatagatagatagatagatagatagatagatagatagatagatagatcgataactgtggaattttcataatattaaaaattatcaaaattttatttgcatgttttaattttgctttgctttatttttaccatatcatttatctaatacaataaaatgttcctttcaatcactgagcagttcctcagacactatcattatcatgcatttctcactaaagcaaattgtttttaattaaaaggtagttttttttttttttttgagatggagttttgctcttattgtccaggctggaatacagtggcacgatttcggctcactgcaacctccacctcccgggttcaagcgattatcctgtctcagcctctcaagtagctgggattacaggcatgtgcctccacgcccgactaattttatatttttagtagagatggggtttctccatgttggtcaggctggtctcgaactcccgacctcagatgatctgcccttggcctcccaaagtgctggaattacaggcatgagccactgcgcccagccagattattattttaaagccatttatcaaaagaatgagaagacagtccacagattggggaaaatatttgcaaaagacctatctgatagagaactgttatccacactatacaagcactattacaactcaataataaaaaaagctttctttaaaaaatcaaacacaaacaaacatgcaagcaaacaaaaacgggcaaaagatctgaacagataactggccgaagaagatatgcagatgacaaataaacatggggaaagatgttcaacaccatgtaagagaattgcaaatgaaaacaatgatagccactaacacttattaggatggctaaaatccaagacactgacaccaccaaatgctggtgaggccgtggagcaacagcaactctcattctcattactggtggaaatgcagagtggttcagccacattggaaaacagtttcgcagtttcttataaaactaaacataatcttactgtaagatccaacaatcaagctgcctttacccaactgaattgatgaaaacttatatattcacacaaagttcattcaaaacctgaattcatctaagatgtcctttggtaagtggatggattttggtacatccatacaatggaatattattcagctaaaaagaaatgagctattaagccataaaaagacatagaggaaaattaaatgcttattactaagcaaaagagccaatctgaaagggctgcattatctatgactccaaatacatgacattctggaaaagataaaactacggagacggtaagaaagtccatggttggccggacctggtggctcacgcctgtaatcccagcactttgggatgctgaggcgggcggatcacgaggtcaagagatcgagaccatcctggccaacatcgtgaaaccccgtctctactaaaagtacaaaaattagctgggtgtggtggcgtgtgcgcctatagtcccagctactcggggggctgaagcagggaaattgcttgaacccgggaggtggaggttccagtgagctgagattgcgccaccacactccagcctggggacagagcgagactccatgtcaaaaaaaaaaaaaaaagaaaaggctgcatggttgtcatgggttgcaggaagggagggatgaatagatcaaacacagaggacttccagggtagcgaaactattctatatgatactaaaatggtggacacattgttattatacattagtccagacttgtagaatatataagtctaggatgaaccctaacgtaaactgcggatttgggcgataataataggtcagtgttggttcatcagttgcaacaagtgtaccactctagggtagatgttgatagcaggggaggctgtgtgtgtacaagggagggggacaggagtcatatgggaactctctgtactttcacttaaatttgctgtgaacctaaagctacccttaaaagaagcctaataaaaaaaatccccaaaatgtctttgactggtttcgttatttgatggtatcaaagttttgactttattatcaacgggcttttgttttttctttgtctatttgtgttgtttgtttattgttggaagcccttcaggggatgacagaagatctatccaggtgccagagtctgctgtagtcttcatgttgagaagtcagctgctcttatctcccacatccctagcaaggcaaccctgtcatttcttactctgttgaggttctatgttagtgctcagtggtagttgtgtgtttagcgtatgtcacctggaacccgcctctgaaattcataactttgtccttggctcaaaattaaagtgctgaaagaaacttatccctttcattctttcctaagctctaatgtaagctttgttcaccacctgaggagacctgtctgctcaataagactgtccatttacaagtggcattttcagatttttgacctttcttatatttcttaatgtttttctacttctgggacttcagaagttcagcagatcagaggggatttctcaacttggtatgagatgcagcacgatggaaagcaatttcttagatttcccttatgggaataaggtgcgtgaattatatgaggtcagaccctagagagggcttttctggaaatgcaggcaacatagcaaagaaataagcattgttcagattgaatttgtaatagttggaggataggtgtcagcttgcttacctggttttgccttttggggcactggacccttagcattaataccgacagagtttatagtttcctattgtttttattgagtccttatagtttctataggggtagcaatgcagtggatgtcatggttccaaggcatgtgtgagatagactttctccttcctcccgactccctgtgtcccttgcactgagttattaagcagatgattctttttaataacatttgttattaaatgattatataatgattctgtttaatacgatttgcgctcttcaatcaaatagaggagtcagataaagaatattgaaatggaattaagagaggagaaagtgagagaacattgtaagtctgatatatctagatgaaattatgctctgaagtccattttccctatgtcaggaatttggttcctgttgcatcagtggagcctgataaggaccagggaagcagaggcattctgtaggtcttgtatgtaaggagctgagtgaagagaacttgagaaaaaggcatcagagttctgggctattttctttccccatcacataggggtaggaggagtcttcccctcactttgagccccatgaatgtatgggcttcaagagagctttacctgtatctctccaaatttggggctttaaaaactggaacataacacttgactgagataatcaaaatggtttgtagattgagatctgatgcctgcctgggaaatgaagagggagaggcaagagctgaccacctgcaagacgatgagctagagatgttcttgccgtggtgccttggagctggaaaaatgggagtgttttcccaggagcatgccatggagactgttgctggggtcctctcaggtctcgttcaacagacttctctggagggacaagcaggcctcatggtgaagagggctagagttgagctgccaggtgacaagcagttgagaagggtgactccacccactatttggactggagatgcacccatccaggtcataagaccacaaggcagagatccagcaagagattctaaagagcgcacccaagaaaaagagtcactttcaccatctgccaggcccagagtgctggaaacctcccagccacaaaagaacagccctcacttcctacacgcttttctctcttgctttcctggagcaaggcggcaagttgagtcaagaaactccattaggctcattaaagagcagatgaccacacgtcctttctgcagtgcaggtggcagcctgaaaagggtgggggaattcagggacagggtgggtgtagggatgaggacatgggagggagaaggggtggatttaatatagttgtatacaggattttgattactatcttcagccggacattttatttacagaaattaagaccatgcgtgtgatttaaagtgactctgggactatctattacaaaagaataaatagaaagcccgggggcctgccagagtttgtatccaggagcaagggagattgctcccgaagaagaaaacctaaagaaagaccatgctttaagttactagtcatgtttgcttaccactgtggttacagacataggtttggatgtgaatgttggtcttgagtcccagtgggtgggcggtggctccctgcagcttgtgctcactgtctgcatttctcttcattggggtcattgttctggtgtaaagtggtgactgggggtaacagtggtgtctgtccaaagcttcttttttgggaagtgatgatataactttggaaggaggaggcatttaccacctactccctaaaacctttctatcgtcatcagcaacctctgaggaggaagcatacccattttaaaagtgactaaatctgaaacctgatgatatgttaaaccaatcaggtatattgtgaaactcaagccgtatttagcatgactatattgtttaacttgatcaaactagaacccttttaagaatgggcactataaatattcatattgaaacaatgggaataaattaggattgtcctgagccaaccaggacatacatggtcactccactcatattctgttgctcccaatctatagaaaaaagtgtgactttatttatacatttttatttttttgctagaagcaagaactaaaaacctatccaatgcttttgagtagtttcatgacatttactatgtagtaccgttaggcatctcctgaaccaaatagcgcagggaatttccatttttttcacttcatgctctatggtattgcgggttacacacacacctatcagaatccagccaaggcacttaaaccaaggtatctgataatgaagcaatgtgtatctcttcaggaatccttacatgttcctggacaggggtcccagtaaacatcctcttcccaggcagaccatattccagaggaagagagagaaaaagagtacaactcacaggacagaaaatgggaaatcagtagtattagatgttttccatttaagagtcactgggatctgaagggggaaaaaccccatatggtttaaaatcagaagacctgggtgaaagtacctcacactaatattgtgtgaggtttggcaaatattttacctttcttcagtgaaaagggcatagctatcataccatcacctctttaaatagaagtatttaagtggtctgtactgtagaagacattcaaatgcacaatatgcaggccaggcatggtggttcatgccaataattccatcactatgggaggccaaggttggtgggtcacttgagaccaggatttcaaggccagcatgggcaatgtggcaaactccatctctacagaaaaatacaaaaattagctgggtgtggtggtgcacacctgtggtcccagctacatgggaggctgaggcaggaggattgcttgctcccaggaggtcaagactgcagtgagccaagatcatgccactgtactccagcctgagcaacagaatgatactgtcccaaggaaaaaaaaatataatacactatacaattttcaattattttcaaattatacaacaggaagttattatgaaagctcctggtagttaatttttcagtaaaattaagtataaaactttttcagccttgcctattctgttcatctgagcccagatgttgaaacttctggtgaggagataattgcttgttttttgcttttttgaccactgaatattccctgccccactctctccctttctccccctttctccctctcctcctctatttttcctcttccctgtctccctgtctcccctctcttcagtatgcatactgtttggtgagacattgtatgtgagggtatgtagcaaatgacaaagttcaaccaggatattcgctattaagaaaacatctttagccaggcacggtggctcatgcctgtaatcccagcaatttgggaggctgaggcgggtggatcaccaggtcaggagattgagaccatcctggctaacatggtgaaacaccatctctactaaaaaaatacaaaaaaattagccaggcgtggtggcaggcacctgtattcccagccactcgggaggctgaggcaggagaatggcgtgaaccagggaggcagagcttgcagtgagctgaaatcgcaccactgcactccagcctgggcgacagagcgagactccgtatcaaaaaataaaataaaaagaaatgtcttttcttgggttctctgctgtctggcagaaggcacttcagtaaaacaggtgcatattcttaccctcaggaggatgtcctggacaggaagatttttttttaagttacaatgatggaaacttaattggcgagttcaggaaatagtaaataagataaaaatttatgtactgttccaaggatgttcaaaatgagctgcagctattgagaaaacaattactaaggaagaagttagcataggctcctggccaaattggcatcagtttcaagcacttgaagcgagcaccactcataggagctgacagatatttttagatatttgttctgtaccttggctgtagtggaacaatttctctcagagtctgagggactctttagaacccagagattgccaagccaccttgcaatctattcatcaacattgattaaattaagcacttaatccactgcttctcagcagggtgtcaggggcagattttgcccacataggatatctggcagtgtctggaaacattttccttgtcacaacagggtgtggaagatgctactggcatctagaggccagggatgttgctaaacatgctgtagtacacggggcatgtactgcatgaaaaagagtcatctgtcctccagggttaataatccccagcctaatctaactgtgggtttagtaccatcggggatactaaacaagcaaaaatatcatgtctttcctcaagagatatagagccttgatgcagaggataccaaagctatagaccatttagtggaagtaatttttcagccaacagtacttactgagcaccaactatgtaccaggaactctgcaaggtttgggtattaattacaattatagcaaaatagatgtagtgccagtcctcaagaagcttagagtttatcaagaaacacaagtgttaaaaaaagaaactcaaaatttgctgtatattggggtaatcatatttggaatggaaaattagagctgccctgagagagattatacaggagttttgttagattggatggtctgggaacacctctccaagaacatcatacttcagctgagaacgagctggccaggtgaaaaatgacaggataaaaaagaaaaattggaaagtgggctgggtgcggtggctcacgcctataatcccagcactttgggaggctgaggcgggcagattatctgaggtcaggagttcgagaccagcctggccaacatggtgaaaccccgtctctactaaaaatacaaaaattcatggtggcacatgcctgtaatcccagctacttgggaggctgaagcaggagaattgcttgagtctgggagatggaggttgcagtgagctgagatcgtgccactgcactccagcctggccgacagagtgggactctgtctcaaaaaaataaaagaaaaattggaaagtaaaccctctactttgtgaagctgatataagcaactttatgtagaagagatctttaatggaaatatatatatatttatataatttattattttataaattttttttccaggtccaatttctgatttctaattgtgcatatgtgtgtgtgtgtgtgtgtgtgtgtgtatatatatgcacacaattatatatcatcgtgtgcatagatacacataattatatataatacataattatgtacataattatatatgtatataatatacataatacatatatacataatatataatcatatatacaatcgtgtgtatgtgtatacccccacacacacatacacaattagaaacaaaaaattggacctggaatagccaatagtataatggaaaaaaaatgtattgccatcaatcaactttccacttcattcattcattaaataaatagtttgagtgcctttgatgtactagaccttggaaacatattagtgaccgaaagcagaaatgatttcagctctcagaatgtttacattttagtgaaagagaatgcactaaaataaaaaaataattaattgaataatgtattcacagagttaagtactgggatgtgcagatctttatctttatgaaagcctatgctagaggattctacctaggcaagagtgacagggaagattttttcagtaaagtgatgagcaagaggtgtgtagacattgaccaggtgaagtaggttagaaggaagtctcgatagagccatcaaggtttttaggatacctttcattgcaagcaatcttttcctgcacctttcttatcaattggctttctcctagaagtttccattgctcctcctggaggagaatttggagccaggtcccttcaaaataggttatggctcgctcttcctactttgttgctctcacttggtccaggtgtcccaaaacactctgggagtgcaacaaactggaagggggcaatacattattggaagtcagacatctgtaatgaagccactcttcctcacttaaaacagccacacaacctcagttttcagctttttttcagtgtgagtctactatgttccccaaatatatcatgcatatcaaattctctgggaaatcgccatgtggatccaagaagcacaacaagaaagaggaatggaaatgactccaatgtgactagagtagagtgggcctgggagagtggggtgtgaaatgagaccacacaggtagggaggaggaggagggaggttggcaggatggcagtggagtgggatgaggaggggaaggagtgggcaaatatgcattttgaaaggtcgaagaggaagtgctgccaaatcatgtaggaaaatattatagaaacagggaaaggataatgcataagctaaggttttattggtagaaatgcattggtttgtttctatttaagaaattctcagggagtaaatgatagggcttggggatgaaccagttaaagggatagaggtgtcaaagatgagggctaggtgcctagcatgcctaacaggacagatagtggtgccattcactgagagaagaaactctaaaacaggacccattttggaggagaatatcacaagttcaggtttggaaaagttgactttgaggtcagtttgagacacttaagcatagttaccaaatgcaggtctggaactgagctgaagataagcaaccactgtgctcctgcttaatgaaaacctgacactcatccttctgttagtggatgctgtcttgccccagtcacagtctcgtgtctgttactccacatgcttgaaatgggaacatccagctgtcagcaccactgattggaaactgagcaaggagccaatgggagtataaatccaagatcaatgttgagcatgtgttgaagggagaaagtgaatgaatggctagaaatcagatttgccagcatgagagggcaccacttccaccgccataatttggagagatgagaattaaggtcccacgctagtcattcgtataagtcctgaggtaactgattaatattgtgctggctaatgagctaattggataattcgataataggactgtagcttggaataggacttaaaaagttatctaggtcaattcatgcctttttcagttgaaattgaggtccagagaggataaatgacttatccagagtcaccatgcacaataatgacagagcatggccgccattgatctcagtttatttcacagtcttacttggttctgtccagtattttgcatgtgaggggagtgacatacagtattattttactgcctggcacattgtgtatagatgttggtcatatagccccaggcccctttagttaaaagagacagtgttttgtggctttttgctcgcacatacttataaatcaccccccggaaatccagaatagcttggataatgatatgaaccttaactacgaatttaacagtctgtaacagcatctagcagttttagtttattactgtcccaatgggagaaaggagaaaaaaaacagcataagaaacaagctaataaatttgtttttaaaacccagcatcctcctcccttccttcagcaaatgttgtaaattctgggcatttatagtttgcttgaggaagcaagctcaatgtcaaaagtgttttaatagcctttgatttactttttaagtgcttattagcatgattgatgatagtgttttgaagtcaatcacagacttgggagagatgggaacttcacagccatcttcccactggctggatgtgtgtattggttgatttggtttggtttggtttggggaggacctacaagcacagaagggactcaacttgtattttcttttctctgtgagtggcaggtggctcttatttttcacttttgcctcctaaaagaatgtagcaactcaaggacatttcttaggctcctgtccctcagatgcccagttccaatggccacctgctgagtgagatttgagtggcctgctctgggggcttcaccctgccttcagcatttacaggaaaaatgatctttctgtgtgaagttatgagctgagacaagaactagtactccattttgcatgcgttaaagttctactgaaaagctcagcaggagttgaagcaataattggcttgagtttgcatttgttcatgccataataacctcctcaccatacacagcacccagctacgaaacccttgtctccttaatagatagaattaagttgcatttcatcctgtgctcattcaggaatccccaatagccagcataactgagaaagccgtagagtaggcttttgagatgtaaatactatcgcctccacatgaaaatccatgaagtcagttcctgggtctttacttacaagatatttaaatgaagaattggtgtattgcagttccagcagcacctttcttctctctaaatccagccacagtgttcatcaatgtgtttaataatgcctggggaggctttggttctggcattgaataatgaacattcgaagcgcccactgctttaaatactttctaaatttgtgtccctttctgtatgcaaaaggcaaatggacaagaaagagactttctttttctcactctgaagagaattgacatggaggagtttgtttaggaaatgacacctggtcaaagaaaagacactttagcaatgtaagccttgcgttttttttttttctttgcagtccagtggcattgccattatcacacaggctcacgatctggcttttaatcagaactctatatgaatctttaaaaaaattcagcaatgcctggccgggcgcagtggctcatgcctgtaatcccagcactttgggaggctgaggcgggtggatcacgaggtctggagtttgagaccaacctggccaatatggtgaaacccccatctctactaaaaaaatacaaaaattagccgggcatggtggtgtgcgcctgtagtcccagctactcaggaggctgaggcaggagactcactggaacccaggaggtggaggttgcagtgagctgagattgcaccaatgcactccagcctgggcgacagaatgagactccattaaaaaacaaaacaaaacaaacaaacaaaaaaagcaatgcaggcactacaccaaggatgcatggggtagaaccaggaatctatattttatatttctttttgttttgcaatcagggcagaaaaccccagaaggattatacagtgatccttaatgcaatcacttagaaagtggtggtccgaaaattttgtgggcttaggtgctctgggatacctattgaaatgcaaattccctggcaaacagagattctgattgctttaggttgggagtgagaatcagaaattcacactttaacaagatcttcccatgtaagaaataaaaggatcatctcgtaaaaaaaagcggtacaggtggactgtcggggtgggcactattgtgttttgcttcgttttgttttgtttcatgttcagttattctgacttatgggatttggccaaactaagcacaataattggatttcattcttacttttctccatgctcagtaggtgcagccttaccgtctggccacagttaacctaaagtggcagaagaagcctttacttctgagcagcctttttttgtttgtttgtttgtttgttttttttttttgagacggaggctcaatctgtcgctcaggctggagtgcagtggcaggatctcagctcactgtaagctccacctcttgggttcacgctattctcctgtctcagcctcctgagtagctgggactacagatgcccgccacaacacccggctaattttttgtattttttagtagagacggggtttctccatgttagccaggatggtcttgatctcctgacctcgtgatccacccacctcagcctcccaaagttctgggatcacaggcgtgagccaccacacccagtccctgagcagcttttaatataaactgatgcctgagtcccccgcttccaccaacagatcctaattaaattggtttgggatgggtcccagttattggcattgagaaaaatctccccatgtgaatctaatggacaaccagggttgagaaccactggtgtaagtactctgcaaagccacaggagttcttggatcagccgagaaatgccaggtgccaatgctgtgactgcaggtgctgacagtatttagtggggtcagtgacatcgcctgtggggactacgctgcccaatactgagttcgtgatcctggttctctggtactgatgcatgcagctaatctataaataggatagggctgaggctgtgtgactgaaaaaaaaaatatgaaatttaagaggagaagaaaaggacatttgcaggttttgttgtcctcagtggacacgagggtggtgttagctataccagcagtgacccccctgctactacagaagggaatctcaatgtgtcaccggatggtggtacactctgctgtaaatcctgagtgagacacatcaaccagggagcttatgaatgaaggacattcacttccctttgaaaagccagcttttctgttgttgaaagctaatctactggtgtcatcagtcgcaacaaagagttcttggacatttactgaaaattaacaccatgctttacagtttacagaatactttgacttgcattttcttccttgatctttacaagagatctgtgaactggtccaaatgaagcacctggagcttagagagtttaagtgatttacccaagaacaggcatcagaaatatataagacctagatgggatagtaattcaagtcttattattctgcttccaaatccaggtaattatcatagttgaaacgtggatagacagatttaaaatgttagttattgctacttatgcacattaagcaatgattaacggctcattagacctatgatgtcatagttattatcttagaacaaaactaagaaatatcgttgatttaaagaaaaaaattaaaagtgaacaatagcacgtgccatggtccaggatcaggtagaatcctgctggcagcacactgaaggaccatggatgggcaatactgctctggtcacattattattgtatgtgtatctttgttcagtagataataatttgatatgttcagtggaggaaaactgtgctattgaaaaacaactgtcaaattactagggctgtttttgccttctgtgagcgacggttatattaacttatatcattggtaatgatctgtctggatactacacatttcttcagtgactgatgggatgagacctcttgtatgaccccctgtctaaggcaaacatttaagaggattaactctgcgccaggtgccagatgagcaccttttcctctcatttaagcttcatgcaaccccataatatgatactgtcattaactatataaaatgtggccctctctctcgcttgtgagctcgctcactctctatatatatatactgtctcacacacacacacacacacacacacacacacaatgtaaagagacggaggcatagaattgttaagtagattatcccaaatttcacatcagtaggaaatcagccttcttgtatccagagcccagttatcaactactttcttccacctcaactatatttaaaacttgttgcatgtgccaaggagagcaaaatcggatattagtttagaggtagaagccacagagaatagaattgctttgcattatatatttagataagttatttggccttgctgaaacagagaggcatggctattaaattccagtatgtaggtaagagtgagtgaaaattgctatatagcttttaaagtcattttcttgccatgatatacaacatggattcttccccactgtgacaagctctggagacttaaccattccccccatatcagcaaccacatgcatagcaatacctgcaatcatattgggtggataggtatcatttggtcagtgcatatgtgtgtgtgtatacgtgcatagatattgaggaaaggagaacgaatttcatggacagtggaggtccactggaggtgatttgtaaaagagatggagaaaccaggttggagccaaaaataatttaaaaaattaatcattcacagaatgcacacaactcttgggaaggatgtgggataaagggattttaagctgtcagctggatagataagcacacaccaccaccccctacttagacagtaatgcatagtaactaggaaaggcatgcccatatgctgttttgcagaggttaagtagagaaatgagaatgtgaatttcagagctggtctgatgcatggtctgggggcaaagaatccctctctctgtaaccatctgggtgtgagtctgcatttctacctctcaatttctattcctgagtatattctctctctctctctctctctgtcatttgtattctccttccactctatacctatagctactttgcaaggaaaagatggtgacttgtgacaaaaggaaatgcattcttttcaccctagtgaaatcagcaagggtcctcagcatgagagcaatagattgagggcaagcaaggcagccaggcagccaggagaaaattgaatgcagtcctcaaagaccatatgttctgtggattttcaaaagcccgtgtcagaacctctctcccaaacatcaaggagcctaggataccacacccagtgaaggagaagggtggagagggcaaggaactgcttgcttagtggctgttgtgtggttagctgaggtgtgcatctcaagaaagagctgaccttggaagacaggcaaacatttcttcccaagaatctgaaggagcagagaagacagggaggatacaagtaccatgaagataaaaaaaaataatggagtaaatggacagtttaaagatggctgaagaaacagaaattgggtggtggaggctgaagatgcctagggcagattttaatggcttccatagatgtagattggattcgttcttgaagtcaccaatgaactgctcagaggctgactgggaaaagcggagctgtgcagcctgctcacgtagggtagtttccattgcctcaaagagcgccgttctgtggcaggcttcctccattgttaatggcatgctgtgtgtaagggctgctgggctcttgggaaagaatggacagaatggataatgaatcccactgaagatgcatccagcttgggccttgcaggggacacattcccccgagcagagcttcagccatagctctcttcagctgtggctgaatccgagaaagttctgtcatccacaccagcccagagaggggacagaagtcattcattccagcccagagaagggacaaaaatgctcattagaataaaagaggatccagcggagggctcctggaaactatcagtgttgataggctgttacatcagcttcaagtttgacatctatattctacgtaatggtgtgctcatgaaacttcttagaacaactcaatggtaaaaactcctaacccgtatttaagacatatgccagttaggaagttaggacaaggggtgctggcatatgcccacagctcataacccgtggaactgttacccgacaacattagggaaaaaaaatgaaaatacttgagtgtgacactatatcagctgccatttagagtccagggattcaaatccatagagggacatataaatacatacatataagaaatgacatatagtcctgacctgtatagagagatctctacccagaaaaatggtcattaagaacttaaggcaccatatgctgagtgacaaatgatggatacttttaagatgtcagagaaaggataatggtctgtggctattaataaaactctcccaagaaagtaatttcagtattaatagagtttctgtatatgtgatgtaattttttttttttttgagtgcagtggtgtgatctcggctcactgcaacctccacctcctaggttcaagcgattctcctgcctcagcctcccaagtagctgggactataggtgcgcaccaccatgcctggctaatttttgtatttttggtagagacagattttctccatgttggtcgggctggtctcaaactcctgacttcaggtgatccaccctcctcggcctcccaaagtgttgggattacaggtgtgagccaccgcacctaaccgtgacataattttttaacattattcatggatactcatttttgtcatcaaaataagaacatatttactaatttgctgattatcagagtaatatttacttatttttaagacttcaatattaaaataattgaaataatatagaatccactgtaatcttagcaccttcagataaaaactgttaatctttaggtatatatacttcctttttttctgtatgtatggacacaagtagttagtttaatgacaatatatttgaactgtatcctttatttcttctcctatcagtgtgtactaatcgtattttcatgtcagtcagtatgaatctatattattttaatatgtcacaatatttaatgggtatgtcataaaatatttattggaattcctattattaagcattagtttctttccagtgtgttattactgtatgtaatactgggataaaacccattgacctagcaaagtcactgctaggaaataataagaaaatcttgcaaagattctgcaaaaccatgtacacagttactctccagaacagttgcactaaatatgcatctactggcaagttatttgggtgcctgtttccccacacacttggcagcaatgagtattatcattctttttcaatctttgtcaatatgttagcttggaagaaaaagcacagtgaaatagcattgttttaggtctataatacctttattgtgtctggatgctgattctttgatattacagcaacttagtccatggcacatttcctcaaccaagtactcagccccttccctgggtgttacagttgaacatcccatactctattgatgacagatgctttggaatccaagcagaacatttaatttatgtatctggattctcaggtttgtatctgaactcagactcacctgttattgttctaattaagttatagtcatgatatggtttggctgtgtccccacccagatcccaactggaattgtatctcccagaattcccacgtgttgtggaagggacccaggggaaggtaattcaatcatgggggccagtctttcctgtgctattctggggatagtgaataagtcttgcgagatctgatgggtttattaggtgtttctgcttttgcttcttccttattttctcttgctgctgccgtgtaagaagtgcctttcacctcccaccgtgattctgactgaggcctcctcagtcatgtggaactgtaagtcaaattaaacctctttttctggccagccacggtggctcacacctgtaatcccagcactttgggaggccgaggccggcagatcacctgaggtcaggagttcaagaccagcctggccaacatggcaaatcctgtctcttcgaaaaatacaaaaattagccaggcgtggtggtgggcacctgtaatcccagctatttgggaggctgaggcaggagaattgcttgaacccaggcggctgagcttgcagtgagccgagagcatgccagtgccctccagcctgggcaacagagtgtctcaaaacaaacaaataaacaaacaaaaacctctttttctctttttcttcccagtcttgggtatgtctttatcagcagcatgaaaacggactaatacaagtggttaaacctaaaagttttcccaaaggatgaaagagtgttgatgtgaggtagatgagattgagttatgagaggatagaaattaagttagttatgacctcagagatagtacaaaaagtttgcagattatcagagagactgataatacattatgggattgttttaaagctaattagagccttttaattctaaaattcagtgtttcaatgtttgatagagttagcagacatgcgataacatttatcattctgatatacatacaaatgcatacaggcacacttgtgtaaacatgcaccctctgcttgtgttattgagggagaaggtgagactcacagaagtggagattggaccaaagccaaatgatgtagtattggaaaaacagccctaaccctctcagcttgttttgcaaatgttttcctttctattataactattttaattagaaaattacctggaaatgaaatttatgtatgtttaaatcacttgcaaaatagccatccactacaaacttttcttgaacagggcaatgtagggaggaggaaagaatagttttctaattatgggacaagaatagttttatagtcttgctccacaattctggtaacatttaaaaatttttctttattatattttggcaatatcttttttcttagaaatgtatttattccacctagattttcaaatatatcaacatggaattgaaaagaggaatctatttataatttaaagattgtgcatttatcttttccttctccaacttaattttctaaataaattcaccaggttcatacattaatgcttaatatagtatactaattatgttttcctaagaaacaactcttggatttatttagcaatttggtatttttcttttatttttccttctctaaatcaaccttttctgcctttacttttatttgcttcctcctgctattttagaattgtggttatttttctactttcttcaattaaatatttactttttaactttattatgaaagtatttaaagttaaacatgtattcatctacacagtagagttgtgttatattccgtttttgacagcaatatttgcattttcattattttctaattagtctgtaattgcagttattatttcctctttcaatagtttttgtagggcatttttgatttctaacattgtttttatttaagatgtgtttaattacgtaatttgacttcttgaagttagtaaattaacattgctagtacagaagtcctcattgccaacttttcctcttagtctagatggaatatctcaatacaaatgggccaaaacgggtctatcagttggatccatttgtgggataattaggtaagatttttctaaacatggcatagtttagctaaaatcttacttagatagtttagctgcactccgccacgtagctgtgcatctttttatgactttgtgcgtttgtccaaagtatgggatggaggtctggatgccctgacagttaatgatctatcccaagtctcagtttaggcaccaggcttgctctcctcaacaatcctctacaatcctcacacacccagagctgtgatttttttccccatcagtagatgcccatggtacttacatgcattcctctctgtggcactttttgtttttccccttttggggctgagccattgatatgtatatttcctttcctccagtagaaggtaaattcccagaaggcccttatgtgtcttgattagagctgaagatattcaatgaccataaaaaacacgaagtaaaagtttgttaaataaacatttagaccaagtctaacttttaaatttggtataaatctgctaaatttggcaaattccatgaccacctataagataaataatgatattagatctgtatactgaggatattcctagtatcaactactgaaagtattctggagagaaatttaaaggagctggattatatctatgatttcagtagcaacttcataaacttaggcgttgccaattaatttatctctgtttcatctataagcacaaaacagctgtgtttttcaagagataagagttctgattgctggattctaagtgaggattgagggaagaaggatgatttttctaagtcattataaggaaagcagtggtaatgatgcaacccatcatttgtttcagagagaccacaataaacaggcaaataaaactattttgtcccatgcatacaagcatggacataaattatgagatttgcaaatatctacagactagtacctaaagcagaaccaaccaaagcagaaagaaaacattttcccaagctaatgcaaaatctcatagtaagtagaatttgatccctttgtcctactgagaatgttgttattaatgtaatttaaaggtaattaaaaatacatttggtttcttgttgctttcccttcaaaatcgtcactcttttcttttctctgaaaaagtcctgctgagtcagtttgatcttccaaaacaaacaatgttcattaatttacaaaatttcaggcaaatttgttgattatggagagatgatggtgtcggaaattaacacagagccaagtaacaataggattgtcttggactgtagatttatattctgtaacatttgttctgctgcaactcttggagaggacaagaaacaactggcactcacagtaaacctcttttttctcagtcaggaaagcaattcattaccagatgtatggccttggctttactgctttgtatacttgtcaactgccattttaatggaaaccgcaaaaacaaatgctttcataagagtccatgaatccttagaattagcaaatgcccatgaaccacaagactctccaatggtggatgttatggttggaaacattaaaatggagaaaggaagcatgaaccctccagatttggaggatgaattaggcaaagagagcactacataaattattttgttttaccagctaattattttgttattattatttttgagacagagtcttgctctgtcacacaggatggagtgcagtggcgtgatctccattcactgcaacctccacctcctgagttcaagcgattctcctaactcagcctcctgagtagctgggattacaggcacctgccatcacacctggataattttttgtatttttagtagaggcacggtttcaccatgttagccaggatgatctcaatctcctgaccttgtgatccactcgccttggcctcccaaagtgctgggattataggcgtgagccactgcatctggcccagtaattttaatttaatccctggtgtcttgttatgcaggaataaccacctataggtttaattcctaagtatagcaaattcatgttttaaaataacttcatgtaaatataaaaagtatgcatgcatattttatacatgtaaataaaaaggtaacccataagaccaccaccagttatacctatgaatctcttcatgtgattttcttttatcttgatttattaatatttaaaataagttcatgccatatatgaaattataagccgtgcattttttaagctctctatattattttctcatgccattttttagttttcaaaatctcaaactttaatgtttaagtattctaatgtatggttaaatcatttatttctttttcttgtcttaatgggcatgtggtgatttctttttaattagctattataaataatattttgataattttcaagacaaatttttgttgtatgtaagtatatatgggtgtgagttgtattcttaaggcaaatccatggggggaagatactggactaaaggttagggactattttaaaaattgctaggtcaagttgagggtctgtatcaagaaacctattataaaatgccaaatgcattttcaaatagatttcaccaatttatactctcattgatattataccagagtgcctattttactaattacatgagtattgtacattatcatattttagtatttgctaatattgtgatagaatagtaaaatctaatttttttttttttgagacagagtctcgctctgtcacccaaactagagtgcagtggcgcaatctctgcttacttcaagctctacctcctggggtcatgccattctcctgcctcagcctcccgagtagctgggactacaggtgcccgccaccatgcctggctaatttttttgtatatttaataaaggcagggtttcaccgtgttagccaggatggtctccatctcctgacctcgtgatccacccacctcggcctcccaaagtgctgggattacaggcatgagccacctcgcccggccagtaaaatctaattttttaaactttgtggccagggacagtggctcatccctgtaattctaccactttcagaggccaaggtgagcagatcacttgagctcagagtcagagaccagcctgggcaacatggtgaaaccccatctctacaaaaaatacaaaacaattagccaggcatagtggcacatgcctttagtctcaggtactttgggaggctgaggcaggaggatcacttgaacccagtagtttgaggctgcagtgagccgagatcatgccactgcactccagcctgggtgacaaagtgagacactgcctcaaaacaaaacaaaaccaaaaaactgcatacctttaatttttataaagttgaacaccttgatgtgttttcctctccattatttatgttgtagataaatttctgtctcttacgtagctttctaccatgtctggtttgcataaaaattacaaaacaaaataaaaaaaactatagaaatgtacttttgctttgtgcattgcattgggctgctttctaatacctgtgaattaatccctcctatcctgggtaatcacaatggcaaccctgttcctgctgactcccttgagtgatctctgtgttattttagggaaaagtttagtttaccactctactgagttgccaggctcagctattttaggtgctgggctataatccttctccagagggctgccttttgaatcaagggcaccatcagccactgatatgtgagcattttcattaatgatgctaaagagatcagaagaagaaagttagtgggaaaaaagcacacacacacacaaaccaaaaccaaaatatgcagacaagtttatgatagattgtcctttcaatgacatgctctaaatttaccgaattttaacctatctgtgcctcagctccctcatctgtgtaataaggatgatatgaattcctacttcactgagttatataattgtttttaaacttaaaaacatagtattggatactgtcttagtcgagttcaaccagaaacagattatgagggtaggatttggatataagtcatttatttgcaagacaacccctgaaaataaagtttggagagtggggaagttagggatggaatgtcagccaacgttacggagccactggagccattcaccagtggggatgattgaagcttaatctcactgtgaaagtgtaggagtcagtgtagagcacacctctgagttatcctataggagggatgtatttatataacctctttttggccattggttgagggctgctacagtgagtgttaattcacctgcatgtgctgtctgactctgtaatcactgaaggggagcgagactcttgcaactagagaaaagccacagagagcagtagggctattaataggatataagtggacattgtatactgtataatcaaaagcaatatagcttttgatttcaattctattaaacaggcattgttaccagacacagggaaaggtaccggggatataatggctgagacatgggctctgaactcaagtagctcatacttttgtttttacaaacagagaagtaagccaacagtgtggtaagcgttcactgtttcaaatgcaaaaacaggatgtaatgaaaattcataggaagagcaatcatgagaattcttgacggaaaatatgcctatttagtgtgcggtttgggaaggatggtcccaagggagatgtcccttgagcttcttttctgaggtttgaggagtaggtaatagccttgcagagaaggaagagatggacatctcatggaggaaaaaaatatgtgtgtgtgtatgtacatacacacatacatatacgtatataatatatagagaggaagagtgcaaaaggatggaatagtgaaataacatggcttattctgctatttacatgtaaccctgtatacttggaaggaagcattcatttgggcaagtggtaattgttgaatctaaagatccatgctggtgccaggaacttatgaaggaagttaagggattttgaatctatcttgaaagcccttgggagtcattaaaagactctacacagaaagatcttcgagggacatttggaagatactttgtggaaatgcagccctggaagcatagagaccagttcagaggctactgtaaaaattttggacaaaaaaaaaaaaaaaaaaaaagccctggtggcaggatggatttaagtaatagtaaacaggtggaatgaaaaggaagtaagtgagatggcgcagccctggatgatttttagaacttcagactagacaactgacttcatagtcccgcagcttatccacatggggtgctggagagagagttggacgcttttgaggggagaggactgggacatgtaatagggcaggatgttgcttatttatctttctttaggatccaccattccttcccttactcttctcctattaatgcctagtttagttctcagtctacatagagaatgttttacttttcttgccaaacccatattgttaaatccccagggcttagtgaggaattcagagagggaacttcatggctgccacttgggttcatgtgactgacaggaagagcaaatgtgttagaatagggttggcttataactattacagaaaaaaatatggcttggttctgtgttctcagcactaccacgttctactggtaggactttggaatgggtccttcactacctggaaagattattttgagaaatgaatgatttatggagtaagaatccacctggtaaaccactaaggaccatgtaaatctaaaatcaattaatctataaactagagaaagaaattaggccaaaacccagcactattctgaccaaagaagtcaagaccaggcagtgagttcctttacttaggagctggggacagaatataaataaatgggcctttgggtttgtgggaaaaggagataataaagataaaggcaacaatgaatggcttggaatggaaaaagaaccatcagaattgatcattacaattaggagctatttctttgggaaaaaataaggaaaacccaagagggaataaggagaatgatataatcaggctggcagccctgtgtcttccactcccccacaagtctggctccagctgctgtcagccacaccacctacatcttctcagcagcgtatcctagatttgcaccctgacagctacccctgaccccctacgcaaaaattatcttttgatcagtgacagtggccatttgtttgatgctgggaggtttccagtgccatgctcatttcggaatggttgaaatggttctcttttcgtgagtaaacagaggaagaagattatgacacaggtggttaactggttcctaatgtacctgtaaaactcctgcatagaaagcccagcagaaggacagcagtcctgccgatgttggctgtcagacatctaattaggtgggagggtgattagcaggctctgctgtaagtgggtttattttaatagatgtttttaggacatcattgggcagaacagtatctgatcagcatgggtttaaagaaatctgaagagcaaaatgacaagactggaattagaaacatggagacagtttcaaaacctttccatatagaaccaggagaataaggggatttcacattgccctaagagcttgagattacaaccacggcattgctcttttgaaagagctgtggaaataaacatcgtcaggcaatgttttccagttgaaagcaacaacaatccactctggctgttttcactgaaggggaatttatctgcaggataactgatgtttacagaatcgccatgggtcccagcgaaggaatggccagtggccaaggctgcaccagaggactgaaaaataggaaccttaacaagtcaggatgctgtttagcaaatgcctagacaccgaatgtttgttccattcttatgtttctcaaagttcaaagtcctgagctcacgtgtaccattgactaagcgttggttacagtctcactctgtggctctgcatagtggaaggacaaggattttggcccctttagttctggcccctattcatgacatttttttttttagtgatagagaggttaatttcctgaaaggaaatttgagtgttgggaaggaataatggcttttgagtcacatacacaagcacacatacatgtacacacacagatacccagaggtgaatttccagtgtggaaatggtatggaggtgttggaaaaacccaaccacaaaagctgatgtttttatgatgggattgtaaaatattaagatgtcaggccaaggagaagtgaatagaaaaggtatatcttttttttaatgtaggacacacattaaggataagctgaaagatagaggatcctaaaaggcaacagcaaattgatcatggacaataaattctaaaaacctttgtcatttctggaccaatgcacataaacagttttgggggccaggtatggtggcttatgcctgtaatcacagcactttgggaggttgaggcaggaggattgcttgagtctagagaactgtgatgacaccactgcactccagcctgggcaacagagcaagaccctgcctttaaaaaacaaacaaaacaggccaggcgaggtggctcatgcctgtaatcccagcactttgggaggccgaggtgggcggatcacgaggtcaggagatcaagaccacagtgaaaccccgtctctactaaaaaaatacaaaaaaattagccgggcgcggtggcaggcgcctgtagtcccagctactcgggaggctgaggcaggagaatggcgtgaacccgggaggtggagcttgcagtgagccgagattgcaccactgcactccagcctgggagacagagcaagactccatctcaaaaaaaaaaaaaaaaaaacagtatttggtgcatagattatggaaatggagtgagtaatgtgtcagaacatctgaacctgtgaccttgagtcatttcatctctccctgtgaactctaacactgagcttcagttatataaagtgttaatatttgtaatatgttatgggttggtgctttagttggggaaagtttccagggagagtggatctagtgtgtcaaagttcattttaatctgttttgtaaaacaatgtaaaaaacatataacctaaaattaaccatcttaattccatcttatccatttctaactgtacaattcactagtgttacatatattcacattgttttgaagcagatcttaaaaaaattttcatcttgtaaatttcaaactctgtatccattaagtaactgtcttttctcccctacccctaatccctaggagccactattctacttttcatttctttttttttttttttttttgagacaaagtctcactctgtcacccaggctggagtgcagtggcgcaatcttggctcactgcaacccctgtctcctgggttcaagcaattctcgtgcctcagcctcctgagtagctaggatcacaggcatctgccaccacactgagctactttctatatttttagtagagatgaggtttcaccatgttggtcaggctggtctcaaactcctgacttcaggtgatccacccgccttggcctcccaaagtgctaggaatacaggcatgagccactgcacccggcctctacttttcatttctatgaatttgactactttagatacctcatgtaagtagaatcatacagtgtttgtgtttgtgtaactggcttatttcacttagcataatgtcgccaagttccatctatgttctaacatgtttcagaattttcttcctttgtaaggctaaatattatatgtatgtaggcatatatatatatacacacacacacatatatatatgtttgtgtacacatatatgtatatgtatgataacattttgtccattcatcagtgagtagttgagttgctattgttggctattgttggctattgttgctataaacgtgggcatgcaaatatccctttgagactctgtttggacatacacctaagagtgggattactggatcaaatggcaattctatttttaattttttaaggaacctccataccattttccatagtggttgtaccgttttgtagtctcaccaacattatgcaagtgttccagtttctccacatcctctccaatttattttattattagtagtagtatttttgagacagagtcttactgtgtctcccaggctggagtgcggtagcacaatcttagctcactgcaacctcttcctcctgggttcaagcgattcacctgcctcagcctcccaagtagctaggactgcaggtgcacgccaccatgcccggctaatttttgtatgtttagtagagaccaggttttaccatgtttgtcaggctggtcttgaactcctgacctcaggtgatctgcccacctaagcctcccaaagtgctgggattacaggcatgagtcaccacacctggtcatctccaatttatttttaccttttaaacaaaacctaaaaatcacaggtcatgcatagaattaatgagggtctaaggtaagtgaggacctctagcacagctgtttcatatcatttcctaggaattccagatgtttcaaaacccctgctacaaagggaagggacagagaaagcacaaaacggacttgaggaaggtgagcaggaaatcatctaactgtgaggtcttagcactcatctgacagatgaagtagggtgagtacagtatgaaagcttgactaggccaaatttacctggttttcttcatcaggaattctcccagttgacatctggtttatatcaatcatgaaaaaagctaatatgttggggtacttacaaaaaaatactcatgtaatcctctcaaatgccaaataatgtgtttactctcattatccccattccgtcagttgagaaagccaaggcttgtgacaaaactgtttactcaagattacactgtttctgaactagccagaactcctggctttcttctagaatttaggatccttggcaatgtcagcaatgtgataaaataacaagtcttttttttattttaccagcttagaaagcctgtttttctggtactacatgtacctaaaactaagtataaccttgtttgaaactcatgagcaactgcttttcttagtggaaactgtcagattgatggcttcctcagttcctcatcttccttcattggctatgcgagtttattccacacagcacttataactctaccatggaggtctccagcatttctgctgtcagccttggggtttatttttgtatatctacttcttttaggacctgcctgagatcaccagatctcatttaataaagatggtctgtttagcccttataattcctttagactgctgtcaacatggattggaactaatgtctttaaaaaaagaaaaaaaagttttctacccagaacatgtaacagcaaccttttccccttatctgcaccacagaggcctttctattctccctacacacacacacacacacacacacacacacacacacacgcacacgtgcgcgcgcgcacacacacacacacatgcacacatgccccactaacttcctacatgctgacggattttcccaatttgctgttcattaagttacatcaactgtggaaataaaatatgtcacatgatcaaatgttattagataaaaacgaatttgccacctgctgcttccacccacccctctgggagagaaaaggaattgaatttgctgaaaaattctcctaatttgtattttttttcttttaagaagctccatatgtcagggagagagccacagctgtagtaagtagttgaaagtccatctctgttattaatgaaaaacttctgtgcaaataaaaagcttccattttataagataaacttcctgtttacttgcaaactcatgttttaatatcagaactgatgatgtattcaacctcatgctgctggcccgaagagctggagggataattatccatttttgaaggctatgaagtattgaataaaaatgtttagtttgtcatttgagctgaactccactctttctcctatttttttccacttgcatttttttcctgtgaatcttctacaaaagaaaaaagaaattacctttcctcatgcactgaaatgatctgcagtaaccttctaataatttttgcatgcaacatgtggcaacatcatgttttaatttgaaagctgtttagagatgtttataattttcggtgtgtaaaattataccgcattgatttatttcatcattaacttatttatttcataattattgcatgtaatatatgccaggcattgtgctaggtgcagataatacatgaattatgagaagtacatagcccctgccctcagagagcttataggctaataaggaaaaaagaataaaaaataaatatagttaaatgtatgtgttgttataaaatctgagctaaactaaatgttttagatcaaaacaaatgtttctcattccttttgttggcttcatccattattatttttgaaggtatttattgaaggtgaccaaaagccctatgcttgggtgatgataggggaatggcaattgataaaagttttcaaggctggccacggtggctcacgcctgtattcccagcactttgggaggctgaggcgggtggatcacctgaggtcaggagttcgagaccagcctggccaacatggtgaaaccctgtctctactaaaaaaaaaaaatacaaaaaactagctgggcgtggtggcgggcacatgtaaccccagctactcgggaggctgaggcaggagaatagcttgaacctgggaggcggaggtggcagtgacttgagatcatgccattgcactccagtctgggcaaaaaaagcaaaactctatctcaaaaaaaaaaaaaaaagggctttccaaatgcctcttttttttctgtgattttattgagtgagttttagacactataaaaaatacagttaaaatttttcatttgaaatgtgcagttcttagataacctattttggtaaatggagtttaatttatctggagacatgtagaagttagagggctggagacttgacttctttatttggccagtaatactacacactatgaactctggcagggttgaactatcctcatttatatttacatcttgcctaaagaagacttcatgaaaaattgtgaaataagtagaatgaatgtataaatgaatgaataaatgggtggataaatcatgggtcttgataaagtcccaacatatatgtatgtacaactttgttattcaaatttaaagctttgaactgtgaaaaaagtttggtaagtgcctacccagaagagtgaaatgtgctaggtgttctgtggagcataaaaattacacagtcgctgagctttccagttaatatgctgtgatggaaggcattgtccagagactatttgaagtaggtaaataaccacatctgtttaaactaagtcaaactccaggtgacttagaataaaaggttgtttacgaataagacaagtggattgcagttgcaatcctatttgaaccgttgtttaactctagggtcaccaaagagtgttggtgacttgttgacacgtgttcccatttgatttggcttcaagggaaatctcggtccatttcattcaatttcacatctgcagatcagcctagtagcaaactcatgtaggttataaaatgccaggaacctttgctctgagacatggagaaggctttgtgtgaagcatatttagggtcacgtgcaaatgtagtctggcatagaatgttacatttggagtgaattggtcagaattaaggcaattttgatgcttacccaattgagaacgctgtggtagaagaaggaatggtttacctcctgctccccagccctggaccctcacacgaaatgaaagaacagtacatttcttaagtgatttaggcatgggagtagattgtcaaaactacagcctgttaattctcctgtatgtctttatcaaactaaaaatggattggtttagttgaagccctaaattaagacaaaaatcttctttgatgctgattccttttggtcttttttaatctttattctgtgtaattgtcaaagaggatcattatactcagtttaaagaagatccctggcagggtgccgtggttcatgcctgtaatctcagtgacttggaaggccaaagtgggaggatcacttgagcccaggaattcgaggttatagtgagctatggtgatgccactgcacttcagccagggcaacagagcaaggtcttttctcaaaaaaaaaaaaagaattcccattgaaacttctgattactttgttgtcttgacataggtcaagagaacaggaaactcaaatctgtccattcattcatatatttgatacctactcaatactcactgtacaaggggtattttcattgattctgatcactctatcaactttttgctaacttgttgttcatctaaaaatactttttcttcagatttctaaggggccaccggttattagcacaatttacaggtgcactataaaaacagcttcctatcccctccagaccaatcatcagcttgattaatttcatcaagtactccagtgtgacagttcatcctaattaataatattctgtttcttagcactcttaggacctagatatttttgttatgtaaagtaatacgggaaccatgttgctttactgttcctgaaggcctgggggttactcaagtaggggataaattcagaagatatgttccactaagagtgagtcagagaagaaaatgtatcataaatactactagaggaattatccttgaatcaggaacacatgttgtttgctgctctttttgctggagctgtcatggttactataaagtagaatcgatgctctgaactctgcttcataggattatttattcaattcctattgagatgtggtctcaagcttttacttttagcatgatttcccagttaaaaaaaaaaaaatgtatgtatataaatgtaaaaccacaaatggtgccagtaactgacattccactttggttcatagaggtacaaacagggccaatgttagggctctctacatcgtaagccacgagtggatttgttaatttcaaaacttctggtaacttaagaattgagacgagtcccttgtgtttctattcagcattctcccctagtagcccactgatttatttgaccagtttctgttcctttgtcttcctaagatgtcatttagaaaagttttcccatcactaatgcctctcagggctgattttacatactcatcgctagcgatcacattttaattatatagacctttgtttttttttctcctttttaataaggctccactgaggaaattttcccctttctaggtataatcaggttgtcagatcaattaaggtaattgatggcagtcttatcacattccttaatcaagagtgtagccattttattagaggaaaacaatccctagattatttagagatagaaaaaaaggttcaatctttgtaaatggtgagtggggagagggagagaaagacaacctgaaatgtcagagttcccagtgagaaagggaaatgggagggaaatagccaagggttttcagtcaacaaggaagaatagtgcataaaattaattgtgcatcagaatcactttgagtgattatttaaaatgcagacttctgcttgccatcccggtaactttactatgtttgtggtagaacccagaagtctgtatttttacaaaaaccccagataatttacccttaggttgttccattgcctgctgcactttgagaaatagtagtgtaattgagaaatagtagtgtaaagtcatcagaagagcagggtgtcctaatatcaagctaggtctagggaagtgctttttttttttttttttttttttatttgagacgtagtctcactctgtcacccaggctggagtacagtggcgcgatctcggctcactgcaagctccgcctcccgggttcacgctattctgctgcctcagcctcccgagtagctgggactaccgcccgaccaatttatttgtacttttagtagagacagggttttaccgtgttagcaaggatggtcttgatctcctgacctggtgatctgcctgccttggcctcccaaagtgctgggattacaggtgtgagccactgtgcccggctaatttttttgtatgtttagtagagacggggtttcacctgtgtcagccaggttgctcttgatctcctgaccttgtgatctgcccacctcggcctcccaaagtgctgggattacaggcatgagccaccgtgcctggccgggaagtgctttttataccttaatagacacacaaattacctggggctctcttttgttatggatggtgtatggtgtgagagtctatacttctaatgagctcccaggtgacgccattgttgctggtcagtggagcacatttggggtggtaaggccctacaattgctgtctgtttttcttggttccttggtgctgtgctgaaaagagagttggcaggggcattggctaggttgtatgtccattacggcactaagtgtcttgaggcaaggagattgagctttctgccaagcttttggctgcctggggaaccagagaagaggatgcttaacctagtatctcaaaaagtaacaacttgcctttccccgtatttctgtgaacctgtagaaaattgtttctaatttctgaatacttttgagtaaagacaagtattctttctacaaaaaattttacctcctattgaaaaaaagcgtttattggaatgaccttgatgtttttcacatctttattcccagtagttttttgtgtcacataaacctttctaaaaccgcaccttgtgattttaaatactttcaaattttacagatgctttcacatctgtggttaattagtttatccagcgtaaactccgttccattcctgcagtggctggcacaatgtttggagcaaggtctaggacatagattctcctactcttaccagcttacaatctgaggatataagataccatttcatgctttgcactgttggttatatttatcttttgacatgcaaataggatattcattccagttggagagtaggttatttccatttgagatggttatcgaagtgacacttaaattggtcacggaatagaaacctgtgaagccaacaaggcacgttattactaccctcattttatgtaatgtaaccaaggctaattgatttcccactagtaaaaccaggatagaaaactttcattcaagaaatatttattggtcatctatggtttccaggtacttagctaaatactgaccctacttttatggtaaatagggccgtcttggttcttttgcttattttgatgatagtcttgatattttcttcttttccagtgctgtttctatcatgaaaaaaatgttaaaggcacgaacctccttaatgtacaggcaccagcaccaaataccttccaattgttgagcagcctcagtcagtttgatcttataaggagactatgaagttagaaggcctgagacttaacttctgtattgggccaatagtattttacttttttttcttttccatttattctataaactattacctcaaatcagcttctgaagaatggaagaatagtttgtgttccatatttttctataaaaacccaaagaacgttctcagattctatttcacttatccgtatgacaccatggattgcagagaggagccagtactgtcgccatttatagttggcaagactaaggcccaaggagttgggaatttggaatttgcttcatgttacataataagtcaatgatagagggaagagtaacctgttcaggtgagcatgcagtttgcagctttgtctacgtagtcactccatcttcagttagagtgtatctgtatgcaacagaaagaatacagaatactgtgtatatcaataagttgcccacaggttagaaaacaatgtatttgtaatgaaaaaataatagtcatgtaaacattacagaatgtagcttaagaaagcaaatttccaaagtcttcaatactagatccttttaagagtgattctgtaactgtcagtgcaggagtatgttttaagctaattatttgtcttactgctaataattaccacttattgaaaggctattttctaagcactttatatatgcttttttattaggaggttatatttatttatttatttttgagatggagtcttgctccatcgtgtaggctggagtagagtggcgtgatctccgctcactgcaacctctgcctcctgggttcaagtgattctcctgcctcagcctcctgaggttatatttgaacttatagtctctataccaaagtaataacatttttcattttctgataactctctaatccatctaaaattactgaatgtcaggcatgattttgccatcttgatttctattttttaacccaaaatactgtaaagatgtgaattattgctaagttcaaatagtgatattgtttcaaaataatattcattaacatattttaaatgtcattttcattttaatgtatcaacagttgcttagttttaacaatttgttgaatgttattacatgtattgaaaaagcacaattatggccagttgttaaacaatatattaatattaattagtgataatacattaatactgtctcatgtgactgatgtgtgctttcactggtactctgttggtgtttatgaatctgttggtaagacttgttgtaattgatatttctactctgtttcagaagccatcaactctcatttatgaagaccattatattttcaaggtcacagtctctaggtccctggtcttctttttctaaacattctctgcttagtgcctggcatagtcctgggcacatgatagcttaataaataactgctggttgctgaagacaactactctagcctttcctttgctcagttatttgtatcgtctaatacatttgaacttccatgttacactttcacagtagaaacttccacttaaatctgtctgagctttatggcattatagggtctggattctagaaagagaatggatctgctgcatagcttttctgtatgtgtgaatgttggtacatttagtttacttctaatgaatgatacctgcagagtaggtattcaggatctttaataacatccatccttcttccttctttcctgaccagcctggtaaggttgagttgcaatgagctgaacagatcgatagtaatcacagggtacttggaaaagacagcctcctctataatcttgggacagcttagttagtgttgtcactcaacccaagataacagagagtgtgtgtgtgtgtgatgtttgattctaagaattactaagaattactaatttctggaagaaatccaggaaaataatgtagaaaataatccaccatggtgtattagtccatttttatgttgctgataaacacatacttgagactgggtaatcaatacagagaaagagggttttgggttttgttgttgttgttgttgttgttttgaaacagagtctcactcttgtcacccaggctgtagtgcagtggtgtgatcttggctcacagcagcctccacctcctgggttcaagtgcttctcctgcctcagcctcctgagtagctgggattacaggtgcctgctaccatgccaggctaatttttgtacttttagtagaaatggggtttcaccatgttggccaggctggtctggaactcctgacctcaggtgatccgctcaccttggcctcccaaagtgctgggattacaggagtgagccactgcacctggccaagaaagaggtttaatggactcacagttgcacatggctagaggggcctcacaatcatgggggaaggtgaaaggcacgtcttatgtggtgacaggcaaaaagggaatgagagccaagcaaaaggcatttccccttataaagccatcagttctcgtgagacttattcactaccatgagagcagtatgggggaaaccattcccgtgatttaattatcttccacctggtccctcccataagacatgggaattataggagctacaattcaagatgagatttggggggggacacagccaaacaatatcacatggctaccattaccttttcttacactatattagaagatacgcatgtaaatcatacattgagcatccttgcttcccctattctgaggctgcctgttccttcactgtcctccagatagccctgttagttgttcacgtttcctgcaacaatgaaagaagagttcttgtaagacctgccaaatctctttcctttgctgctgacctcatgggcaaaaatcatttttagatgtttggccatgaattcttttcttcagactaaattatgaagcattcaataattgagatccaaaaaggagagaaaccagaacatccagttctatttgatctgaggctgactagaggaaattgaaaactaattttttctttcccctttcttcaagttccccccccccaattttctccttaaaaactttattatatttctaaaaaaaatcatacatacagttgaaaattagaaaatacagagaagcaagaagaaaaaattatatgattattgtagcacttagcctctatttatctgtctaaattggctatttacaatatccttcttgttttgtaaagccttccacagaaattctaaacaacatagattttctactatccaaaatcacacactgtcttcagtataacaagggatccatgattttatcagtctttatccttgatgattacatgttaatttctaattgctcaggtgcttttgtatcccagtgaaactcaagcttcagtaaaagtttaggccctgccctgacttctttcctagtaatagatgttcacatacttataccattgaattgattttactcaaaatccagtaagacagtgttttattttgttttttcattgccactatgagatagatcactttttagtatgaaaaaaaattctaactattggataaacattcaagtcttcttttaaaaacttctcaattatgattttttttgggcagggtggcagttttcctaattgacaaccgctggtgatattcagcattgaaagtgttcacgcagcagacaagtggaggagaatttaatttgtctggtatgggctttaactgacaaatgttagaaattgaccttttcaatggaaatttacttggaagtcctaagtgaagctctgctttaagctaaatttgtcaccaagacatgattaaattctcttaaatgtagatcaattgcacatattattaatgggaattgaaatctccctaaatggtgtccataaatttaaaagaaaaaaaaaatagaatgtgaaggttaaggtgcctcatttgctgagtgggaaagctttcccagaatataagacaaaagacaatctttgatgcttccagagaaaggtggttatagcttagataatcttacgttatctcagcactctatttgagaggaagttgttttttccacaataggctgtggctagactattcaaaatcttgtaaaaaggaatttaatgcttaaattttcatatcagtggaatccaagagccttagttctcacagaacattgcgggagtgccatgaatatagttacaatgagagaaagaaagaaggagagaggaaaagaggaaataagagaagacagagtaagtttttacagctttcccagatgctaagtagtttacagaattagggagaggaagcaaggttgtagatatatattaaggcttgagaaatgacttatgttctcagcaaaaaaaataacaatctattggctcagaactctagctatgggtgtattatgaattttgagcaagactgtaccggactgcagatgccaacatataaaaatagtgaacaagccaggttcttcctgctgtgacactgtatgaaaggtcaacttacctgtgcaagatcagaaacatcatcgttttcttttccctggtgagtcagagaagcttaagtcaaagaaatgagtagagctggcaatagatatacaaccaagaccattggttaatagatttgaaggccgggcgtggtggctcacgcctgtaatcctaccactctgggaggctgaggcgggtggatcacgaggtcaggagatcgagaccatcctggctaacatggtgaaaccccgtctctactaaaaatacaacaataaaattagccaggtggcaggcacctgtagtctcagctatgcgggaggctgaggcgggagaatagcgtgaactcaggaggcggagcttgcagtgagccgagatcgtgccactgcactccagcctgggtgatagagcaagactccgtctcaaaaaaaaaaaaaaatacatttgctaattatatttttaaatgatgttgcactttagctcctatggcccccattcagtctttgagcatggcgtagaatctgcaagatcgaagggtaaaagaaaaaatctatgaagattttattaacattcctgacaacatatgctaaacttataaacctcacccgtcattcagaagcactttgaaggcctataacatgcttatgttggtcatacgtgtatctcaggtcggctacaagtgggtcttctaaaatcaaatcaaattgaaaaccatctgactctgaaatgccagtggctttctacaaatggtgaggaaaacatactggatggatatctccaaagatgctgggacaccttctgtagaacctcttctaggtctttcaacaatcatttctgcaatcatacggcttttgtagtcgaaatgttatataatgtgtatgtggggatggtcattcagtgtgatcagaatggaacctgattctatgaaagttttgctggggttttgtgtttgtttttgaaatggagtcattcagtgttccacctcaacaatcatcaggaggttgtcaagtgcagagccccaaatccaagcctgtgctgcgtctccatccaatgtaattcatggttaatctcattcttattaaaattctctagtgaatccctttgtaaggaaaaccactgttttggttttgtttttgtgtttttgtccccgcctccacacaaatagattgtgtgtgtatgtgtgtgtgtgagtgtgagtgtgcgtgtgtaatctcaggttaaaaagctaaaaagtcagcaactaggaattttagcctaaagtatctagactagggtcaacaacagccaaattctgcctaccacctgattataaataaagttttattggaacacagctgcacctatctgtttacatattgtccatgctctaatgggagagttgaaaaattgcaaatgagactctatgacccacaaagccaagaatatgtagtgcccgaacctttacagaaaaaagtttgccaaatgttgacctagaccaagcttgcccaactcacagtccagaatggctttgaatgcatcccaacacaaatctataaactttcttaaaacattatgagacttttttggtgattttttttttttaagctcatcagctatcattaatgttagtgtattttatgtgtggcccaagacaattcttcttcgtccaatatggcctagggaagtcaaaagattggatacctctggtagaccatattcccaatagtatgctcagattcacagcataatggtggaaccaggggaattgcagttcattctccaggtatcttgggtgaagctgggaatgacaaataataactcagaagcaactgtactaaatccagacacagagaacttaggtatttattgcctccgtggagcatctgaaagaggtagtaacttagatttcactttagccaagcttgccctcagagatcctagggagcaaccaaccaacttctattcatttctgtgcccacagtattttgcagggcctatggcatacaatagaatgttcagtacatgttggttgaatgaatacaagcatatcaaagggggattgttaccataattattaccaattcacaggggataaataggatatcgggtaagaaatctattctaaaaatggtggcttagtaaggtggcaacaaatttgaatcttcttagctcttgctgttaagcccgttggtctctagtgacattagctgtctcattttaatttcttctctacttcatgagtacatgttgtagatagataataggttccagttttattaggtgggatttgaagaaggcatttctggtataaatgatgttactggaacaaatgactaagagatgttaatgaatttccttttctggcctttaaaaaataatgggatgcaagcttttttctctgaaaaggttaaagaccaggagtgggattagtcaatttggaatatatttgtcacctttggagcttttgtttctaacagagagcagacaaaagaataggtatttattaaatagctacagtttgccaaaatgacgatagttattttaatcttcaacacttacttaaggattaggcactgctgttcctattttgcagaggaagacactaaaacttaaaaagatggagaaaattcctgtagtgactttgtgagtgaatcagtaaggatgttaatgaaggtctagctgtccctaaagcccaaagtcattttactggaccgcataacctctctgttctaaagtcattgctctttgtcatgtcctttgaggagatttattctgcttcttttttttttttttttttttttgagacagagtcttgctctgttgcccaggctggagtgtagtgacgtgatctcagctcactgaaagctccacctcctgggttcacgccattctcccaagtagctgggactacaggcgcctgccaccacacccagctaattttttttgtatttttagtagagatggggtttcaccatgttagccaggatggtctccatctcctgaccttgtgatccgcccgcctcggcctcccaaagtgctgggattacaggcgtgagccaccgtgcccggcttattctgctttcgaaatggcctactgcttgtttcttagggtagtagctgagtttgcacaaagagttatactgatactcttcttccatttctcttctacttcattgtttgttaggttatttttagcctatttgtttatcctctggagtttcaaacactcttcatataattcccttacctaaaccttttctcaaagtagattgtactaattctaggaagcttattagactatagatttctgagcacttccaagacctgttggtttagaagctttgggaaagaaacccatgaatctgaatctttaacagactgtatccttctccccacttcataaatgccagacagactctcctttagaaaattggccctttaatgcccttcagtgacatatttaggaactcttcaactgaaaaattttgttttcctaaatatgttcataggtattttttcttttaacacaaaaaagatgattttatagttttttagcaccaaagctagtctttatttcatagtatctttaaatgtaataagactgaagtgcaacaattctttttgtacctttgactatcaggaaggacagagcatgcttattcaacaagtcaaatggaactctcatacctaaagacttcatttggaactattattgaagcctgatcaatacctgtcccaggttccaaataatgatactgtgaacactttgcgttccaggcaccttagccaccaaccaccttgtgctgtcgttattagctttagcagaactaatatctcacatgaaactacattagctttctattgcttcctaacaaattaccataaatttagcatcttaaaagtgtatccatatattacctcacacaattctgtagatcagaagtccagatgagctcagcttgctcactgcttagggtttcacaaggctgatgttaaggtatcagctggctggactcccatctgggggctctggggaggcattctcttctgtgctgattcaggttattggcacatccaggtcctaaggctgtaggtctgagttcactgtgcctttgctggctgacagctaaggcttgttctctgctccttcacaccacccacagctctcctcacttggccctctccatcttcagcaatggcaggggctgtccttctcacactttaaatctctctttttcttctgcctttaggagcacatgagattatatcaggtcggcctggataatccaggataatctcctgattttaaggacaactgatcagtaaccacacttacatctacaaagtcccttttgtcatgtcatctaacctattcattagggaagaacatctttaggagaggaggagggaaaattctgcctacttacactcacctacacatgtggttaaaaataactaaataatcccctaactgtaatacaatgtagagataaaaagagtgtaatatataataactgaatggattaaaaatgtattttagtatgtgagtgtttagacattacactgccaaaagtaataaagttgtcagaagagctgtgaagactgatacaagtgagtagggttggcaagttccgtgagcagtgtggtcatcagttatgtgactttcttaaacggcatgctcaccattgctcactcttggtaagttatcaatgaattttttttttttttttgatggagtctcactctgtcgcccaggctggagtgcagtggtgccatcttggctcactgcaagctctgcctcccgggttcacgccattctcctgcctcagccccccgagtagctgggactacaggcgcccaccaccatgtccggctactttttttttgtatttttagtagagacggtgtttcaccgtgttagccaggatggtctcaatctcctgacctcatgattcgccagcctcagcttcccaaagtgctgggattacaggtacgagtcattgcgcccagggaaattttttaaaaaagaatacagtatttcctcacttacatgggagtcacattctgtaaacattagtatatgtaaaaaatgcaaaaaacctagaaatttttatatgtaaaattacatataaattttacacaaaattacacaaaaacccagagggacatataaaaattttgtgtgatgacatcaacttcctgtcttagtccattcaggctgctataaaatatatatatatatatatatatatatatactaggtagtttataaaaaacaaatttttttctcagttttggaggctgggaagtttaagatcaaggcactggcagatttggtgtctggcaaaggctctttatggggttcatagatgatatcctcacatggcagaaaggggcaaggcagccccttaataagggtgttaatcccagtaatgaggtctctgcccttataacctaatcaccgccccaaggtctccagctcctaataccattgtattggtaattaggtttcaacatatgaattttagggtgaacacaaacattcagaacatagcatattcccaggccccctgcagtatgtatatcccgaattattgtgacaagtttataacctcccacaaggagtcccccagaagacagtggtaccccagctgagaaacagtggcaaggtgagggaattttgtagtatctggacttaaaaaaaaaaaaaaagccctgtctgctcttggtccgctcataaaaatttactaccttgccagaaacagagacctgaagtcatgtatggtatgacctggccatttataccatggggacattcatagactaggagtaggagtagagaaaccagcaatattcaattcactcttggatagtatgttagagagatagtatcgggtagagattatgactaaggactttggagtcagacaaactgacatttggaaccctccttactactctgagagttgtttccaccctctgaaaagtgggacactatgtctgtaagaataccctgccaggtattatggaagaatctgcctgcttttttgtggcatgtctcctcccattgcctctcttctctgcaccacagaaccagaatacggttctgcatttcaaaggtgattcatctgtaggagtaattcctcactgaagctgtacactgagtgtggcttccccgagggactggattctgtcaggaccggcatattcccagattctaatctagaattcgaatcccacaaatcctagatacgtaggtcaaatatttattttatttcccacctgtcaccaaacattacccatgtttttgctgggcctatattcagttttttgttttgttctgttttgagatggactcggtctgtcaccctgattggagtgcagtgacacaatcataactcactgagaaactggaactacaggcattgcaccaccatgcacaactaatttttttttttgtagaaacagggtctttctatgttgtgcaggctggtctgaaactcctagcctcaagcaatcctccctgctcgacctcccaaactgctaggaatacaggcatgagctagtgtgcccattcccactttattctttgaatagagttctacttgttcaaaagtagactgatgctagcatttttctcttacagcccattaaccagcctgagtttgatccctgaatttttgagaagattttgtattgttcataatttgtagaaaaatcaagctgtggcaaaagaaaagttctccctaaagattttcagacattaaagcacaaaagagttgaaatgttttcagaggtataaaaataaccagtgattctcattagcttcataattatcagaatcattaggtaaatgtctaattagtaaagactttatgctaggcactttacaaaggaaacagtacaggcacagtctttgtcctccagaagcttactctgaaaaaacctcttaatgacatgaaaatgccccctcttcagttatcagaagagaaggactgattaaagtggctattcatgttggtagtatttgcaagagacacgagaagttatattgtgacatgggaaagaagtttagagcagagctaacaacataaatgatataataaagagctgaagactgaacgaattaagtaatgagtcctggagacttctttcccaagcaatctctgaacaggattttaggagatcatcactcattttgagaaaattaggctcatggactctgatgccagaccacttgggcatcctgtccgtcattccactgccacccactgtgtagatttgacatacaatccacattacttaccatttttcttctgggaagcagccagagagggcattccctagagcaaccagactggcattaatctccagcagtgtgctttcatttcacttcctgtaaaaatccatctctagatcctgtgcttgacctaaggttaggtatcagaggaacaaaatactgattctcatttcacatcgcaattgttgctataaatagtgaattttataacctggtagatgcaagggatgcagagtgatggatgagcttctgctgattaaaaaaaaagttcataacttctaactacagttcaagttgaagcaaacaataataaagcacaaataatgcactgctgaattattcatgttgattataaaaaccgcgccctcaatgtcagagaagctgcattccttacagtgtatctttaaccagaatgcttcagcaattgcctggttctaagtgaaaaggaaggttcaggcactgaatcagaattatgctgaagaagagcttaaattgaagaaatattaaaagtcataactagaaaatataaataataaatagaaattattttgatttataaatcaaaataattataaatgactatattttgaggcaaatgataactgatcatagcctatactcctaactgaaaaaataaagcccagaaatgactcctagcataagtccctagtccaagccatcagtgtcacttaactggcctccctactttttctacttctgtcactctgtattttattcagcagccaaaattatccctcaaaaatgttgtcagaaataataccatcaaaaagtgggcaaatgacatgaacagacatttctcaaaagaagatatacaaatagctaataaacatgaaaaaatgctcaatatcaccagggaaatgcaaattacagccatggtaagataacaccttactcctgcaacaatggccattattaaaaagtcaaaaaacaatagatgttagtatgaatatggtgaaaggggaacgcttatacactgctggtgggaatgtaaatttgtacaacctctatggaaaacagtatggagattccttaaagaactgagagtaaatctaccattcaatccagcaatcccactactgagtatctacccaagggaaaataagtcattatatgaacaagatacctgaacatgtatgtttattgcagctcaattcacaattgcaaagacatggaaccaacataagtgcccactgaccaacgaatggataaagaaaacgtggtatatatacatcctgggatactattcagccataaaaaggaaggaaacaatatcttttgtggcaacttgaatagagcttgaagccattattctaagtgaagtaactcaggaatggaaaatcaaataccgtttgttctcacttagaagtgggagctgagctatgagtaagcaaagacatacagagtgataaaatggactctggagactcaggaggaggagagtggaagggggatgtgggataaaaaactacgtattgggtacgatgtacactacccaggtgatgggtgcactaaaatctcagaattcaccgctatataattcatccatgcaaccaaaaatcacttttaccccaaaagctatttaaataaaataatacattaaaaaataaaaacaaagcaaaacaagcagaaaaaacacaaaaatgttgtcagttcatgatatgtctttgctgaaatccctcatatgatttcttactttacacataataaaatccaaatgtcttatcctgtactccaataaaggccatacgtgatctagcaactgcctgcctctttctagtcatcaccgtctgaactataagcatatgactgtcttgtggttcctctaatacatcttaaaggcatttgcacttgtagtttgttctgtttccagtgcacagccatgtgcctcccagcttatgtcatctgctaggagaggttttccaaggtcatcaaatgtaaagtactgtcactttttactgcaacacagttttgttttcatctgagtacatatgtaaacaagaaaatgtcaacagtcagattggttggattgattgtctcttatgctaaaatgcaggctcttgaagagtaggatccttgcttgttttattgagtattgtatccaaagtaaccaaaacagtgtctgtcatatattgtccttagttcacttggtttcttgagtgataagctcagttgtacacacactttattatgaatgtcataataatttgttttctgcatataattatgccactttaatggactagatcattgttttctttgacttgtaagtgacttctaaagcttccctgatctagttcattctcctcacttaggataaaaaaccgaaatcatcccagaatgctgataatatataagatttaaaaaaccatttcaggcacaatgttgactgctattgtggggtccagacagagttttctgtggttatgcaaatctcctggctcttagatgcagtgagctcattgtatattagtaaatatttataaagtactctatattgactaaatgtttcacaatcaggttgattagtagtaattcctcccagcaaccttgtgaggtcaatcagcatttttaaagcacagcccagagaggttgggcagcttgcccaaggtcactcagcaggtcattggcaaaacctgcattggcgacttcagagcccattactgtgacaagccctggcactgactctttttggaagggtgacccctgatcgcttttcttgtaaggtaggcgtataaacactaaatgttctgaagtgagagaattacaaaggcctcgaggtgaaggagttattggtgtaattagaaattggagccagctattgaaaattgaaaatgctgcctaattgaggtgaattggaggatatattattttttgagagaattagagaaatatagtttgaaaaataggcatctaaaaagcaggaacgtatgtagaaaattaaagtaggtgactttggcaggggtaataaataagtcatagggccaaaatggtttaggaagagtttatgtaggccatggtatcagaaagtctgttctctaacattatatgccaccaattcaccttcctcaaacagtgttttctgaagttttgtgaaaatgatacctggtttcaagtatggagtatttcagtccttgaagcccaacatgcaaattacataggccccactattattaacatgccctgctaaatatcctctaggaatataaatatcaaggaaattatcttttctttttttttttttttgagaccgagttttgctcttgttgcccaggctggagtgcagtggtgcaatcttggctcacaacaacctctgcctcccgggttcaaacaattctcctgcctcagccttcctgagtacctgagtagctgggattacccatttatttctggtttctcactctgttgcccaggctggagtgcagtggtgcaatctcggctcattgcaacctctgcctcctgggttcaagtgattctcctgcctcagcctcccaagtagctgggactacaggtgcttgccaccacgcctggctaattttttgtatttttagtagagatggggtttcaccatattggccaggctggtctcgaactcctgaccttgtgatccgcccacctcgaactcccaaagtgctgggattacacgtgtgagccaccacacctggccaaggaaattatgttaattttaagaaacatgatgcatctttactttccattattttcttttttctttatgtttgtttcttcccttgagatttaagataaatagattcaagataatgataaatttctgtcctatctaattttgtcttttggtacctcagattatatctcctgtgttccctggaagcaaattattatgactaaccattgcaaccacagtagtaactgcttatattggtaaagcttattacatgctgagaactttctagggagtatctcgtttaacttttccaacattcttaggagaataggcatgcctatccctattttgcatttgggagctaagcttccaagtgtaactccagagccattattctattaaaaccttagtaaagtcatgttctcccctttctcagaaccctccactgacttcacatggtctgcaaggcttattgtggtttaggcacagttatcgtggtgaatgatcatctttgctacagctctcttcctcagctacagactttgcctcaaatatgctcaccacctggtcataagtcagatatcctgagcttggtctgacttggtgtccttgcacttgatcttctctctgcctcttatatacttcctcaacacatgcacctggcccaattatgtcattcagatttattctcaaatgcgtttcaaggaggccttctttggctatgctatataaagtagtatgctccattttaactatctattttccataactgattcctttttcttcatggtatgtaccatccctttaaaaattacttatatgtttgtttattgttcatactctatttccactagaatttaagctccatgaggacatcaattttgtattttattttctttatttgtttcattgacagtggccagaacaagtcatggaacatggtagactctccataaataattgttgaataaataaatgaactatcacactacattgctacaccaagttttttttaactttaattttaggttggggggatacatgtgaagctttgttgcataggtaaacttatgtcatgggggtttgttgtacagattatttcatcacccagatattaagccaagtaggcaattgttgtttcttctgttcctctccctcatcccccactccaccttcaattacaccccagaatctattattcccttgttggtgttcatgagtgctcatcatttagctcccacttatgaatgagaacatggggtatttggttttctgttcttgtgttagtttcctaagaatgatagcctccatctctattcatgttcccctaaaagacatgatcttgtcctttttgatggctgtatagcatttaatggtgtatgtgtaccacattttctttatccagtctgtagttggtgggcatttaggttgattccatgtctttgctatcgtgaattgtgctgtaatgaacattcacatgcatgtgtctttatggtagaatgatttgtattcctccagtaatgggattcccagtaatgggattgctgggtggaatggtagttctggttttagctccttgaggatgagggaaatgctagttctgtttttagctctttgaggaatcgccatactgctttccacaacggttgaactagtttacactcccaccaatagtgtataagtgttcccttgtctttgcaacattgccagcatctgttatttgttgactttttagtaatagccattctaactggtgtgagatgttatctcattgtggttttgattatatttctctaatgatcaatgatattgatcttttttcatatgcctgttggctgcatgtatgtcttcttttgagaagtgtccattcatgtcctttgcccactttttaatggggttgtttttctcttatatacacttgtttaagtttcttatagataatggatattagacctttgtcagatgcatagtttgcaaatattttctcccattctgtaggttatctgtttattctgttgatagttttgttctttcttttcttttttgctgtgaagaagctcttaagtttgattagattcaatttgtcaatgtttgctttggttgcaataggttttggtgtctttgtcatgcaatctttgcctgttcctatgtctaggatggtattgcctaggttgtcttccaagatttctatagtttcgagttgttcatttaagtctttaatccatctcgagttgatttttatatacagtctaaggaaggggtccagcttcaatcttctgcatatggttagccagttattccagcaccatttattgaatacaaagtcttttccctattgtttgttttagtcaactttgtggaagatcagatggtcataggtgtgtggctttatttctgggttctctattctgttccattggtctatgtgcctgtttttgtaccagtaccacactcttttggttactgtagccctgtggtatagtttatagccaggaaatgtggtgcctccagctttgttctatttgcttaagattgcctgggctatttgagccccttttttgattccatatgaattttaaaatagttttttctatgaagagtatctttggtagtttgataagaataacattgaatctgtaggttgctttggccagcatggacatttcaaagatgttgattcttcctatccatgagcatgggatgtttttccatttgtttgtgtcttttctgatttctttgagtagtattttgtaattttcattctagaaatatttcaccaccttggttagccgtatttctaggtattttatcctttttgtggcagttgtgaattggattgtgttcctgatttggctttctgcttggttgttgttagtgtataggaatgctagtgatttttgtatattgattttgtatcctgaaactttgctgaagttgtttatcagctgaaggagctttggggccaaaattatggggttttctacgtatagaatcatgtcatcttcaaacagcgacagtttgactccctcttttcctatttggatgccctctgtttctttcccttgcctgatttctctggctaggacatccaataacatgtttaataagaacagtgagagagggcatccttgtcttgtgctggtttacaaggggaatgttttcagctgttgcccattcagtatgatgttggctgtgggtttttcatatatagctcctattattttgaggtatgttccttcaatacctagtttattgagagtttttaacatagaagacgttgaattttaccaaaagtcttttctgcatctattgagataatcctgtggtttttgtctttagttctatttatgtgatgaatcacatttattgatttgcctgtgttgaaccaagcttgtatcctggatgtgaagcctacttgatcatggtggattaacttttgctgtgctgctggattcagtttgcaagtattttgcttaggatttttccattgatattcatcgaagatattggcctaaaattttctctttttttgttgtgtgtctgcgaggttttggtatcaggatgatgttagtctcatggaatgagttgagaagcagtcccttctcttcagttttctggagatgtttcagtaagaatggtaccagctcttacttgtatatctggtagaatttggctgtgaatccatctgttcctgggcttttattggttggtagactgtttattgctgattcaatatcagagcttgttattgttctgttcagggaatcaatttctttctggttcattcttaggagggtgtatgtgtccacaaatttgtccatctcttctaggatttctagtttgtatacatagaggtgttcatagtagtttctgatggttatttttatttctgtggggtcggtggtagcacctccctcatcatttctcattttgtatatttggatcttctctcctttcatctttattagtcgagctagtggcatgtctgtcttactaatgttttcaaaaaacaaactcctggactcattgatcttttgaatagtttttcatgtcgtgattttctttagttcagctctgattttggttatttcttgccttctgctagctttatggttgatttgttcttgcttctctttcagttgtgatgttagattgttaatttgagatctttctaagtttttgatgtgggcatttaatgcagaaattaatgtctttcttaacactaccctagctgtatcacaaatatcctggtatattgtatctttgttctcattagtttcaaagaacatcttcatttctgccttaatttcattatttacccaaaagtgattcaggagcatgttgcataatttccatgtaatttcatggttttgagcaatttttttagtcttctacatttattgcactgtggcctgagagtgtgtttggtatgaatttggttcttttccatttgccagggattgttttatgtccagttatgtggtcgattttagagttatgcaccatatgacgatgagaagaatgtatattctgttgtttttgggtggagagttctgtagaggtctatcagattgatttggtacaatattgagttcaggttctgaatatccttgttaattttctccctcaatgatctaatactgtcagtggggtgttgaagtctcccgctattattatgtgggagtctgtgtttctttgtagatctctaagaacttgctttataaatctgggtactcctgtgttgggtgtgtatatatttgggatagttaggtcttcttgttgaattgaaccctttactatgatgtaatgcccttctttgtcttttttgatctttgttggtttaaaatctattttgtctgaaattaggatagcaatatctgcttttttctgtttcctatttgattttcctccatttctttattttgagcctataggtgtcattacatgtgagatgggtctcttgaagacagcatttcatgggatcttgctttttcatccagcttgacactctgtgcctttaaagtggggcatttagccagtttacattcaaggttggtattgatatgtgtggatttgatcctgtcattgtgttgttagctggttattatgctggtttgtttttgtggttgctttatactgttactggtctgtgtatttaagtgtgtttttctattagctggtagtggtatttcctttctatacttagtgttccattgctcactcaacatttgcttatttgaaaaggaacttatttctcctttacttaggaagttagttgggccagatatgaaatctgtggtgaggaatttttttttctttaagaatgttgaatatggccgggtgcggtggctcacgcctgtaatcccagcactttgggaggccaaggcgggcggatcacgaggtcaggagattgagaccatcctggctaacacggtgaaacccatctctactaaaaataccagaaattagccgggcgtggtggtgggtgcctgtaatcccagctacttgggaggctgaggcaggaaaatggcatgaacctgggaggcagaacttgcagtgagccgagactgcaccactgcactccagcgtgggcgacagaacgagactccgtttcaaaaaaaaaaaaaaatttaatataagcttccaatctgtcctagcttataaggttttagctgagaggtctactgttagcctcatgggattccctttgtaggtgacctaccttttttctctggctgcctttaacattctttttttccattttgaccttggaaaatctgatgattatgtgttttgtggatgaccttctggtgtagaatcttgcagagattctctgtatttcctgaatttgacttttggcctctctagcaaagttggggaagttttcatggacaatacaaaaaccagccagctcagcctggttaagaactcttgttggaggagtactggtgtggtgacttgtaggacatatgacactctggccacttgagttacgagaggctttgcattggttttttctcatctctgcatgtgggtgttcctttaagtgcagtgtagattaagtacagtcaatagatgtcttttctaaatgttctcacagggtcgaggttttctgcagcgtttttatttgaagctgacttcttttagcaagtggggtttttagcaagatatttttggtgctgaggctttgaggtatgatccagtaggtggtgcttaggtgtatttgtcagttggtagatccttgctcggttgtgtggcttccccatgtttcctctcctttgcagccttgttccctctcagtgctctgaaagtgtgggcttttctcccccttgagttctggctgcagatcgcagcttggcactcttgggctgcccactgcagctctggggaaatctcagggtttatgttccttccctaacttggagatagcagaggaagagaccttagtagtggtgtggctaaaggtcttttgcatgtctcctggggactctaccccagagagatgcaggtcagcagtcgctcagtgtaatcagctcaggatagcgggtctgtgcgatgggcccaacctgcaggttccctgtctggtaatgagtggggttggaggggatccatgggagatggagtgacctcctcttcttgggttgactgcagcttgttggtggtgtggataaggcacttagggtctttgctcttttgtttgttggagggtagcaagggcagttccactgcagagtcagtggcatagaggctttcagttacccctgggggctctgtccaggaagttacagagctgctattggctcaatagccctagtcgggggtggccagtgaggagatatgggaacaggcatccacatagtctggcgacttttttttttttttttgagacggaatctcattctgtcacccaggttggagtgcagtggcgtgatctcagctcactgcaacttccgcctcccaggttcaagtgattctcctgcctcagcctcctgagtagctgggattacaggtgcatgccaccacgcctggccaatttttgtattttcagtagagatggagtttcaccacgttggccaggctggtcttgaactcctgacctcaggtgatctgcctgcctgggcctcccaaacagtctggccactttttatttatttatttttatttttattttattttattttatttatttttttgagatggagtcttgctctctcgcccaggctggagtgaaatggcacaatcttggctcactgcaacctccgcctcccaggttcaagcgttctcctgcctcagtctcctgagtagctgggattacaggtgcccgctgccacgcctggctaattttttgtatttttagtagagatggggtttcaccatgttccccaggcaggtcttgaactcctgagctcaggcaatccacccacctaggcctcccaaagtgctaggattacaggcatgagccaccatgcctggcccagtttggccactttttaatagggctgctgtgtggtatgttgggggtccgctccagttcctagtcaacttgggttttccagtacctggagggatcaacagcgaaggctgcaaaaccacaaacatggctgcctgcccctccctctgggagctctgtcccaggaaggtatggacccattgccagctcaaatgcacctgtaggaggtagctggagatccgggttgggaggccccacacagtgaagaggaactggatcagggacccgcttaaaaagcagtctggccatgtttttgtatagcagctgtcatcacatttttgtatagcagctgtgctgtgccaggggtctgattcagcccctggtcacctatgtctctccaaagcccaaagggcaggacagctaagtcaccaaaacagcaaagttggtggcccacccctccctctgggagctgtctcagggaggtttgaaacctctgttggccagtgaacaccactgagggtggctggagaccctggtttgggaggccccacccagtgaggaggaacaggatcagggaccttctttaaaaagcagtctagtcacgttttcatagagcagttgtgctgttctggagatccacttcagcccctggttaccttggtctttccaaagcccgaaggctgaaaaagctaagtctgccacacagccaatatggcaacccctaccccaccccccaaccctaggagctccagctcagtgaggtgcaattgttgctaccagtggctggctggagttccgcatcagcaggtcttatcctgatgtgttgtgggagtagggcctgaagatgaatgctactcattcccctggattcagccttttcctgagggtgtatatgagggtctaacctcctgctttgccagagtttcagctgcttttgccgggaagctcagaaagcccgagtatctaaggttcccacgtctctgcatgtgctcgagtggctgctctgctaagcccccacttagctctgtgtgttagactaaaggccatggtggagtgggttcacatggggatcttctgactcgagggttgcaaagatccacgggagaagcgtgggttcccagagtcacacactcacccgctgcttccctgggcgggggaggttaccctggctttgtgttgctccctggtggaccgtcattctgccttgcttttctctgttctccgtggactgagttgttctcttgattagtcccaatgtgagcacctggttgtttcagttgaatatgtatttactcactactttcatttttctccatgacagccaagcacactacctgtttctagtgagccaactttagatttttttctatactaagtttctaataattgaattaacttcacacaggctacatactgtgcgggttttgaagaatcaaagtcttgggctttgggtgaacattttccagcatctgttactggctgttcaggtctagcctttgccacagaaagaacccaagccaagaagaatctgagtgttttcgtctacacagtgttcatctcaaagcattcaagaatccagggaagggactctggaaagattgtgagatgggactggcagcttttcctgtattactttgcttttttttttttttaaggaaaatctgaaggcaatgggaatctggcaattctcttgggacttgtgggcaaatgtcagtgtgtctagtgtgatggtgcatattagagcgccaccctctgtcagctctaccatccagattttgtgaaacagatattgcctgtgagttggttgggaatcactacatgcagactggaggaatagagatcagtgactgaaggggatcttggcaaaaaaaaaaaaaaatcatctctatttcatgagggatgctggaatgcattctctgtaagcacttttttttttttttttgaaatggagtcatgctctgttgcccaagctggagtacagtggtacgatctcagcttactgcaacctctgcctcttgggttcaagtgattctcttgcctcagtgtcctgagtagctgagatgacaggtgtctaccaccacacccagataatttttgtacttttactacagacagggtttcaccatgttggccaggctggtcttgaactcctgacctcaagttatctgccccctcttggcatcccaaagtgctgggattataggtgtgagtcaccgtgcccagccctctgtaagcatttcatataatatttttatttttaatgttctcttagaccttgcctcttgcccaaatgtaactacagttttcagctgggtatgattctgaagtgtagcaggacacagatttttacatttgtagccctctttgtttgtttctgttttgtttgtttgtttggggggaaatcaacttctaaagaaatattatcagattttttcttacagtattagctaattctaaaatggatagactttacaaaatttttttaatcgacgagttgaaggtgcctttgcatatttgacaatgtataattctaagaaatatcttaccatgagaatcagaaaacctggattcttttcatgactttggtctcaactaaatgcttgacttactttaatctaagtctcagctacttcatctgcagaatcagaatgctgaaacttttttttttttttttttttttttttttgtagagacagggtttcaccgtgttagccaggatggtcttgatctcctgacctcatgatccgcctgtctcggcctcccaaagtgctgggattacaggcgcgagccaccgcgcccagccaaactttttattatatgaaaactattttattgatcctatgaaattgtatgaaagtgtgaaacagttaataaggaaggtaaactgtgtgtgttgggtcgggggtgaaatggagaacaggtgttttaatgaggactaacttgggcgtaaactcttctgccacttaaaaaaaacattgaagagagatgagattatttctaaatgtcattgaagctctaattttctaggatttttaggtttcctcaaagtaatgggtagggacaaaataaatggtgatattaaaagacattgtaatgatatgcacaaataggcaagcatatgttttctggatagcatcaattatttcacccttcaagaaattaagtagaaaacagacaggatgtaatacacaaagaagatgtgcgttcaccctgacactctgaccctgaatgtctccagtgatttggggatgatatttatccataagtttaacttttcacgtgtgtaataggtttcactatagatgttcagttccctaaaactccctgatactggaattcttaaatgttagagtcaaagctagagatcagctggtccagttgtctccaattacagatgaggaattgatttactcatttttttacctcattcaacctttggaaaactaaaggtaacaaaagctcagttaaacatgtatcttatgagactgaaaatctcatcatctatggtgaagaaaagaaagaaacctaacaagctgacattatactatgacacctagaggacagcttacacttttttttgagatggagtctcgccctgtcaccaggctggagtgcagtggcacaatcttggctcactgcagcctctgcctcccaggttcaagtgattctcctgcctcagcctcccgagtagctgggactacaggtgcatgccaccacgcctggctaatttttgtattttagtagagatggggttgcaccatgttggccaggatggtgttgatctcttgacctcgtgatccacctgccttggcatcccaaagtgcttggattacaggtgtgagggactgcgcccggccaattgagggtatttgaaccattttaaatttaagggatcaagtaaattccattgtcactgctatatgtttcgtagcttgtccttctagaatacatttttcataatttgcatatgtatgttttgatggaaaagctaggagagccaagtaacattgacttcatttggtaagtattttatttattttcgcatattcttttttttttttttttttaaggcggagtctcactctgtcccccaggctggagtgcagtggtgcgatcttggctcactgaaacttctgcctcctgggttcaagcagttctcttgcctcagcctcccaagtagctggtactacaggcacatgccaccatgcctggctaattttttttgtattttagtagagacaaggtttcaccttgttgcccaggctggttgcgaactcctgagctcaggcaatctgcctgcctcggcctcccaaagtgctgggattacaggcatgagccactgcacctggcctatttttgcatattcttaagtcgggacaataacactgcgtcttcagccaactgagtaccgtgtgagaagagagtgaaacacattggcagaattggagctccaattcattttctaacaagggctctaagataaaggacgtgtgtatgtatgccatttcatttcaagtacagtgcattcacaactggggggaagtctgcagtaatccctgttacctttaatacagttgaactagtttactagaagcttggattaaggatcctcattctaataaaaaattgaatttaggatgacaactcgccaatattacaaacagcagtggttcgttgtttggaaggcaggtgatgtaagttctgggagctccattaggaaaaatctattctttttcagacacactgccatcattctacgaatagtaccctatttaaatggacaattcaccatatctctgtattaagcatgctgactttggagcctaactgcctgagtttgaatctaggccatgttcatcactcctatgtggcattgggcaagctgatcatcttccttaagtcttggtctcctcatctgtaaaatgtggatcataccagtacttaactcgtgcgatgttagagaactcagtgaggtaatccttatgaagtgcttagcccagtgtgtggtatcttaagcattcaataaatgttcactgttattcataaaccgcataattcaggagtgtagggtaatgcagcctatgaagatttgaccccagtgtgatgaaggatgctctacctgtcagactagaagtacctggagattggggttgtatcaaaagatagaacatgtcacaaagctaaaaagataagttgctctcctcccaaatttatctttacccttataactgacaaatggatattttattttccatagctgtatttatagacatttaaacaaactgatatataatacattttgcatatgcatttgtatgagttcttccttagtgagtcactaatctctcttatatttatgtctcataattattcctacccaacacaaactcagctggaagccctgaagttttcttgctcccaaaccctccaaaaggaaatgcaaaacccaaatgtgaaatttttcaaactgaattttctggtgataaaggagaactttacaggatagtgtgttcggttcaacctagcaacactgagcaccttctggattgtaagaagcagctaaatggtggagagagatacagaagagtaagcataaatgcattttgctcctagtagatggccatctggtaagcgagatcaaacgcatgtaaatgtaatacatggcagcatataaaggccaataaggagagattcaaataaatcacatacagtataaaggagagaggcattccattcagcagagggatgtgaaaaggttcaatgaaagaagggatattggccggtagtgactcatgcctgtaatcccagcactttgggaggccaaagtgggcagatcacttgaggccaggagttcaagaccagcctggccaacatggtaaaacccgtctctactaaaaatacaaaaattacctgggcatggtggtgcgcacctgtagtcccagccactggggaggctgaggcaggagaatcgcttgagcccgggaggcggagcttgcagtgagccaacatcgcgccgccacactccagcctggtgacaaagtgagacccagtctcaaaaaaaaagaaaggatatttgattccagccttgaagtgtatgaatgaattgtgatcggctgaaagaagagtgaaaggataaattattgtctatccctgcctttagaaaatgcagtctattagcacagacaactgtgagcattgacaacaacgatacaatgccagggaatctgggttgtcatggaagaaagaacaaaggctgactgctagttgattggcatggtcaggagtggcatccctgggaagaaaactgtggagtagaatgttaaaagatgagaaggaatacgtgccctatgccctcctcaccagtaccagcttgtctgcttagcagtggatattgcctttgcaaagacatggaggtatgagagaggccgcatctgtgagggggagctgctagtaaatttacctggactactgcaacaagttctagccacagcagaaatagtgatggcctgccctaggaatggcagtaagaactagaatggatggtacatattggatacattgggcacagacaactgtgtgtttgtataagaaggatgtcatggacatcatctagtgaaggatagtactccaatttgctcctaaaaagatgaacaggagacctctgcttaaattactttgccctttcttatgcaaaatagagatccaggtatcagggccaatgtaagttacttttatactcaaaaataaaccagcagacatgtcagtggtaagggtaacctacagcagaaaagtcactgtctgcacacaaccccaatcaaatgcacccaaatttttctttcctttttttttttttttttttgagacagaggcttgctctgtctcccaggctggagtgcagtggtgcaatctcggctcattgccagctccgcctcctgggttcacaccattctcctacctcagctgggactacaggtgcctgccaccacacccagctaatttttttgtatttttagtagagacggggtttccccttgtcagccaggatggtctcaatctcctgacctcgtgatccgcctgcctcggcttccccaagtgctgggattacagacgtgagccactgcgcccagccaaatgcacccaaatttcttatctcaccggatctgtatgactagaaacatcaagaacacagaataaagatataattaggagaagaaaaatggaacagactgctagatagatgagaacttctatcccttattaacataaaagtaacatatttaaagaataaaagcttttgatgtgatattaaaaattctgtgatacatgacagaatggaaatatttttatgtcaattttacatgacttccccttaacctactgtttaatccccttagctaattctgcaagttacgctgaaaggttcagggaatccaggaaagagagggaagctcattcagctcagaatgcaccataatgtctcggcagcacatttgaattatatgtttaggctgacaggcaaacgtatttcggggcagattccttagaaagcaggagacaatttccttcagctccacgtcatcgtttgatgtagattgcctattatattcttgaggtattatgaaaaatggatttgaagatattttcttgacagtgggtagactagtggaatccagtgactgtatttaaaatgtgcaggggtttgttataacatggtaatagaaatatcagttgcactgacaggttaaaaaaaatctgtcaatgaatgataatgaagttatttaaatgtcgactcactcgcaaacattttccaaaccctaaattattctcactgctttaacctcatgcatcctaagttattaaggagcagagtctgtgatgcacccaatgcgcccttggctttcggagctatttttatgccaccaaatgcactaggagcaatggaagtggctgctcttaatgattttaagaaagaaacaaaacacagacgctgcagctgcttgatttagaggtgaacactgttccgctttcaggacatcttgttggcagtgatttgagtaatgccctgatgcttcctgtgcccaagcttccctctatagcctgagtctttgctttgtgaccttggcagtatggctctgtgtttctgaaataaggcatcttccgtctgtggggttttgggtagggaaggagatgggcaggatatctgtatgctttctaaagccttaccgaaggagcagcttggctcatccctggttcagtacgtgcccattaggcattcattcacccttcatgtggagaagccacctgattgtgccagcactgtcctggggactggggatctgggggtgaacaaagatatgttcactgctttcagggcacttagagtaatcaggagatgggtgccaggcagagattttctgatcagaaggaagagaggtgaactcctggtttctggtccagcatgtaagaagttcacagtttgtccattttcctagcaagttaaaagctaaagaaactgaacaattaacaactctgttcagatcatcctacaagtgaagtcacaggacaaatgctgtcccccgaattggaaagaccaacagtcagacacagcaaatcacaatttacctgagcagaaactcaacaagcagaaacttccacaggaaccagtgctaagttacaaaaacttaaacagtagttgatggtttgcaggaggctcagtgtggacatgtctgagagttaagaacttcgtggggacctaatcagagaggccctcatacttttgtgagttttacctccaggagctttaccagctccccacagtgacaactggtgggggaacttaccttcgtacttccagcagggagagggcaaaagtaaccattttgaaatacgccagagcattctgtcttaacaagacctgccctcaggagaaactagttaacagagcctcacctgctggggatctgtcagaccataactgactagggggaagggaaataagcaactgcaacttcctctagctattatgttccacctaagcagggaagaaatgtgagaagcactggtaaagttcacattccaggggcaaagactcccaaaaaatctgagagttaatcatagaactaaagaatgttttgcctggctgggcggggtggctcacgcctgtagtaatcccagcattttgggaggccgaggtgggtggatcacctgaggtcaggagttcgaaatcagcctggtcaatatggtgaaaccttgtgtctactaaaaatacaaaaattagctggacgcggtgaggcatgcctgtaatcccagctactcaggaggctgaggctggagaatagcttgaaccagggaggctgaggttgtagtgagctgagattgcaccacggcactccagaatgggtgacagagcgagactctgtctcaaaaaaaaaaaaaaaatgttgtgtctccctcttcgcttccccgtattaccatcacacaactaaaggcctattgactatggttccttttacctagtacctcatgtcagctgttcaggcattctaagaggcaaacaatccagtttctaaagattaaacaagcatcacaaccagagtcatatatgataggaatatcagaattagaaaaaccgataatttttataaatgtatgatcaacatgctaagggctttaatagaaaaagcagacaacatggaagaacagatggataatgtcatcagagagatggaaattctaagaaaagatcaagaagaaatgctagagatgaaaaccatgtaatagaaatgaagaatgcctttgatgagctcattggtagactggacatggctgagaaaagaatctctgaaattgatgatgcctcaacagaaacttccaaaacttaaaaaaagaccatcgaagtgcaaatacagagcaagaactgtggggcaactacaaaagtgtaatatatgtatagtgggaataacagaagggaaagaaagagaaagaaacaagcaatgtatgaagcaatgataactgagaatttctgcaaaataatgtaccaaacctcagatctagaaaactcagagaacactaagcaggataaatgtcaaaaaacaaagcaacaaccacaaaaaccatcataaccccacataggtatatcatattcaaaattcagataatcaaagatttaaaaaaaacttttttaaggcagaatggggaacacctacctgtaaagaggcacagatgaaaaatacatctgacttctcagatctatacaggcaagaagagagtgggatgaaatatttaaagtgctgagaggaaaaaataatggaaaacatcaagaattctgtaccctgcaaaactatctttcaaaagtgaaggagagataaagacttttctcagacggacaaaagttgaggaagtttgttactggtagacctgctttgaaataaatgttaaaagaagttcttcagagagaaggaaaatgatacaggatagaaactcaagtctatgtaaggaaaagaagagcatcagaatgaataagtgaatgtaccacaaaaacctttattcttctgagtagtaatctcacagataccactttcttcaagataatagcaacaatgtattcaattacgtatgctcatgtatatatatacacacacacatacacacttaggtatgcttatgtacaggtgaaatgaatgacatcaataatacaagaattgggaaggagaattaggaataagttgttatgacagagtgcctgcactccccatgaagtagtgtgttgttattagaagtgaacttcattagtggtaaatatgtattgcaaactctacagcaagtactaaaaagagtgaaaaagaagaggaaaacaaataggctaagaaaggagagaaaataaattcgtataaaatgctcaattaaaatcacaaaagacagaaaacatgtgaaagataataggaacaaagaataaaggaaacaaaaagaaaatggtaaaaatgtgataggcaataatccaactatattaataatcactttaaatgtcagtggcctaaatataccaattaagacagagattgatggagtggatgagaaaaacaagccctaactatatgttgtctacaagaaacccacttcaaagacaaagatacattcaaattaaaagtaaatggatggagaatgatataccatgctaacactaattagaaggtctttggagtcattatattaattttacacagggcagatttcagagcaaagaaaattatcagggtaaagaggggcattacataatgataaaggggagtcaatatgccaagaagacatgagtccttaatatgcacatgcctaacatgagtgtgtccaaatacatgaggcaaaaactgattagaactgcaagtgtaaagatgaagtcattattataattggagaccttaacatcgtctttcaaaaatgaacagatctagtaggcaaaaattataaggacatatttgaactcaacaacaccatcaaccaacagggtaaaattgatatctctagacaatatcacctaacaccaacagattacacattcttctcaagatcacatggaaaatttgctaagacagaccactttctgaaccataaaacacaccttaacaaactgaagcaaatagaaattatacaatgtctgtttttcaaccacaatgaaattaaactggaaatcaataaaagaaatagctgaaaattttcaaaataagcagagattaaacaacatgcttctaaatatcacatcgatcaaagaaaaaatctcaagagaaactataatttgaagtaaaggaaaataaaataaaattaattaaagtttgtaggatgcagtaaaagccatgcttagagggaaatttacaatgttgaaagtgtatatttaaaaagaaaaaatatgaaatcaataatttaaacccccacctcagaaaattagggaaaaatgagcaaattaaattgataataagcagaagaaaagaaataataaaaaattagagcataaatcaacaagactgaaaatagataatcaacaaaaccaaaacctgtttttttggaaaaaaaaaaaaatcaagaaaatggataagcctctagccaggctaagaaaaaagagagggagcacaaaatactaatgtcagaaatgaaagaggagagagcactacagatcctatggatactaaagagacaataaaggactattatgtacacttttctacccacaaatttaataacataggtgaagtggaccaatttcttgaaagacacaatctgccaaaactcacataagaaaatgtagaaatctgaataggcttgtaactattaaagaaattgaatcaataattaataatcttccaaacagaaagcaccaggcacagtcagttcactggtgaattttcccatacatttcagaaataaattatgccaatttactacaaactcttgcagaatacagaagcagagggaatacttctcagctcatttcatgatgctggtattattccaatatcaaaaaccacccaatgacattaggagaaaaaagcaaacttacagacaattatctctcatgaacaaagatgcaaaacccctcaatccaataatgtttgaaaagaattgtgcatcatgaccaagtggggtttatccaagatatgtaaagctggtttaatattcaaaaatcaattaatgtaattatcacatcaacaggctaaataaaatcacataatataccaatagatgagggaaaataacaaaacttaataccaattcatggtaaaaactctcagcaacctaaggatagcgggaaatttctttttcttttctttcttttttttttttttttttttgagacagggtctcgctctgtcacccaggctggagtgcagtggtgtgatttcagctcactacaaactccacctcccaggttcaagtgattctcctgcctcagcctcttgagtagctgggactacaggcgtgcaacaccatgcccagctaatttttgtatttttagtagagacagggtttcaccatgttggccaggatggtcttgatctcttgaccttgtgatgcgactgcctcagccttcgaaagtgctgggattacaggtgtgagccaccgcacccagccgaggaaactttcttaaattgacaagaaacatctacaaaataccttcagctagcatcttacttagtggtgagaaactcgaaagttttcccactaagatcagaacaaggcaagaatatctcctcaccactgttttttagctggaagtcctagctaataccataagacaagaaaaggtaataaaagttatacagattgaaaaggaagaaataaaactatctttgttgcagagacagaagcatctatgtataaaatcttagagaatcaacaacaatgaaaaaactaataagtaattgtagcaagattgtacaatataaggttaatatacaaaagtaatatacactagtaacaaacaagcagaatttgaaattaaaaacgcattaccatttacattagcataccaaaaaagaaaatagacataaatttaacaacatacgcacacaagatctgtatgaggagaactatgaagctctgataaaggatgttaaaaaactaagtaaatgaaaagatattccatatccatggacagaaagactcaatattgccaagatgtcagttcttctcaacttgatctatagattcaacacaatctcaattaaaatgtagcaagttattttgtggatgttgacaaataattctaaagtttatatggagatgtaggagacccagaatagtcaactgagtagtaagggaaggaaacaaaattggagcactcactgcctgacttcaagacttacaataaacttgtagtaatcaggacagtttgttattgtgtgaaggaacagatacatagatcaatggaacagagtagagagcccagacatagaacaatataaatatagtcagctgatctttcacaaaagaccaaagcccatgcaatgaggaaaagtcttttcaacaaatggtgctgaaacaactggacacccacaggcaaaaataaatacaaataaaaggaagtttgaacacagaccttacagccctcacaaaaattaactcaaaatgtatcatagacctaaatgtaaaatgcagaactataaaactcctgaagataactaggagaaaacctaaatgaccttggatatggtgatgactttttacatacaagaccaaagtcacaatctatgaaaaaaatgggtaatccagacttcattaaattttaaaactctgagaatgataataccaatagaatgagaagacaagccacagactgggaaaaaattataaaagacctatctgatgaaggcctgtcatatacaatatacaaagaaattcagtaggtttcaagctagctggtgcaggtggctaggattaaggtagtggcagtggagatatggtagaacactgggacctgttgttggattgcatgtgagagatgagggacaggaacaaaaatgactccaagtttctgtgtttttttgcaattggctagaagatagtgatgttttactgataggtagactcctaggcctagaatagggccgtagggcgtgtgtgtggtgggtggcaggggagatgagggcagggtggaaatgactcctttttggacttgatagatttgaaatctattcccatgaggcatccaaatgaaggtgtcaaaaatgagttagacataggtaattggagctctgaggaatattgtgagcttgagatacatacacatttgtaaaggagaccttaccaaatagaggctcttgggtgtcttgggaatgcctttctctctcctagaaaggaaaggcatcagggaggagccaagatggccgaataggaacagctccggtctacagctcccagcgtgagcaacgcagaagacgggtgatttctgcatttccatctgaggtaccgggttcatctcactagggagtgccagacagtgggcgcaggccagtgagtgcgcgcaccgtgtgcgagccgaagcagggcgaggcattgcctcacctgggaagtgcaaggggtcagggagttccctttccgagtcaaagaaaggggtgacggacgcacctggaaaatcgggtcactcccacccgaatattgcgcttttcagaccggcttaaaacacggcgcaccacgagactatatcccacacctggctcggagggtcctccacccacggagtctcgctgattgctagcacagcagtctgagatcaaactgcaaggcggcagcgaggctgggggaggggcgcccgccattgcccaggcttgcttaggtaaacaaagcagccgggaagctcgaactgggtggagcccaccacagctcaaggaggcctgcctgcctctgtacactccacctctgggggcagggcacagacaaaccaaaagacagcagtaaactctgcagacttaaaagtctctgtctgacagctttgaagacagcagtggttcttccagcacgcagctggagatctgagaacgggcagactgcctcctcaagtgggtccctgacccctgacccccgagcagcctaactgggaggcacccaccagcaggggcacactgacacctcacagggcagggtattctaacagacctgcagctgagggtcctgtctgttagaaggaaaactaacaaacagaaaggacatccacaccgaaaacccatctgtacatcaccatcatcaaagaccaaaagtagataaaaccacaaagatggggaaaaaacagaacagaaaaactggaaactctaaaacgcagagcgcctatcctcctccaaaggaacacagttcctcaccagcaacggaacaaagctggatggagaatgattttgacgagctgagagaggaaggcttcagacgatcaaattactctgagctacgggaggacattcaaaccaaaggcaaagaagttgaaaactttgaaaaaaatttagaagaatgtataactagaataaccaatacagagaagtgcttaaaggagctgatggagctgaaaaccaaggctcaagaactacctgaagaatgcagaagcctcaggagccgatgcgatcaactggaagaaagggtatcagcaatggaagatgaaatgaatgaagtgaagcgagaagggaagtttagagaaaaaagaataaaaagaaatgagcaaagcctccaagaaatatgggactatgtgaaaagaccaaatctacatctgattggtgtacctgaaagtgatgcagagaatggtaccaagttggaaaacactctgcaggatattatccaggagaacttccccaatctagcaaggcaggccaacgttcagattcaggaaatacagagaacgccacaaagatactcctcgagaagagcaactccaagacacataattgtcagattcaccaaagttgaaatgaaggaaaaaatgttaagggcagtcagagagaaaggtcgggttaccctcaaagggaagcccatcagactaacagcggatctctcggcagaaaccctacaagccagaagagagtgggggccaatattcaacatacttaaagaaaagaattttcaacccagaatttcatatccagccaaactaagcttcataagtgaaggagaaataaaatactttacagacaagcaaatgctgagagattttgtcaccaccaggcctgccctaaaagagctcctgaaggaagcactaaacatggaaaggaacaactggtaccagccgctgcaaaatcatgccaaaatgtaaagaccatcgagactaggaagaaactgcatcaactaacgagcaaaatcaccagctaacatcataatgacaggatcaaattcacacataacaatattaactttaaatgtaaatggactaaatgctccaattaaaagacacagactggcaagttggataaagagtcaagacccatcagtgtgctgtattcaggaaacccatctcacgtgcagagacacacataggctcaaaataaaaggatggaggaagatctaccaagcaaatggaaaacaaaaaaaggcagggcttgcaatcctagtctctgataaaacagactttaaaccaacaaagatcaaaagagacaaagaaggccattacataatggtaaagggatcaattcaacaagaggagctaactatcctaaatatatatgcacccaatacaggagcacccagattcataaagcaagtcctgagtgacctacaaagagacttagactcccacacaataataatgggagactttaacaccccactgtcaacattagacagatcaacgagacagaaagtcaacaaggatacccaggaattgaactcagctctgcaccaagcggacctaatagacatctacagaactctccaccccaaatcaacagaatatacatttttttcagcaccacaccacacctattccaaaattgaccacatagttggaagtaaagctctcctcagcaaatgtaaaagaacagaaattataataaactatctctcagaccacagtgcaagcaaactagaattcaggattaagaatctcactgaaagccactcaactacatggaaactgaacaacctgctcctgaatgactactgggtacataacgaaatgaagacagaagtaaagatgttctttgaaaccaacgagaacaaagacacaacataccagaatctctgggatgcattcaaagcagtgtgtagagggaaatttatagcactaaatgcccacaagagaaagcaggaaagatccaaaattgacaccctaacatcacaattaaaagaactagaaaagcaagagcaaacacattcaaaagctagcagaaggcaagaaataactaaaatcagagcagaactgaaggaaatagagacacaaaaaacccttcaaaaaatcaatgaatccaggagctggttttttgaaaggatcaacaaaattgatagaccgctagcaagactaataaagaaaaaaagagagaagaatcaaatagacacaataaaaaatgataaaggggatatcaccaccgatcccacagaaatacaaactaccatcagagaatactacaaacacctctacgcaaataaactagaaaatctagaagaaatggataaattcctcgacacatacactctcccaagactaaaccaggaagaagttgaatctctgaatagaccaataacaggagctgaaattgtggcaataatcaatagtttaccaaccaaaaagagtccaggaccagatggattcacagccaaattctaccagaggtacaaggaggaactggtaccattccttctgaaactattccaatcaatagaaaaagagggaatcctccctaactcattttatgaggccagcatcattctgataccaaagccgggcagagacacaaccaaaaaagataattttagaccaatatccttgatgaacattgatgcaaaaatcctcaataaaatactggcaaaccgaatccagcagcacatcaaaaagcttatccaccatgatcaagtgggcttcatccctgggatgcaaggctggttcaatatacgcaaatcaataaatgtaatccagcatataaacagagccaaagacaaaaaccacatgattatctcaatagatgcagaaaaagcctttgacaaaattcaacaacccttcatgctaaaaactctcaataaattaggtattgatgggacgtatttcaaaataataagagctatctatgacaaacccacagccaatatcatactgaatgggcaaaaactggaagcattccctttgaaaactggcacaagacaggaatgccctctctcaccgctcctattcaacatagtgttggaagttctggccagggcaatcaggcaggagaaggaaataaagggtattcaattaggaaaagaggaagtcaaattgtccctgtttgcagacgacatgattgtttatctagaaaaccccatcgtctcagcccaaaatctccttaagctgataagcaacttcagcaaagtctcaggatacaaaatcaatgtacaaaaatcacaagcattcctatacaccaacaacagacaaacagagagccaaatcatgagtgaactcccattcacaattgcttcaaagagaataaaatacctaggaatccaacttacaagggatgtgaaggacctcttcaaggagaactacaaaccactgctcaaggaaataaaagaggatacaaacaaatggaagaacattccatgctcatgggtaggaagaatcaatatcgtgaaaatggccatactgcccaaggtaatttacagattcaatgccatccccatcaagctaccaatgactttcttcacagaattggaaaaaactactttaaagttcatatggaaccaaaaaagagcccgcatcgccaagtcaatcctaagccaaaagaacaaagctggaggcatcacactacctgactgcaaactatgctacaaggctacagtaactaaaacagcatggtactggtaccaaaacagagatatagatcaatggaacagaacagagccctcagaaataacgccacatacctacaactatctgatctttgacaaacctgagaaaaacaagcaatggggaaaggattccctatttaataaatggtgctgggaaaactggctagccatatgtagaaagctgaaactggatcccttccttacaccttatacaaaaatcaattcaagatggattaaagatttaaatgttagacctaaaaccataaaaaccctagaagaaaacctaggcattaccattcaggacataggcgtgggcaaggacttcatgtccaaaacaccaaaagcaatggcaaccaaagccaaaattgacaaatgggatctaattaaactaaagagcttctgcacagcaaaagaaactaccatcagagtgaacaggcaacctacaacatgggagaaaattttcacaacctactcatctgacaaagggctaatatccagaatctacaatgaactcaaacaaatttacaagaaaaaaacaaacaaccccatcaaaaagtgggcgagggacatgaacagacacttctcaaaagaagacatttatgcagccaaaaaacacatgaaaaaatgctcatcatcactggccatcagagaaatgcaaatcaaaaccactatgagatatcatctcacaccagttagaatggcaatcattaaaaagtcaggaaacaacaggtgctggagaggatgtggacaaataggaacacttttacactgttggtgggactgtaaactagttcaaccattgtggaagtcagtgtggcgattcctcagggatctagaactagaaataccatttgacccagccatcccattactgggtatatacccaaaggactataaatcatgctgctataaagacatatgcacacgtatgtttattgcggcattattcacaatagcaaagacttggaaccaacccaaatgtccaacaatgatagactggattaagaaaatgtggcaaatatacaccatggaatactatgcagccataaaaaatgatgagttcatgtcctttgtagggccatggatgaaattggaaaccatcattctcagtaaactatcgcaagaacaaaaaaccaaacaccgcatattctcactcataggtgggaattgaacaatgagatcacatggacacaggaaggggaatatcacactctggggactgtggtggggaggggggaggggggagggatagcattgggagatatacctaatgctagatgacgagttagtgggtgcagcgcaccagcatggcacatgtatacatatgtaactaacctgcacaatgtgcacatgtaccctaaaacttaaagtataatttaaaaaaaataataattaaaaaaaaaaagaaattcagtaaatggtgttggagaaactggacattcacctgcaaaagaatgaaattgtatccttattttatatcatacatgaaaatcaattaaaaattgagtaaaaacttaaacataagtcctgaaaccatgaaactcctagaagaaaacatagaagaaaatctcctcaatattggtcttagaaatgattttattttaatttgacaccaaaagcacagacaccaaaagcaaaatgtgggaatatattaatcaaaaaagtttctgcatagcaaagaaacaatcatcacaatatataagaaacttatacaagtaaatagcaaaattaaacaaaaaacctgattaaaaatgggcaaagaacacgaataggcatttttccaaagatggcatataaaaagccaatagtatatgaaaagatgttcaacatcactaatatcagggaaatgcaagttaaaaccacaatgaaatatcaccttacaactattaggatgttttttatcaaaatatcaaaagataacaagtgatgtggagcaaagggaacccttgtacacttgtggtgggagtgtaaatatgcagccactatggaaaacaatgtggtggctcctaaaagtttaaatatgctccatatagatccagcagttttattcctgggtgcatatccaaaggaaataaaatcactatcttgagatagctggtgcttctgtgttcattgcaacattattcacaatagccaagatacggaaacaacctaagtgtctgagaaatcaatggataaagaaaatgtattatatatacagtagaatatgattcaaccttagaaaaaggaaatcttgtctgggtgcagtggctcacgcctgtaatcccagcactttggggggccaaggtgggcagatcacgaggtcaggagatggagaccatcctggctaacacggtgaaatcccgtctctactaaaaatacaaaaacagaataagctgggcgtggtggcagatgcctgtagtcccagctacttgggaggctgaggtgggagaatggcgtgaacctggggggcggagcttgcagtgagccgagatcgcgccactgcactctccagcctgagcaacagagcgagactccatcacaaaaaaaaaaaaaaaaaaggaaatcctgccttttaccgcaacatgaattaacttggaaaacattatgctaagtgagataagccagacataggaagacaaatgatgcatgatctcacttacatgtggaatctataaaagagccagactcatagtaacagagagtagagtggtggttactagtggctgggggttgggagaaagtggaaatatgagtcaaagcataaaaacttttcactattggatgaataagttcaggatacttcatttacaacatagtaactctagttaatgcaaagcatatttgaaatatgctcctagagaactcaagtgttctcactgcataaacacacagacagttaatgtttgaggtaatggacatataattaagtagattgtggtaattatttcaaaatgtatacctatatgaaaacattatattgtataccttaaatacaattacatttgtcaatcgtatcagtaaattggggaaatacatacacacacatgcacataactattaaaactcaacagtaagggccaggcacagtggctcatgcctgtaatctcagcactttgggaggctgaggtgggtggatcacctgagatcaggagttcaagaccagcctggcctacatggtgaaaccccatctctactaaaaatacaaaattagccgggcatggtgacacatgcctgcaatcccagctactcaggaagcagaggcagaattgcttgaaactgggaggcggaggttgtagtgagctgagatcacgccattgcactccagcctgggaaacaacagcgaaactccatctcaaaaacacaaaacagagaaaactcaacattaagaaatttatatttaaagccattttttaaaaatgacaaagagcctgaacagacatctcatgaaagaataggccagacacaatggctcacgcctgtaattccagcactttgggaggctgaggtgggcagatcacctgaggtcagaagttcgagaccagcctggccaacatggcgaaaccctgtctctactaaaaatacaaaaattagccgggcctggtggtgcacaagggtagtcccagctactcgggagcctgaggcaggagaatcacttgaacctgggaaatggcggttgcagtgagccaaggtcatgccattgcactccacctgggtgacaaggtgagactgtgtctcaaaaaacaaaaataaataaaataataaaataataacatatacagatgtccagtaagcatataaaatatgttaaacctcgtatgtctttagggaattacaaataaaaaaaatgatacgctgctatacacctattaaaatgggcaaaatctaaaacactgagaacaccaaatgcccacaaggatgtgaaacaacaggaactctgattcactgctggtcagaatgcaaaatgatacagtcactttgggagacagtttggcaatttcttacaaaacaaatatactcaatatacaatccagcaatcacataccttgatatttacccaaaggagttgaaaacatgtttacacaaaattctgcacatggatgtttatagaagttttatttataattgtcgaaacttggaagcaactgagatttactgagatcagtaggtgactggaaactatggtgcacccagacaaagggacattattcaacacttagaaaaaaagctatcaagccatgaaaaggcatgcaggaagctgagatgtatatcactaagtgaaagaagccaatctgaacaggctagatgctgtatgatttcaactataggcatacctcagatactgtggatttgattccagacaactgcaataaaccaaatatcacaataaagcaagtgaatgaatttttgctttctcagtgcatataaaagttatgtttatactatactacagtctattaagtgtgtaatagcattatgtctagaaaaacaatgtgtgtgtgtgtgtgtgtgtattttattgaaatggagtctcactctgtcgcccaggctggagtgcagtgctgtgatcttggctcatttcaacctccacctcctgagttcaagcaattctcccacctcagcctcccgagtagctgggattacaggcgcatgccaccacaccaggctagtttttgtatttttagtaaagatggggtttcaccatgttgcccaggctggtctcaaactcctgacctcaagtgatctgccctcctcagccttccaaagtgctggcattacaggcgtgagccactgcacctggccaccaatgtacatattttaatcaaaaatattttatggctgggcagggtggctcatgcctgtaatcccaacacttttggaggccgaggcaggcggatcatgaggtcaggagatctagaccatcttggccaacatggtgaaaccccgtctctattaaaatgcaaaaaattagcggggtatggtggcgtgcacctgtagtcccagctactcgggaggctgaggtaggggaatcacttgaacctgggaggtggaggttgcagtgagccaagatcatgccattgcactccagcctggcgacagagcaagactccatccaaaaaaaaaaaatatatatatatatatatatataatataactaaaaaatgtgaattattatctgagccttcagtgaattataatctttttgctggtggagggtcttgccttgatatttgctgaagattaaggtggctctggcaatttcttaaaataaaataacaataaagtttcctacatgaattgactcttcctttcatgaaaaatttctctgtagcatgcaatactgttttgatatcattttacacatggtagggcttctttgaaaattggagttcattctctcacatcctgccattactttatctactaagtttatttaatattctaaattctttgctgtcatttcaacaatgtttacaccacattcaccggaatatattccatttcaggaaaccacattctttgcttatccataagaagcaactcctcattggttcaagtgtgatcatgagattacagcaattcactcacatcttcaagctccacttctaattcttttgttatggtcaccacatgtacagttactttctccacttaagtctcaaacccctcaaagtcatccatgagtattggaattaagttcttccaacttcctatgaatgttggtattttcatctcctcccatgaattatgaatgttcttaatggcttctagaatggtgaatcccttccaaaaggttttcaatttattttgcccccagatctttcagaggaatcactatctatggaagctgtagccttacaaagtgtatttcttaaataatactacttaaaaattaaaattactccttgatccatggagtacagaatagatgttgtgttagcaggcatgaaaacaacatccatttccttgtacatctccatcagagttcatggatgactaggtacattatcagtgagcagtaatattttgaaaggaatctttttatctgagcaataggtctcaataatgggcttaaaatatccaataagccatgctgtaaacagatgtgctatcattcagacttcattgctgcatgtatagagcacaaggagaatagatttaggataattcttatggactccaggattttcagaaagataaaagagcattgacttcaactgaaagtcaccaattgcattagcccccaacaagaaagtcagcttgtccctcaaagctctgaagccagcattggctacttctctctagctttgaaattctaatggaatcgtcttttgattggatgttgtttcctctacattgaacatctgctgtttactgtagccaccttcatcaatgatcttagctagattttctgtataacctgatgcagtgtctgtatcagcacttgctgcttcactttgcacttacccgttatagagaaggcttttttcctcatgaaccaaattctgctagcttgaaacttttcttccacagcgtcttcacctcttggccttcatagagttgaggaaaattacggccttgctctgggttatgttttggcttaaggaaatgttgtagctggtttgatcttctagccagaccactaaaactttctccatatcagcaataaacctgtttgactttcttattcttgtgtgcagtggagtaacacttttaattttcttcaacaactttttctttgcagtcacagcttgactgtttgacacaagaggcccagcttttgccctgtcttgccttttgacatgccttcctcaccaagtttaatcatttgtagctttttatttaatgcagctccccctttcacttgaacacttagaagacattgtagagttattcattggcctaatttcaatatcatttatctcaggcaagagggaggcctgaggggtgggaggaaagaaaaggagggagaaagggatagggaatagctggttgttggagcagtcaaaacatacataatatttattgattaaatttgccatcttacatgggcatggttcagggcaccccaaaatgattataatagaaacatcaaagatcactgatcacggatctccataacagatacgataataatggaaaagtttgaaatattgcaagaacgaccaaaatgtggcacagagacatgaagtgagcacatgctgttggaaaaatggcaccaatagacttgctccctgcaggatgccacaaaattccaatttgtaaaaaatgtaatgtttgcaaagtaaaataaagtgcaataaaacaaggtatgcctatatatgacattctagaaagggcaaaactatggagagggtaaatggatcagtggttagtatgggttaggggaataggaagaatcaataggaagaggaccaagcatttttgaccgagtgaaactattctctatgatgtcaagtggtggatacatgtcattatgcatttgtcagaacccatggaatgtataacaccaagaatgtaccctaatgtaaactgtggactttgggtaatcattatccttcgttataggttctttgattgtaacaaatgtaacactctgaaggaggatattgataatggggaaagctatgcatgtgtagggatgggctatatgagaactacttattttccactctgttttgctgtggacctgaaactgctctaaaaatcaaggttattaatttaaaaaaagtagagggcatagaaccgagtcaccaccctagtgtcccttctttccacacggctgattttatcttctaacagcaggggctattgtagccaaaagtccttgccaaaccatatgagcttctcaatttttatttcatggaagtccactgggtaacacaagaaaagcaagcctccatcaggctagcaagtagtcaaaagcaaatagtgcctactgtgcccagggcgctgttctgagtgctaggaagacatctgtgaacaaaacagacatcagccctgttcccatggagaaagacacaataaaaataagtaaaaatctatcagatggggataaatattgtgaacagaaaataaaagcacctaggaagggcagagtgtgctgaggggtgggtgagggaggctgtcacttcatacaacatgagcattgttcagaaagcaataagacagttgtctattaggtatctggaaaaaaacctttccaagtgaagggacaagactggaatgtgagtggagttgggaggaggcagagaaaagagagggattgggtatcaggcagctcacaattatattgcaatcctattaggtgacaattggaatgcaaattatacatgaaattctgtggagtactgagagatttatttgttgtagaaaccagggcactgaccgcctactagatagtgatgttattgggggtctcagttaccccaaagggggctttttcctgtttggtgttgcaaaagccaatacacaaaactgaaagtgagtgtcaagcagtactgtctttattcaatcatcatggaattggagaagtgggaacatagctcataaattaatttcccagctcctgagaaccaggcagttacaaatacagggtatctttaacatagggggttgggttgaagagcaaggggaggaatatttatgcttttcttttgaagggagtgagactttcctggaatcaaggagctgcctcttttctattttttcttggtctgctccagtcattgtcatggtgactgtcaactgtcatgatactggtgggagtgtcattcagcatggaaattggattataatgaagctagaagttcttcagaggttgagtaagctgcagttttggattttgctaacttcagctggtttatttctaagaaggaactcctgaccacagacatcctgtttgctaaaaataagcagagttaaagctgaataggaatctagttttgacgtattggcattgcactgggcaacataagtgggctaggagtccaactaatacatgtaggcactgcagtgggtaacagtgagtgactaattccagttgtgttttgcttcaagaacttgctttttctattagactgagatatcttgctaatcttaatgaggcatcatcaagtcattaactggttgagcccaatcactttgtccatattttcagccttcacaggagtcaggctggatcagataaaggatataccttcttttcctcatagatccttgtgagagtttctgcttatactttttttttttttatttaatcaattttccctggcaggtctgccttttaataggtataaagaaaagccaggctttggtctacaccatatacaacctcaaagagttttagttaatgtttcttttaccaaaaaatgctcaactaggttttctgaatacatctccttaactgcagatttctcccggtggcttttgacagaggcatggcagtatggagttaaggatgctggccagtgcgcactcagcacctcccaagatcttttttttttttttttttttgagaccgagtctcgctctatcgcccaggctggagtgcagtggcgcaatctcggctcactgcaaagctccgcctcctgggttcacgccattctcctgcctcagcctcccgagtagctgggactacaggcgcccaccaccatgcccggctaattttttgtatttttagtagagacggggtttcaccgtgttagccaggatgatctcgatctcctgacctcgtgatctgcccgcctcggcctcccaaagttctgggattacaggcgtgagccactgcgcccggcgcacctcccaagttctgtagtcttaagcaggctagttacactttttagtcttccttatttgtaacatgtgatattaatatcagtgtccatctcataggattctacatgtgaagagctcagataacattgtatgtactcaaagagcattcgttgttatgatgttgtctgttaggatttttttttttttttagacgcagtctcgctcctgttgcccaggctagagtgcaatggcgcgatctcagctgactgcaacctccgccttccgagttcaagcgattctcctgcctcagcctcctgagtagctgggattacaggcatgagccaccacatccggctgattttgtatttttagtagagatggggcttctatatgttggtcaggttggtctcaaactcccgacctcagttgatccacccacctcggcctcccaaagttctgggattacagacatgagccatcacacccggcttctgttaggatttttaagcataatggtctattcagaaatggaattgtgacataattattatagaagcagagtgtggaatctttattgcttatattccagttcttaccattaactctgtgatccaagtaccacctaaaactactagcacatatccttcaagatatgatagactaaattatgctacatttttaaaatgttgtaattgctttatgaatatcttttcttctaagcaacctaactcaaaattattttcagtggttggggttttcattgagggttcacgttgtaggttttagtaagtattgagcaaagaacaccaaaaacaatcaagaaaaaaatgttagaaaatgagtaacaaaagctatcatttatagtttgcttctgtgccaatcattgtgcttatgggttaatttagattacaatgattctgtgtttatttagcatcccatttgatggcataagattatagtgaaggaaatccagtcacacactgcatttctgcaactcttatggaaactagctgtatcctatactgatccttttttcaagcgtgataggagattttgccacctcaaaaagataataacctcttggaaggcgggtgggatgcctcagatggtggtttctgaactccacagagcgacttatttcagctctgtgtatacagtaaatacttaaatagagacatactttcaaatgttctaaaagctactaagatatatttgtaaaaacgtagtgtaaggattaaagatcaaaagcagaagaaagtaagccttgatttaatcacttgcagatttattttcatggaatgcttattttgttaagcttttagcttcttctggcacagtataggtgttgacagaagctctctttttcatttatagataagtcaacctgtaaacaaagcctgaaaataaaaatgcttgctttgaaatgattttttaaaaatggtacaagtgaagaattcaaggctgcatatgtcgcatcttaattatgactatttaagatacacattttaagatcctttcctttttttgttttttgtttttctattacaacagtagtcactttatggttagtccaggctggcatttctgtttgcaattttcatttaagataattttatagttcctctttcttacgaaattaagatccatacctttctttttttttctttgtctttgatcttatgcttccccaagtgtgttgctcagaacactaatctcattagatatccctcaagaatggatcctatcatcaaatatgtttggaaaatgtcgcatgaaatatgcttttaagaggttcaatgtatattagaataatatagtttgtgaaaagttatgaagtaaaggaacattaaatgttgcctaatcacatatttctcaatattttttgttcttggaaaatgtcctctcccatacctagggatgatagttaaaatatttaaccagcatatcggctcacaagccagtctgctgcctaacctctttgttgggcaaaaagcatcctctgctcttttagagctcatgtccataggagactacagctcccataaatgtgcgactagaactggaagcatctcttagctgtgaatcaggacttacagaggggcactagaaattgccttccatgaccgggcgtggtggctcatgcctgtaatcccagtactttgggaggccgaggtgggtgaatcacaaggtcaggagatcgagaccatcctggctaacacggtgaaaccccatctctactaaaaatacaaaacattagctgggcatggtggcgggcgcctgtagtcccagctactcgggatgctgaggcaggagaatggcgtgaacccaggaggcggagcttgcagtgagccgagattgcgccactgcactccagcctgggtgacagagcgagactccgtctcaaaataataataataataataataataacaaaagaaagaaattgccttccatgatgcagtgccaacccaaggtcactgtgtcccccactggggagcagcctgattggcaaaggcatcgacagatcagcacaggtgtgttggtcttggtgctggagcaagttttttgaggatctctgctgtgccaggcctcaatcttttgattgctagactgtgaggaaacttgagaggcccctgagtgagagaccataggtgataagcctcgcaggaacaactactcagagaacttggtgcagtaactatttatcaactggtttgaaagtatttactatttttacttctgtaccaccataccaatgtacgccggctgattgttggttctaccgatgaaacttgtcaacactctatctaattccagttctttgggacacgcttggacaaccgctgatctgtaccacttggatgtgtgaaaatgcatcattttctctctatcaattgcttattacaaagccatgatgtttaaataggcaattctgctctagtggagaattatcaaaatttgggttaacttttgagctttgtaaaatcaagaaacaagtgatggcaccaaaaaataatgatagataccttgagggatctggattggtggatgaattatgttacaataagataaaaatgtccaataatatagtgtaagctttctgaaaaaaatgttgctaatgtaaatctgactaagtcactctattgtcatcttgtcacattgggattagagtttaatactcacccactcacccacccacacaaacacacacacacatgcaaataaggatgattgtatgtagcatccttataatataatcctcatttgcctttctatggcttgttttttaaatgtgaaaatcttcatcgagtagctcagggatcaagttaatagaaattataagaaactcttcacactctctatagactagttcctacttttttagtctcttttttcattattccactaggaaaattgaaccattttcttgtctctcatgtagtcttaccgatttccacctatcatcaggctaaatttattaatatagcagtatttacatgtttcattcttctcccaccatccccgcccccaggtagattttgcatctggtttttttgttctggaacttgtgagtattgttcagaataatgaatagaaaaaactgtacaataaaaggagatagaataaggctagcaagatgcgggagacacacaagaaagagaatgttgactcaggaggttaagataagaatggaaaaaaagacaaaacaccaagagtggactaggggccgggtgccttggctcacacctgtaatcccagaacttcgagagtttgaggcgggtggatcacctaaggtcaggagttcaaggccagcctgaccaacatggtgaaaccccatttctactaaaaatacaaaaattagctggatgtggtgatgtgtgcctgtaatcccagctactcgggaggctgaggcaggagaatcgatcgaacccagaaggcggaagttgcggtgagcagagatcacccaactgcactccagcctgggtgacagagtgagactccgtctcaaaaaagaaaaaaaaaaaaaaaaaagcgaaaacaaagtggactgggctaggaaagaattcttcgatatttcttagagaataccagggaattccctcaaacaagctatgaattttggagaaaaagatagatttggaaggaagatgttaagaagttttgttgtgattcattaataagatatcctgtgaaatagctctggaatgctcctcaaatattcttgactatcaagctaatgtgtgtttgattatagtagtgcagagactggtcctgaaataagccaggtatatatttttgttacaaaggtaacatctagtctgtgatgctctttctaattttgttttctaaacttacccattttcaaggttcatagttctttcaagaagttttgcgtagtactttgttcctcagcgattaggaatggcatctaaatcctctgaagtgttgaccgttttctgtttgccatctatgtataaattttaggaagaaatatcttgaatttccagccagaataaatccttaattcctagctccaggatcacttttatgcagctttcttgctccagtgtttggtccactgtgtatactgaatggatggtagtgaggttgttaacatgcaattctgcttagtcgttatggcctataggaatttgtaacttttaccagtttcagaaattaattaagatgattacaatttttgtgtttttcgaattaaatcaactttaatttctaagcattgttaactcatatctctatctttgcacttaacatattctaaatatttgtttatatttctttctttcaaataaaattgtgacatacttgagagtagaggctgtgtgctatgtccttacacttagcaacactgtctggtaagtcttaggagtgctacaaatgtgaatgaatgaatgaatgaattttacaaacaatctcctaagaaaagaaagctgagaggaaattttatatcattttatgtctatgtcctttttatttatttatttattttttttgagatggagtcttgctctggacaagactccgcccaggctggagtgcagtggcacgatcttggctcactgcaacctccacctcccgggtttaatcagttctcctgccttggcctcccgagtagctgggattatagacgactgccaccatgcttggctaatttttgtatttttagtagagacagggtttcactatgttggccaggctggtctcaaactcctgacctcgtgacctgcctgcctcagcctcccaaagtgctgagattacaggtgtgagccagtgtgcctggcctttttttgttttgttttgaaacagagtcttgctctgtggtccaggctggagtgcagtggtgtgatctcggctcactacagtctctgcctcctggtttcaagtgattcttgtgcctcagcctcccaagtagctcggactacaggcatgtgccatcaggccaggctaatttttgcatttttgatagagaaggagtgtcgcaacgttggccaggcttgtctcgaattcctgacctcaagtgattcacccgtcttggtttcctaaagtgctggtattacaggcgtgagccactgtgcccagccctatattctttaaatttttttaaaaaaaaaaaaaaggaaaaaaaaaaaaagctgaggtataatgaaagcaacatggggcctaggcgaaaatacctgaattcaatttctagctgtccatttatcaggaaattttttaaatttctttgaataagtcactgaagttcagccattttcatcaaagacagataataatccctattgtacatagttgtcatgatgatataataagattaaaattctgaaatagagtagaccttcatagagaaggtaattaaaagcaatttatttaatccgagtgaataatttattgaccaatggctaaagctgagaggctctataggaaaaaacagtgtcagtgtcgagaagtcatgtcctcctgactcaggattgcttaacactggaaaaggctatggagtatgaaattcatgaaatctcactgattattgagacattttcttgctcttaaataataagaaaagactgactgacctttgaagggactgacccaccatatattccctgactcatgaaagaaaacacaatttgttgataaatcaggagaacctgcttttctactgggccaaacataaagtaaaagtttggaaatgtcatatctgactaaaaactctttaattctttggtcaaatcaagggacaccctcatctcttaatctttttaaattaaccacattctttatgcaatgtgcgtacattaaggagcagtagagagatggagttttaatttttaccaattcaatctaaatgcaaattttaaccactcacatgatgctactgtgtacataattaagcatcattatatactacatgaatcattgagaaacctcctgagagccattctactgtgtaaagcatgcattatactgacaagcagccaaatgacatatacttctgtcctcattaatgctctttttggattataggtcaaccgattatggaacaacctatgagaagctgaatgataaagttggtttgaaaaccattttgagctatctctatgtgtgtcctaccaacaagcgtaaggtaagaaatgtatattcagcatgctactcattcatgatgtgacttctgtcttggttggctaaccactctagctacctaaaaatccattacagttaatctgggattagaaatgtaaagatgggttgatggatgttaagattgtaaaatgtctgacacatcataattttcagatcagcagctgtgaatgtaagagggtgagggataggtagatcattaccatttccaaaaggcagctacaaagaatgagtcttgttgggtggatgctgctgactctctagtaagagttctgaccagtcaatcagaagagtcagaatgagtcttgacaagacagcagaaaagatggattttcatctgatgtcccagtttttccttgacatggaacaaatagattaactagaatttaagtgaatgcattgtcctgcagcagataggaagtttcatttttaaagtttgttcagtctgcacacaaatgtcaggatgaatgcagtgcatttagcagaatagagtagcttggaaagagtgataagattagtcccttctgagcatggatcttagcttcaagaagccttggagatcatcatctacaacaccgttattttacagataagaaaactgagattcagaggaaagaaatagtttgtgcccattgcagagttatggccataattaggactagagttaaggcgtcttggttagcagtcatactttttccactatgtcatacatctcctattatgagagcttatctactcctcaggtatgtcattttttaggaagaaaatattgtttttaaatgaggaagacatttatttgtccctgaaggggagtggtactacatctatacctttattttcataaacttgcattatcaaattccaaattctgacatacgattgttaagtagtacataggttacatgaactaatagtattaatcaggaaatagaaacgtgtcattcattaacataccctaaaccataatgtgttatgaaggtagcactgatgtctatgttctcatctcagatttttcattagctactgttagtgaccttgggtagggtctgcattttgccatctggaatatggaaggtgatgaaaatatctcttaagcaatcactctcaattctggctgcttgtcaaaagtggtccccaaacgtgcaagctctagccccaccactgttgctctggattagggctcaggtaactatatcttactaaagctccccagatgcttctgataggtatctaggattaagaaccactaatataaagtgtaatgttcattctggctgtaagcatttcaagttcttcagtagaaacagcataacttttcagttgagcatagactctggagtaagaagaagagagaaaacccagctaaacctattaccaagtatataagcatggtgatttacttaatctctccaagcacagtgggattcggtttaaaagggggacagttacagtacctacctacctcgtgtgggaagttgtaaggattatatgaaattaggcatttcaggtgcttagcacagaatagtaaaagcttaattaatgttttctcttcattcttttttcttgctgaagtgtccagcagaacttgatgatagaaattttcttctaagctcttctgtactttagacattaacaatttatggcttttgaatgtttgaaatatggctagtgttactgagtaattggattttaaatttcatttaattttaattaatttaaattgatatagctgtgggtggctgatggccacagtaccacacaaccaatactgtcaacctcacaaatttagaactacacccaaacattcctatcttcccttaattggctggctacttcatcaacaattacacctaaacaattttgatctgctgtatgcagtcccaaattaaggaactgaacttatatcttttatttttatgatgaaatttagttgtttgttggctttgtatcgatttttacaatctctcttaatttttcttctagttcacatttttagcaaatttaatttaacagtcaacaaactgtatgctaggcaatgtgctatgcactgtaggatgtaaagagaaataagccagcaactcatcctcagaggtcctatattctagtactaaatgtggcatgacgttttgtaattgaaagatccctgaactaagattcagaaatctaagtccctgccttgaatctacttccacctaacaggtgactctgggtgaatcatttacattttctccatttgtaaactaatataggaaaatggaagacatttatgcctggaagagacctcagagtaatcaatgatagtctctgtttcactgatgctgttagagagaaacatgaaaaaaaaaaaaaaaaagatgccaaatatcaaatctgactataggcttttctgtagctgcagaatatatggtgatgatccagaaactccaggattgtttcaggagcaggacttaaggagtgagatgctcaagtccagatatagctgctaagactggaagggaagcagagaggtaataatacagcaaagagcctaaccatcaaatccactcaagtcaatataccatgaatcaggctgcataattagtccatagttatctgaaggacgtttaaaagggcatttagccatgggcattttactgttcttaagacttgacacaccctagttctacaaaaagagaagtccctgtgcatgactatgagggaatggctttctctgggactgttacccttcagagcagaggtggtcctgagctgtttaaatcacaatgttatgagtgaacctaaaggaagggatcttttcctctatagataaatgaggccttcatggtcactttctgagatgctgatagatttaagaaatattggaggacgatgaacgtcttaacaatggtacacaaatcaataaagttgacatcgcagtatatttgtgcatagtttttctacttataaggtgaatttatcaccatgaaatatgtactccgcccacccaaaggacatatttgaatcaaagagatagtacttgcacaacattttaaagtgtgaatatattttctccaatcaatgagaatttatgttaaaacaaaaagaaagaaatttcaggctctgttaattatgcagaacaaaggcagtgctcacatttgctccaattcttctaggacttaagctatcctccagtgaaaagggcagactcctttaaaaagttgtattaattctctcaggtctccgcggtgctatctagcaagtcaaaatcttttgtaccagatacttctctctgcttttcacgctagtgggagcaactggaataaaactgacaacatcagggtaactctcagcattcccggaaacctgttttgccttcacattcttatagctatttttagccatttgtgcggacaagagcagttcttcaatcatcatgttggaaacagcaggcttcatgccttgcctttgcaggcagcttgttaggggtactaccggggatcagagtccagaataaagcaggatcttatttacagtttaaattaatgatcatccatcgactgtttccctgcaagcctgctgtaaattacagcagctttccttggctaggtctgttacagtaaaaactgtaatctcaacatatgtcagtgtaagaaatcttgactaagagatagaaagaggggtcctaggtattagcctagattgttctttcaaaggaaacctgcatctggccgctgatatatgaggttagcccagaagaaaaggctgagtggtcccagtgccagaggagaggcaggctggctatctgtcacgatgtctcagagggagagcagttccccccaccccagttcatgataaatcccaaggcttgtttgtgtcagcagaggtttattggtcacataaagtctgctgtaagaaaagatgatttaacctgtaccggaaaggaacagctgggatgcagaaggtgatgggaagaactaatacaaatgtagcaaagaaaaaaaaaaaacttggctgggcgcagtggctcacgcctgtaatcccagcactatgggaggccgaggcgggtggatcacgaggtcaggagattgagaccatcctggctaacatggtgaaaccccgtctctactaaaaatacaaaataattagccaggcgtggtggcgggtgcctgtagtcccagctactcaggaggctgaggcaggagaatggcgtgaacctgggagacggacgttacagtgagctgagatcgcgccactgcactccagcctgggtgacagagcgagactcagtctcaaaaaaaaaaaaaaaaaaaagttgaaatctcaatttcactctcaaattctctgagttgatgtgtattctgcctaaaaagaaaacttctatatactctgtgtgtctttatcagccatacctttcccatcacccccaactaacccaagctgttctcccttcacaaggatcgtgtaacatcttcaaggattaaagaatataaaacccctagtggaattcactggggaataaaaggaaaaaaaagtgttttgttttggttttttacttggaaaagccaattcttttagttgttttatccttgtggtctcagcacactatctagcaaagaaaaaactagacagtatttgttctttatgttttctgcacccccttcacactccagttttttctcatttctgtgttatcaccacttaatttacatcattcctgctgagagactcttctaagactttcattctataaagaggaccctagctcctcagaatacattggtcattcctacgggtctcttggtacataccagcattaaacactgtgttttctccagatgtttaagttttaattaccctattatatgtggcactttctaaataagggtttgattattgacttcttgtctctttatatctgagcatgcttaattcctcttgtcatttggttgagtagtttgtgtatcatgtatgtgactttttttttttttttttgagatgaagtctcactctattgcccaggctggagtgcagtggcacaatctcggctcactgcaacctccgcctcccgggttcaaaaaattctctgcctcagcctcccgagcagctgggattacaggcgtctactaccacacccagctaattttcatatttttagtagaggtggggttttaccatcttggccaggctggtcttgaactcctgacctcatgatccacccgcctcggcctcccaaagtgctgggattacaggtgtgggccaccacacccagccttttttttttttttttgagatagagtcttgctctgttgcctaggctggagtacagtggcacaaccgcaacctccgcctcctgagttgaagcaatccttctgcctcagcctcctgagtagctgggactaaaggcatgcaccaccacacccaactaatttttgtacttttggtagagatgggatttcaccatgttagccaggctggtttcgaactcctgaccccaggtgatccacccgcctcggcctcccaaagtgctgggattacaagcatgagccaccacgccaggcccatgtatgtgacttttgaggacagcaaagaggaatggttgataggatctgccaccttctcttaggaagaatcacgtatcattgaatctgaatctaaaagattttggggatattaaaattctactcttttctttaacagatatggagactgagtcccagagagtttagtgacttgtctgaagttacatgcagctggggaatgataagctaagatcattagaccttgaaagtgaaccttaaatgccacctcttccataaaatttaatcaatttccctgaggagacttgctcactccctcttatctccaagacatccgttttcttttttctagcactttactctcacttctgattatagttgttcttgaccatgtctaatactccctttagaatgcgaggacctagatggcataaagtgccttaatcagttatgtattctttaacgtgccgagcataggattttggtatacagtaggtgtccaatacatgactgaatatttgaattgaactttggttcgcttttggactcctaggctgaaacttaaatgaaatgctctgtgaaatcagctttgactcctttcttttctctaactataaatttaattatttcaagtgagtaaacaagaacagtaaagaatctctgtaggttttagtcatttctaggtcataatgtataattttgtctgttctaaccaagaagaacatgattaatattttaaatgccaggactttgcatagcactcacttgacattatctagggaggccaagaggagctagcgtattgtataatacatcaaagggggtgcatgacattcccttggcggacaagcaacacttgctcattccaccttaactctttcatctgtcactttgtacacaagatcatccatttgcctctaatctttttaacaaggatgtatgtttcattcataaagaaatggtccaggtgcggtggcttacacctgtaatcccaccactttgagaggccgaggtgggtggatcacctgaggtcgggagtttgagaccagcctggccaatatgctgaaaccctgtctctactaaaaatacaaaaaaattagccgggtgcggtggcaggtgcctgtaatcccagctacttgggagactgaggcgggagaatcacttgaacctgggaggtggaggttgtggtgagccgagatcataccactgcactccagcctgggcacaacagagcaatattcaaaaaaaaaaaaaaaaaaaaccacacatgaattcagagacatagtggaagtggcattttccaaacttcaataaaagtgacgtgtagtaagtaaatccttacttccctacacttaacctgaggaatgatggccaaagggaaaggtcctctcctttgatctttttttgggtaccgctgagtgtttatactgtttcagtccatgaagcattgttctgttttcttcctgaacattaaaaatataaaatccaagaaagcatgctgcatctctctttttacttggagtgattttccaacagtaatcccctgggtttcaaatgagctacagaataataagtgcagaatgctctctttgaaacagggttggagtgccaggagcagtgcccactccacaaccccttgtcactccaagaagtccctgcggaagcctctggaactcgtgggctctttggaacatagagaaaaacaacactgatctaagacactcctctctgtacactgacctatacccgaaattgccatatattctatattagtttatataaatcaaagcacctattataacattcataaatttaaaaatgctaataaaactacactcttaaattttaatacaatatgttacattacacactaagtacctagttgatttttctgggatattatctgtgtctatctaacactgatgtagtaaaaaataaattaattaatgataaatcaggttcaggcagtaaattctgatcaatgcatacattccaaaacttactttttccttcctcctatcttttcttgtcccccatatctgctaatttgcctggttctcagaggtggtttactgctttacttcatgtggcattaagtacttttttttttttttatttttttgagatggagtcttgctctgtcacccaggctggagtgcagtggcacgatctcggctcactgcaagctctgcctcccagggtcacgccattctcctgcctgagactcccgagtagctgggactacaggcgcccaccaacacgcctggctaatttttttgtatttttagtagagacatggtttcacagtcttagccaggatggtcttgatctcctgacctcgggatccgcccgcctcggcctcccaaagtgctgggattacaggcatgagccaccatgccctgcctagtacaaagtatttttttgatagaaagaagcttcctgcttaattaacatatttgttattcttcatttgtaagtgttatgtctatcacatataagaagcatctaatgcattacatattaatcatgaattggtgactttaaaaactaagttatatctgtatgatgatcaagtttatatgttattgacattataattcaaaattgtattagctacatttatgtatttttaaaagatacaggtatttagctagctcaataaataggtagaaaggtaatagataggtccacctataaatctcttctaagtttagataatgcttttttcattaaaaaatagactctatcttttggtttgatacctttttaacaaatgaaattaatcaaggtaatgatagcctaaattactctctaaatattatgaagattgatctggaaactgcatgttttttatatcactgagtggttcttggaaaataggttgcctctgtggccaagtgatcagaaattctcaaatacaaaaggaaaccttttggaagctgaccattcttcaagtaagcataatagactatctgcgcaatcttctttgagaacaatttgtttttaaagttatctgtctaattatttatttatttttgtctcatcatctgtccttattagagctcatgttctctgaggtctggctggccaaatattaagtgcccatccattacccttttatgaaggtcaaatgcattatttctggttggttccaagttatgctctgctgtggaaaatggtcagaggtcttttcaacattctggtctgtttgcttccagcacactccctgtggtttctcaggggtttccgtcatcttgtgtttgacatactgtatctagaacatttgtttctagtgaatagcctgtgctgctcttatataagatggatggagatgaatgctgtccgctacaggaaatttgcgatatttactagggtggagatgtttcactccaatgtatcagaactgccccaagctttctcctggtgctgtcatgaaaacaaagtcaatgtggatgaatctttaataaaaccactatttctcccctggagaaattaagagtgcaccaccagcctcaggggctaaattgtttccattcaaacatttcttttgctgacctgacctttcccttgaccagatcttcttttgatggttttgtccctttgttcctcaaagcatcacttccctactttactgggtccttgacctctaatgtgctcttgttttacaacctttcaagtcaagtacttaaattaggttttgcagaacaaaaactatagcttgtaggtaacaggtaggcttagatgctcataggtgaaaaggcctgctgtatgggatatatacaatataacagctgggagagaaaaatcttttcctggctgcttggggcagtatgtgtgtttggggagtagaatactaagtgttgccttgattgatggcatctggcaccaggaaatgaacatgcttatagtggagaaaatgacaatgtggatgtatccaaaaaacaaaagatatgtaaaaagaaaatatctggaatgcacagcctctcacagataagagaagaggcatagaaggaaggatacagaggtaaagccgagagagaagacgacagagattactgtgcagaatttaaagtaaccagagtaatgggagaatgctaatacaaagagcacaatgaagacagagggcagaagaaaaagaaataataaaattgtaaatattttcagcagtagaagtttaggaatctctggagatctctcagagagaggagagctaatttaccaggaacttattaagactttcagagggagtacaatttacccttatctttctgttcttcctgagtggtttcaaaggggtaaaagatattgatggctgtggttgaaatcggttttgccaggaaggaaagcacaattatgactcaagtgtgggggtgtggtaggcctagatctaggttctccagctcccctgcagcagattcaaatatcatcgctgctgcccacacttaatggatttttgtccttttaatgctctcttagctactccctcataccactgtgcaatgatctcttgtatttatatgtataccttgtattttctgcactcgtcacgtataccaactcagcacctatttcctgtcactgcggagatacactttgttatttgaaggtggtcattatgaatttttgctcaggggcatcattagttgtggaacagtatttaatataatggaccctggagccaggcgacctggccttaaattccagctaagctacataataattgtgtgcccttagacaacattttatttgttggtttatttgttgtaaacccctgcatgacacagtttcctcctctccaaactaaaatataatgattgtgtcaacatcctaaagtagttatgggaaataaagagtcaaaaccagcaaagaacagtgtctgagacctagcaagcattcaacaaatgttagtctcattgttactcttcttaactgttccaaattatatggccatgccttatgctgtcttttgtcaactcaaccagaaggtattaaatgcctattttgttccagatcttttttaagaactgggaaatagaaatataagaggttgttcttactcttaatgattgcacagtctggttgaggagatgaatgtataaacaatctcttacagcacagtacttatgtatcatgatagctatgtacatagaactctatctttggagactaggaaggtttcacagagatgcaaatatttgtcaaaggagaaggggaaaggaagatgaaaacagtctttcggtgtatgtactatgagaaactagtgtccacaagcgcacaatgcatatcttgacgtagttttcagatttaaatgattaagagtgtctatttagactcgtaaaacatgttaatttccactgctatcttactatgctaattaaaccctaaaaaattccagctggaggtggtggctcacacctgtaatcccgccgaggcaggcggatcaccaggtcaagagatcgagactatcctggccaacatggtgaaaccccgtttctattaaaaatacaaaaatttgctgggcctggtggtgcgtgcctgtagtccaagctactcgggaggctgaggcaggaggatcacttgaacctgggaggtggagtttgcagtgagccaagatctcgccactgcactccagcctggtgacagagcaagaatccatctaaaaaaaaaaaaaaaatcctcatgacccatttgaattacagtttttatgtaataatgtaatttattttcaggtgcaataaactttcttcctgtcttgcttgtaaaatcagtaaatgggcagtggtgacattattaatattgaattaatacaactaaaattcacattatagatttgatatattcagcatgtatcttaagtactactggccagtcagaactattgatgaaatttaggggtataatattaagaagagattaattgacatgttttattgaacacctggcttgtgccttgttctctgcaagcataaaggtgaatataaaagaaacatgaacctcgctttgctcttacggagtttaccatcccagctcaggaatgcaattaaataatataaggtagtagagtggattgtacagacaacaaaggctttaagagtttagagagggctgtaatctcacatagtcagggaagcagcataaaagggcttaagctgaccaatgaagcagatcagcataacacaaagtcatgacattcacaacagaaaaatatcatttagttgaaccaatatttattgactgccaggcagtagagatacaaacatgcataacacagggccctgtctgcagagagctcacagatggaagggagaactatgtagttggaaatgagcatcgagtttatactggtaaaggtactgtatctttcattctctagaatcttaataatgtgttattatgttacatattctactcttttgcctcttaaagctcataaaatgttcctttgatagatcgtttatgtaaattcttgatgtagagaatacagtctctctaaacttattggaccctgaggaggtggtctggatcacaggagtgggtgaatattgggaaagatgaggaaatgagaaaaatggagtaaaacatagcaataaaagaagcagccaagcatttgtggggaagcaggaggggcctggtgttccaatgattagtacttcatctttttctctactactttctaaaaagggcccaaattcccttgaacaagaataactacaactttaattgtggatgctatccccatcagcatccagatttcaccgggatggatgtagcttttcttaggagccaaacccatccaacttgactcaaataattaaagtgtttggattccaggctgtccaggaaaacagctgaacttgtgctggggaaagagaggttggatcttataggaaggcatgtatttgatattgaagtagtctgttttcttttgaatctctgtgatgtggtgtgtttgtgtgtgtccaccacttttgctttattagtgcattatttaacgaactgatttacgtattttctccactcactaatactgtctttgttccttgggcccaagccctttgtgcttccatttggaagtacattgctgacatttacagactcccacagaggactcagtcaattactaccatagatgcccattgttccaagagagctgacctttacccctaggcaccaattaaaatccattgtttcttacccctgcagcgccagtgcttgctgtaattctggctcgatgcccattgcaactggtgggatgcattcattttagtcttcgttttattattattatttttttcaaacaagaagagagggacctgcaaaagaaaatgtatgctttctttaaaagaaggggcagaccaccagaattaccaatcattttcaattaaatgaccttttgtgtcaacataaataatgaccctaaataaataaaataattaggaaaaaattgggaagttgcctgtaggattatcccagcttcaaaaaacagcagagctctctaattacttcctgatgatgatttgttgctaaattgcagggccgttctgccctaggcatagctgggtatgctctatggcaagctgacagagagaccaaagtcccagcatgtgggacatcaggcactgagccctctacctatcaaattatatgagttaccagcacactgctaggctggtggcctctcaggtaaacgtaagtttcttcctataatcaaatttaggtttagggcatttggagccagaactagtttgtctgaaatcacagatgttcattgtagcaagattggtacttctgactgaccagtagccttaaagatgtgctaatttagagaaataaaaatgaaaaggtattgaaaggtttataattccctttgtaacttttttcactcttctatttccactaccttctgttgtgctaagggtttgatgctgctgacattttaatgggattcgaacccaaattctaccaaccaaattattttggtagaaatggccataatacaaacacagtggcccaaaaagaattctgagtttactcagattgagacaagaagtcccgatttgctaaaaagtaaatagagcttgaaatttgcctttccccgtttgatttaaaattcaagatctaagcaagttaaagcttgacagaaagaactggcctcttcttgtagaagtagcctcttcctcccacttcctccttgcacttttagtgctaacaaccacatgcagaaaatgcaattaattatttgatctgcagaggaagtggtttctgcagttatatttcccttctcccctctatttactatttgaaattttatagacttgtgaagattatacttgtatgagggcttaaaaattcccgagagccatagcatctcacttatcctaccccacaggccttggtggtatagactgagagtataatatgatgagtaggaggccatctggctccctggagacccaagtcagcattctcttacccaggtaccagtggaaactgatcaagctcatttgataaagcccagaagattatcaaacccaaaccatttggcttcaattattataaatacaaagttttgcccatggttcattatgttcctcccatacatacctaacttgggggaattacaaagaacactgaaataaatatgtgggagagggccttgttgaaattggatactggatattatgtatctacaactgcttagtttgttgctattttattttcttccctctctccctccctttattccttccttttttctttccaaatatcatttattagaaggacagaggccgggttaggtggctcatgcctgtaaccctagcactttgggaggccaaggtgggtggatcacgaggtcaggagatcgagaccagcctgaccaacatggagaaaccccatctttactaaaaatagaaaaattagctgggtgtggtggcatgcacctgtatcccagctactcgggaggctgaggcaggagaagggcgtgaagccaggaggtggaggttgcagggagccgaagtcatgccactgcactccagcttaggcaacagagtgagactccgtctcaaaaactaaaaaataaataaaaggacagaatataagaccacctttttttttttttttttttttgagatggagtctcgctctgtcgcccaggctggagagcagtggcgcgatctgggctcactgcaagctccgcctcccaggtttacgtcattctcctgcctcagccttccaagtagctgggactacaggcgcccaccaccacgcctggctaatttttttgtatttttagtagagacgcggtttcaccacgttagccaggatggtctcgatctcctgacctcgtgatccacccgccttggcctcccaaagtgctgggattacaggtgtgagcgactgcgcccggccaagaccaccttgtatatttacaacatagtatattttcagaatgattacagaactgtgagtatgaatgtgtaatcatcttatccttataaaaataccatgaggtgggtaggagaggttaaggcattgctgctttatatgtgaagcctagttagtgactggttgcctttaactagaaccccgatctttgcatttctggtctatgttcttctatcatagtttactgttttccaaaccttgctccagttttcttgtctggaaggttagtttttactagtgttcttcaggctgatccctctgtagatcttcaataaatttcgcgttttaaatacgaattatataatctcagataaaatacaaagcacagagaaaatgtaaaggcaaaccatatgtcatatttttaagttgccttatgtaaaataattcagcttgtcatttctggataacagccttgacagatttacaggataagcttgatgctttcagaagtctgaaaaggattctacatcgaggatcccaagaaaaccttgttgtaagtccaggtctcagtactggtttctaggaaggactcagtaaatacttgccaataagtcaatgaataaatacatgcatggatgaatgaatataatagataaaaggaagttgatggattttctcgttggtatttcttttgtttttgttttgagacaatgtctcactctgtagcctcagctggagtgcagtggtgtgatcatagctcactgcagccttcaattcccgggctggagcaatcctcccaccccagcctccaatgtaagtagggatgacaggcacatgacaccgcccactgtcccctctgccagctaatttaaaaacattttttttgtaggtacatggtctccctatgttgcccaggctagtctcaaactcctgggcccaagtgatcctcctgcctcagcctctcaaagctttgggattgcaggcgtgagcccactctgcctggcccttggtatttctaagattagagttgccaacaataatcaagatagattttcaatggcagggagatgtcatgccatttctgtaacaagacaatatttcttgttctaactttaagatttcctggtggcctacagctgcctctctttactcacaacgtacattcgtttactctgggtttcttttctccattggagggaatgcatttcagaaatgcgcctgtcaggccgggcgcggtggttcatgtctgtaatcccagctctttgggaggccgaggtaggtaggatcacgaagtcagaagtttgagaacagcctggccaacatagtgaaaccccgtctctactaaaaatacaaaaaattagctgggcttgcgggtgggtgcctgtaatttcagctattcaggaggctgaggcaggagagtagcttgaacctgggaggcaggggttgcagtgagccaagatctcactattgcactccagcgagggcgacagtgcaagactccatctcaaaaaaaaaaaaaaaaaaaaaagaaaagagaagaaaaagaaacaaagaaatgcgcctgtcctactcacttatctgtggccagtgtcatgagggacaatacagttcgctgatgtttggtgcaaggatctgcttagataccattgccctaaatgatgattcttggagaagccacagctgagaaatggtcactacattattgcatgtgcgtgctgagcagaacttgttctttcccttgtacagcttttttcatgggctctgatcaaatcttgtggctctatcgttacctttaacctttgagatatactaccattaaatctgtaggtacttgctttttctgtaggaactactagtctttctcagctccctagaaaagagagatcctattcttccatgaaatttcctctgtagtataaatagctattaatatatacataatatacatacatgcatacatgtatgttgcatttactctattaaacactgaacacatggatcctagtgaataactctccccccactttttcagtgacagacactttttctatatcagatttataaaagaaactaatagaactaccacagggaaagatataaagacaaatattagaaagaaagctgtttacaactagacctaaattggaactagaaatctgcctttgccttttgagctaagtggtatttaaagtaacccacactcacacgttttaaagaagaaatagaacagcaatggctccagcttctcaaatcagtgattataataaactgtaagctctaagacatgcatatgtgaaatgtactgagaacattcccacgtatggtggtagtagattcagaaacaaaacaaaactccaggctgggtgcagtggctcacacctgtaatcccagcactttgggaggccgaggcgggcggatcatgaggtcaggagatcgagaccatcctggctaacacagtgaaaccacgtctctactaaaaatacaaaaaattagcaggatgcagtggcgggcgcctgtagtcccagctactcgggaggctgaggcaggagaatggcatgaacctgggaggcagagcttgcagtgagccaggatcgggccactgcactccagcctgggcgacagagctagactccatctcaaaacaaacaaacaaacaaacaaacaaactctgaaaccatcaaggtaagtatgataaactccattttcaagttgaggaaatgaagattcagtgagtggattgtccaggtcatgtagctggtaaccatgcaaggatgtggcaacctggagattttctcgagctttttggttaacattcacattctctacatagtaactaaagagtataatctccttagggccacaattatttccccaagggtgcctgggagttaatagcaactgctcaatgaagcaagcagtaacagtaatttctgtttcttagccatttatagcagagtactgctgcttgaatgttttgatatctttgcttttcccaatataaatgaaaatcctaaagatatgcccagttgcctttcaagggattagtgggatgaagtgcctaaattactactgaggttcttaaacgtccgcatatatgaaaatcatctagagagcttgttaaactgcagatctgggggcctatttctcagaaattctaggtcgttagttctgagaatctgcattttaacaagcatgtgccacttttccatctccctgcagttctgctgcacgtagaccaagtactacactttactaaacagaggtgagctgtgccaacaggaaggcattatttttcagtgaaactcttggttacattttctctttatgaaaaggctcttggtgttggtgatgcaaggataaatattgaagttatgtgtttgaaaccagcagtcctctactggacagtggaagttttgatttgaaaacttctggtggctcatgcctgtaatcccagcactttggaggccgaggtgggtggatcatgaggtcagaagatcaagaccagcctggccgagatggtgaaaccccgtctctactaaaaatacaaaaattagccggatgtggtggtaggcgcctgtaatcccagctacttgggaggctgaggcagagaattgcttgaacccaggaggcggaggttgcagtgagccaagaatgcaccgctgcactccagcctgggcgacagagtgagactccatctcaaaaaaaaaaaaaaagaaattataccctttttctccatttgtccctttgacataaaaactagcctcatgatttctctcctagaaagacagctgtattttgcatttggctgctggatgggtgaaggagagtacatagacatgctcagagcatctttgaaatttaaggaaatgggtagccacagcttttaggagtgcattaggagagcacagtgagcaggtagcactttcccctctgctcttccacttaggaattgaagtagggactggaattcataattcttagttacttcatggcatagaatgcttactagcagttgaacgttccagagccctgggaggccactattatggtgtattcaaagacatttgttaagcccagggaggggagcttcttggaattttgtttttcaaaagttccactccattattccagagttctaactttattccttagcacagcaagtgactctgtcttggtatgaaacacaggcatcccacataggcttattagatacaaagtgctattcaaagagcccttgaaagaagaacatttttttaaaaaattgcaggtatttttttaaaaaacaaatttgggaataaattctaacatatatcattgcctgcaagatgagtgaagagggggttatattgctttaaatttggactgatgtagctttaaggcagcttggactagtgggctactgcctgtcactgaacttaaacatttttttttttcctgagacggagtctcactgtgtcacccaggctggaatgcagtgacatgatctcagctcactgcaacctctgcctcccaggttcaagtgattctcctgcctcagcctcccaggtagttgggactacaggcgcgtgccacgacacttggctaatttttgtatttgtagtagagacgggcttttgccatgttggccaggctggtcttgaacccctgaccgcaggtgatccgcccgcctctgccttccgaaatgctgggattacaggcgtgggccactgcttttggctaacttaaacatttttcacctccccacaaaaagatgctattaatcatggacatgttctattccataattgtagtgcctcccttctgccatccacaaacagtagatgtgccttaaagtgaaataacaaaacacaagggaagaaaaggactattgtttgaaaagagacagacacaaatacacagaagagggttctttcactttaatagagagccaggtgctcatatcagcctacaaacagattctggagattttttatatatatatatagtgaaggggagtctgtgaaggctgtagaactaatggaagaataaatggtccagataccaccagatgtcacctttactagccccttcctttgtactcaggagctcagccttcctctgcccagtgctgccaaagctgggctgtcactcatctccattttgcattttggccgtcatgtctttcaagatcctgccgtgatgagtggaattgtacagggctagcagggggatcctggcatgatgagagagccttcctgggagcccagtacagattggatcatgccatcttctcaaaagggcagcctggcagcagagcatctcagccaagagaaaagtaagctcctccaaccctggcatcttctgtccctgtgccaagcccaaggtcaacttcatttccaatgtctaagaacttcgagacttttagtctgggaggttttttattattattatttatttatttatttttattgtatacctattactccccattctcgcccctccccccacaaccacaaaaacaaaaacaaaacaaaacaaaaagaagaagaacgaaaaaagccttgtctagaaaaaagaaaatcatcatgcaaagactgaatctgagtctgatgacttggcttgaatcccatgtcttgtttactttacaactggcggtaaaagggacaactgcttccagattcctgcaggcttatacattgaagttattattttgacttggtttattcaaacacatgcaaagaaattgccacctctagagtggagggagtttcagattgagaacaaagatctctaaatgggatgaaagtagtggagtcctctggttttgattacccctccagctaacaaaagacattcagaaactttgctttacatatactcttttccggtgactcatgcctgtaatcccaacaccttgggaggccaaggtgggcggatcatgaggtcaggaggtggagaacatcctggctaacacagtgaaaccccgtctctactaaaaatacaaaaaattagccaggcgaggtggcgggcacctgtagtcccagctgctagggaggctgaggcaggagaatggtgtgaacccgggaggcggagcttgcagtgagccgagatcacgccactgcactccagactgggcgacagagcgacactccgcctcacataaataaataaataaaataaataaactcttttctgttgtgcacacaaaaccacacagttttgggtgccactctttatctccaaatattgataataacacatattctgttagctcattgcatgggagtgagggccaggaggtcacaaacacaaagggatgtgcatttattgagctgaatttaatatttaaaaacagcaccgggccaggtgcggtggcttacgcctgtaattccagcactttgggaggccaaggcaggtggatcacctgaggtcgggagttcaagaccctcctgaccaacatggaaaaaccctgtctctactaaaaatacaaaattagctgggcgtggtgctgcatgccttaatcccagctactcgggaggccgaggcaggagaattgcttgaacccaagagcagaggttgtggtgatccaaggtcgcgccattgcgctccagcctgggcaacaagagcgaaactccatcaaaaaaataaaaataaataaaaatagagtcactaataccatgtagaagaagaaactcggaaaagggtgcaattgatctcaatctgagaggcttttgaaggactcattggaagagaagagatttgagctgaatcttggcaaatgggaagatgtaaagaatgcattgacattgcaaactaatacagcaatcattgcagacaacaaaggaggctgtggcagttggggctcactgtatgtattccttaaatgacttcactccagaaactgttttgacccaaacatagttggagcttagctgctgctgtattcttggcagagatgcagaagactgcatgggaagaggcttttgttataaactacctggtggaatgcaattacttgcaatggattctggccagggcaattgctgttaatattactaccttttgcagaaagtttccagggagtcttccttaaatgactgagtagtcagggcctttgttttacatctcagtgaaaaacctgcaaaaccacagccagaaatcaccaaccaagagaaattacttttcttgcatggatctacaaacatctgagctcaaaaagcaggggcaggcaatagggacttggggttcttagaggagagatgtaattgggagtcccagtgcttagtgaatgaaacaatttattttatcatgtcttaaatgccatttaaacagaagtttcaagtttcaaaaaagacagtttaccattcagtgctgctatgtggtctctgtctacacacaaacattaggaggagaaagttctttatctgcagtccttgcactctccgactgagattccctctctctccttccttccttccttcctccttccttccttccttcttcaaagcagattgttatgttagcagaaaacctttgatagtgtcattgaccaacactgcagtacaagctaagtatttagagaagtaatctaaagagaaagataaagggaaaactaattgggtttccctgaattttatactaaattatgacgagaagtaggatggtgaacatatgtgctttttttccccatgcctttattgatattgtgttcaggactatgggaattaaaatacacaatcttagctccacttatagcatgatagtatgtgagtaaggcgggatgttgaaaagagccaagcaattatgcatttgtcatgaataatagggaaggtggagttttctttatttgaaaggcttcctctcctccgggtgcggtggctcacgcctgtaatcccagcactccaggaggccagggtgggctgatcacgaggtcaggaggtggagaccatcctggctaacatggtgaaaccccgtctctactaaaaatacgaaaaattagctgggcgaggtggcgggcacctgtactcccagctactcgggaggctgaggcaggagaatggcgtgaacccgggaggcagagcttgcagtgaccggagatcatgccactgcactccagcctgggccacagtgcaagactccatctcaaaaaaaaaaaaaaaaaaaaaaaaaaaaggcttcctctctcatcagaagggctgtagtctctcaggatttatatccatgggtaggtagacgctactccatgattattttattttattttattttattttattttattttattttatttttattttattttatttttgaggaggagtctcactctgtcacccaggctggagtacaatggcctgatctcggctcactgcaacctctgcctcccgggttcaagccattctcctgcctcagcctcctgagtagctgggactataggttcacaccaccacatctggctaatttttgcatttttagtagagacggggtttcaccatgttggccaggatgatctcgatctcttgacctcgtgatccacacaccttggcctcccaaagtgctgggattacaggtgtgagccaccgtgcccggcctactccatgatttcttttttttttttttgagacggagtctagttctgtcgtccaggctagagtgcagtggtgcgatctcggctcactgcaagctctgcctcccgggttcacgccattctcgtgcctcagcctcccgagtagctgggactacaggcacctgccaccacgcctggctaattttttgtatttttttagtagagacggggtttcaccgtattagccaggatggtctcgatctcctgacctcgtgatccacctgtctcggcctcccagagtgctgggattacaggcgtgagccaccacgcccggctgatttttttttaaatctatttcctttgcatcattatgatttatatgtatatatccagaaaaaattaataaatgccacatccagataccatataggcaaataaatcatttctgtcatggcatgaactagtattggaagctatagatggcaagtgagtcaacaggcagggtggccttgggcaacttgtctcatcttcctggcattgggaataaagcacttagcatcataggatcttttttaaatcagttaaatggatagtaaccttaagatctcctataaatgtcatgaggtcctttctacttaacatattgtagttcctttgatgtctactgcagtctgctctctttacttgacctttactttgtaaaactaagtagtagtttgcagctgctggctttctgcatggggaccccaaaggtaatagattccaagcctcacaacatcagaggtacctcttcaaggagtaagttaatcctttcaaatctccctggttagtttcgtaggatccttatcagactctctgctacttgtttgataatatcctttaatctaacccattgatttgttatctctaaacaccattttagtttaatttgcagctatgatgtccattagcaagtgattacagtgaatgaacttaactgctgtatattgagataaaataccttttcaagtcctttggaaggcctggggagtgataaatctgtagtgctcaggagggcttaaaaggttatgacaattgggttctgaggttgatacaaatggttttgaaattcactttctcatatttatagtttgcacataatcttagggcatcagtgaatggtcattctgaaaatactgaataaccaggagctagtttgcaaaagtaaatataaatgaataccattttcttagtgcgcttatatcctatgtaatgggttatctatctttagaaacaatgatattctttttgggaccacctgctttaattctgagtacgcttctgtaccaggggttgctgtaatatatgttcatgaagaggtccatatatttcactatcacttgtgagtgcaccatgctaggaaaagtctatttaagtggatttcctagataactgaagcttatcttctactgaaaaatatttcaaaattagattacattctcgtcttcctttttcaagcatcttacatttggcatttcttttattttatgaattgtatatatgtttttgttctttgtaatggttctggtatatatttataaactttttactttattgattgaatttaagttgtgtgtgtttgttttaatttttgttgtggttaagcgatgtttcttccttctgtttaccacgtagaaggattattcttacaactaaattgttaagattttcaatttgttaggtttattttattttattttattttattttattttattttattttattttattttctcttcggaaacagagtttcactctgtaaccagtctagagtgcagtcatgcaatcatggatcactgcagcacaagattaattatttccatacacagttgttaattatgtttccaaactgcagctgatatggcaagtagccatatttgtccccaagcacactctcctcatttttgataatgaagagattttctttgatacaataattatgagtactttttcactctctcccatcaatttgtttagattacctgtggcttgcccaactgacttcctctttctaatgaaacactcaggtttggaaattcctttctttttcagatgctatccccacaaattggccccatagtctcctggaatttaacctgtaaaataggctgattgttaaatggtcgtgtgtcacttttgttcacatgagtcatctgtagagtagatgtttagagattctgatatgaaaaatgtccttgcagaaatcaactgtaatgggaaatggttcccagaaattctctgctgcaaacctagattgggagccagggagaagatgcacagtaatctatttcattgcatcccttggctgtaacaattctgacagacactacattcagaaactcttttatcagttgttcataaccttcaaagaatgttctaccctccctacattattcacatcagtcaataaacaatatataagctggagagacaccaaaatgtatcattgagataacaagacctaaagagctgatagaggttggagagaagatactgagtatgaccagtacccagaacagattggaatctgaccaacaagcttcagccatgctatcaagaggacagaatctaatcactcaaatgtacaaagtattgtgagaatgaaaactagtgctagacatcaaagtttctgcgtttatctgtaggtgaatgatttgataaaaactagccttttacaataaatactcttataagtgtggtcaagtgccctggtatgttttccatataagtgtgtgtcccttttgtaatacaaaatattattctttggaaagatatggatatgtaaatgaataattttgttaccataaatctgtttcatcaagaatactaccctcattcttgaaccacgattttcatttattggtacattggttaagtttcttataaatattgcaagctggctgattttggtttggtgagcagaggtttgggcccaaggtctgcgttctaggttggtgtcgtgtcaacatatgttacagactattgaggccatcacatgtgatcaagtgaaagagaagtagcccagtctccctaatcagaagggagaagatcattcctgactaaaggatagttctttcctttctgtcataatttgccttgagccagcattttaacgaagttttaaaaaatactgtaaagtcaggccgggcatgatggctcacacctgtaatcccttttgggaggccaaggcgggaggatcatctgaggtcaggagtttgagaccagcctggccaacatggtgaaaccctgtctctactaaaaatacaaaaattaggctgggcacggtggctcacgcctgtaattccagcactttgggaggccgaggtgggcaaatcagcagacgtcaggagttcgaaaccagcctggccaacatggtgaaaccccgtctctactaaaaatacaaaaattagctgggcatggtggggcatgcctgtaatcccagctacgtgggaggctgaggcaggagaatcacttgaacctgggaggcggagattgcagtgtgccaatatcatgccactgtactccagcctgggcaaaaagagtgaaactccatctcgaaaaaaaaaaaaaaaattagctgggtttagtggctcatgtctgtaatcctggctactctggaggctgaggcagaaggattgtttgaacccgggaggcagaggttgcagtgagctgtgatcgtgtcactgcactccagcctgggtgacagagtgagactccgtctcaaaaaaagtgtaaagttaaattttgctaagtggcccttccattgtacatatgtttctctgccttttgtggatgcaaatcttccctgaagccaggctcaccttatcactctcataatactttctttgactacaccatccttaaacatttcttctgattctgtactcctacagtatgtatgctctttttgggactctgtctttactctccatatgcaactttctgtcttagaagatatgacatgtacttggtaaaggaactgataatataaagcagtggcttagacatgtatatccctcctgtgcctgaccaaatggcgtgaactttgagaatgaaagtacttaataaatgcttgcaaattcgagatggagccgcatagcataatggatgaaaacgctgacactagagctaaactaactacattcaatcctggtttggccacttatcatctatgtggtcttggactagtcatgaaacttttttgtgcctcagcatattcatctgtaaactgtcgtctatactagctgggcacggtggctcacgcctgtaatcccagcactttgggaggccaaggagggcagatcacaaggtcaggagatcgagaccgtcctggctaacacagtgaaaccacatctctagtaaaaatacaaaaaaattagccgggcgtggtggcgggcgcctgtagtcccagctactcgggaggctgaggcaggagaatggcgtgaacctgggaggcggagctttgcagtgagccgagatcccaccactgcactccagcctgggagacagagcgagactccgtctcaaaaaaaaaaaaaaaaaaaaaatggctatactaatagttcctgcccaataaattcgtgggtttacatgagttaatatatgcaaatcccttaaaatgagcctaacacatagtaagggctattaaatgtttgctattactgtgatgttttataaattagtaaaaaaaatagaccaattatggttaatatataaagcacatttagaaatttttcttaattccccaaaccatactatttagaaactttatccttccttctcttgcctttattcctttcctattttcttctttctgtttattctcttgtccttcctgctttccttaaaattatgaatagcacatatttaatatgatagtatgtgaaaattaggtgttcatataaatatttaatgagctaatttctaaatacatattataaaattaagaaaatattttgtttgtccattcaatcatcagacattgattaacaacttactatgtagaggccctagagatagtgaactaaagacgatgaaaggttccagtgtgtggtattgatattccagtctggaaaaggagatacacaaataaggaaataacgacaaagtagaattgatctggggatagcattaatcccagggtgcttttgaaggactgaggaaggtcacctaatccagcccactgaaggcctaggagaccctctgtttctttttaagattcacctggaactggccgggtacggtggctcatgcctgtaatcccagcactttgggagactgcggcaggcagatcacaaggtcaggagatcgagaccatcctggctaacacggtgaaaccccgtctctactaaaacaaaacaaaacaaacaaacaaacaaaaaaattagctgggtgtggcggtgtgcgcctgtagtcccagctgctggggaggctgaggtaggggaatggcatgaacccgggaggtggagcttgcagtgagccgagatcgcgccactacactccagcctaggcaacagagcaagactccatcttaaaaaaaaaaaaaaaaaaaaaaaaaagattcacctagaacctatgtatcttttggcccctcaatctctgctgttgatggtatgttggtgaactataacacacagacacagaaatcccttgtgtatggtattgtacacaatcctagaaatgttctgttaaacagagatatcaacctttaggaagtcttacagtcatatggaggttttatgtaagtatcacttagcatatacttttttatttttcaaaatgattcatggacatgaccaattactttccttggtgggtgagtcctactggtacatttaattatttattaatagattattattattttttgcttgagaggttagagctagtgttagaaggtatcaccctctataggtcaattacaaatgagacaacatatccagctgtagcagtgcatcaaaatcaagagcctggtctaagttgtagaaaaatagggcaggcagacaattctgactccctgtaataggtcctgcttgatctctataaccaaatgttacatttgtggcaatgcatataatagttctgctttcagtcacttctgaatctagacatcctaggcttcttgcaggaacttgaagaataaagtgacagaaggcaattccccttttaggacctgtgttagtctattttcatgctgctgataaagacatactcaaatggtatttctagttctagatccttgaggaatcgccacactgtcttccacaatggttgaactagtttacagtcccaccaacagtggaaaagtgttcctatttctccacttcctctccagcacgtgttgtttcctgactttttaatgatcaccattctaactggtgtgagacggttactcattgtggttttgatctgcgtttctctgatggccagtgatgatgagcattttttcatgtgtctgttggctgcataaatgtctttttttgagaattgtctgttcatatcctttgcccactttttgatggggttgtttgttttcttcttgtaagtttgtttgagttctttgtagattctggatattagccctctgtcagatgagtagattgcaaaaattttcttccattctgtaggttgcctgttcactctgatggtagtttctttggctgtgcagaagctcgttagtttaattagatcccatttgtcagttttggcttttgttgccattgcttttggtgttttagacatgaagtgcttgcccatgcctaggtcctgaatggtattgcctaggttttcttctagggtttttatggttttaggtctgacatttaagtctctaatccatcttgaattaatttttgtataaggtgtaaggaagggatccagtttcagctttctacatatggctagccagttttcccagcaccatttattaaataggaaatcctttccccatttcttgtttttgtcaggtttgtcaaagatcagatggttgtggatgtgtggcattatttctgagggctctgttctgttccgttgatctatatctctgttttggtaccagtaccatgctgttttggttactgtagctttgtagtatagtttgaagtcaggtagtgtgatgcctccagctttgttcttttggcttaggattgtcttggcaatgcgggctcttttatggttccatatgaacttcaaagtagttttttccaattcagtgaaaaaagtcattggtagcttgatggagatggcatttgacccagccatcccattactgggtatatacccaaagcattataaatcatgctgctgtaaagacacatgcatacgtatgtttattgcggcactattcacaatagcaaagacttggaaccaacccaaatgtccaacaatgatagactggattaagaaaatgtggcacatatacaccatggaatactatgcagccacaaaaaagagtgagatcacatcctttgtagggacatgggtgaagctggaaaccatcattctcagcaaactatcgcaaggacaaaaaaccaaacactgcatgttctcattcataggtgggaattgaacaatgagaacacttggacacaggaaggggaacatcacacaccagggcctgtcgtgggtggggggagggaggaaggatagcattaggaggtatacctaatgtaaatgacaagttaataggtgcagcacaccaacatgacacatgtatacatatgtaacaaacctgcacgttgtgcacatgtaccatagaacttaaagtataaaaaaaagacaagactgggcaatttacaaaagaaagaggtttaatggacttaaagttgcacggggctggggaggactcacaatcatggcagaaggtgaaaggcatttctcccatggatgcagacaagagaacagagcttatgaagggaaactctgccttataaagccatcagatctcgtgagacttattcgctatcacaagaacagcatggagaagatctgccccccaggattcaattaccttccaccaggtacctcccacagtacatgggaattcaagatgagatttgggtggggacacagccaaaccatatcagtacccataagaaatggtacctcatatttcaaggaaagttccggtaaactttctgtgtcagattgctttatatcttagcccatctctgcctacggttagttttaaaaacattttagaggattatgtggttatttttactttttacatctgtgtgccactctggggttgccctgctccctgggtacctggactgcacaatcagagatgcagtctgaaaaagccatcatctgggagcatctggctgcatggactgaaggtggtaaaagcaaattggccatctgctggggctggtatagacatggagatgatactgaataatattcagattgatgttttaccccaagcgtgcttggagaggttttgttttgcatgtttttcagcagacctggtttaaaaattcatgaatgcacctggttggttgtttctaccctctgtttttcatgtattctggcactgctaaaaaaaaaagcaactcctcagcaagagactaaattggaaaaggattgtattcagagtttagaagaaaatctgtgtggttttcatgaaaatcacctaagtatagatgttggggtcaggatttccaagagttaacaacatcatgtagtttacttttcagtcttagagaaatttaggcaaatgatatatttgaaaaaaaaaattgtatatttgagttaaatgccattgtctaggaattccaaaatgctcagaggtttttgaaacactttgatgcagataaaaagagccagagcaaaatgacagtgtttttcccagtaaagaatcttactgaatctcttagaataaagatgaaagataagtaaaaaagtggttgttatcctgtctgagaaaggtacattcttttatttttattattattatctttttgagactgagtcttgctctgtcgcccatgctggagtgcagtggcgtgatcccggcttactgcaacctccgtctcccaggttcaagcgagtctcctgcctcagcctcccgagtagctaggactacaggcacccgccaccacgcccggctaacttttgtgtttttagtagagacgggatttcaccatgttggcaggatggtctcaatcttctgacttcgtaatccatccgccttggcctcccaaagtgctgggattacaggcaagagccactgtgcccggccaggtacattattttctaggtaagatttacttttggtttgagtggaaactctagttaaactatggattagacaaattaaatttggttaggatccagggaaccaatttcagatccattagtaaaagtttctagttcccaaactctgctcgctctctttctccccacccccaactgtccctgtccctgtcaatctttgtctctctcactctttcccaggaaaagagaagaaagatatttagcctaaaggctgagctttaatacagaaaatgacctttacattttagctcaaagaagtaaatataatcttataagtatcattggcaattgagtcttgccgggatgggacttatgagtataatgcagcagtggaagaattttccttcagggaaaaaaacaaatttgataaagggactggtgagaaacattgtatgtcaagaagatctacatcttcttgaaaatttctgatcttagatttagaaacatgctgaagtttctataatttaaagcttccatttagcacagacttaatgtctgctgtgtccttggcaccctaggtttaccttgattttagaaaatctgaactgtcaacatgtaaatgtagaaattcttcactttacacaaagaagcagtgcagacattttaaaaaatagcaggcagtccttgtatgttttgctaaataagggcaaaacttaagactaaaatgctaagatccagtgccacaggaagatcaattaatggtgagaaatggcatttttggaaaatgtaatatcaatttataggtatataagatttgattcactaaaatttgatttgttcataacctcactagcatgcatctctcaccccagaaaaaccacatgatgtttgaactggaagatcactagaaactttctcttctaactcagcatttgaccatgatgaaatttgggctcacagatgttagttggttttctcccagcgtcttagaactagacagtggcagagatggaccccgtatctcattccacggcacactgcctccccctgctgtctcttagaggttgacccacctttacagaatgttcccattcaatctctttcttaattctagagttgtagcaaatttccttcattatactggataacttcagaatatgtagcaaataccttgatgcctataaataccaaagatcacacgaacacccattatttcaatggctcagaatgttatggatttgatcatctcccgaaacagaaaggatcattatagccagagcttcttacccctcttttagccagcaaccccacatcacgtggtctagtcctcagtgttcctattgttattattttgcatcttgttttcacagataaacttgaaaaagctgaatttgatctaaaccttacagaaattctagatccagttctaagaatgagttgataactgttaagtatctactatgtaccaaaaagggatactaaccaatcactagtatcccaaagtatgtttctcagaaccttagttctctagaagcttcctgggcaaaaaacaaaaaacaaacaaaaaaaaacaactagattatatctttgaatacatttgacaaattatcttcgactcttcttgctgtaggatgcactttccaaagactttaataaaccaaaggaacctgttttattttctgcattctggtatcccccaaatttacatgactattgaattcttatggtgttagaacttttaatttcacttagaaaatgctacattcattgtgttagctccatcaaatcataatgaacacccactctgtgaattgtgtattgttagcctcatttcatagctatagaaataaaggatcagacataagaagtgatttcctaaggtcgtgtgagtgagcagaattgggggacccctggttaagtttatgatcttagctcctacaggagtctcaactcaaatacctattgacttacacaggtaattgtagatgaatggagtgactagggagtctatgaatacagaaactttattttaagaaaaggaaacaatgagggcccggtgtggtggctcacgcctgtaatcccagcactttgggaggccgaggtgggcggatcatgaggtcaggaggtcgagaccatcctggctaacacggtgaaaacccgtctctactaaaaaacacgaaaaattagccgggcgtggtggcgggcgcctgtagttccagctactcgggagactgaggcaggagaatggcgtgaacccgggaggcacagcttgcagtgagccgagatcgtgccactgcactccagcctgggcgacagtgcgagactctgtctcaaaaaaaaaaaaaaaaaaagaaaaagaaaaggaaacaatgctagtgagcataggacgttgtaggaagtgaggaatatttccagtgtttaatgtgctctctgcccgctaaatctgtttgttgttctgtttgaacagccagaaggatgcaatactttgttttagctaagaatgtatgcttttttccccttacatcaataagaaatgccaacagagacctgcttttagttttaacaagataacaaaagatgatgtgggtggtggtaacctggaaagcttatgacctctctataggggatagcagttctagagttgttgtagagtatggccatatgggaataatgtccaggacatctggacattgttggaaaatctgttaaacagtgctctttgggccaatattatctacatcaaatagaactcgggtgctggtcagagtcagtctgtggactatggggttctaatgtttgcatttcactatgctacttgccaaagaaaaaaggtctgccactgaaatcattctttgtagcctgatggtttcctttgtggcagttatacattctgtggcttcaggaatttgttgaacattgaaaaggcacatgtgctcatttacattgttggcaagtgttaaattggggagacatatgttttgtttattctgtcttcctgttagatccttaaagaggattgattgtcagactcagcagtagctttataagtagtgtgttttggaaaagtattttcagaattgccagtacttatacatttggctggaaatagctataaagtatgcttggaatcctggtggacatattttgggtaatgcttaactggtcatctgcctggatttaagagtatttttcttttgcctaacgctgttattgtgtgtttctgaaacactcctcttagctgaaccaatgtaataacctcttagcttgaacttcctgccccccattctcttgtctttaacacaatctctgtattacctccaaagtgatcattctgaatgagctatactctttctcttcccctgcttaaaaatcttgattctgtatgtatgcccctgaataaataggttctgttgctttagtcaaaatcgctttacctggcaagtaagtctctttcaacttggctgtagactgctttgcctaactttagccaaactgaggaacttgccattaccaaaacatgtaatgcatgcccgcattcctctgcttttgcatacgtgattcccctgtcacgaatctttcctacttattctgttaaacacctttacttccttcagaactaattttggtgtcaggtattctgtggttacatctcttattccagcaataggaaaaaaaagtgcttttccgtgttctagtaaaattttgtacatttcaatagctctgcaatggtagtttcattgatctgttatttttgtggtgttatctgttgtaataaggcatttagtgtctttttcattatttaatcccaagtcttaagcacagggactgtcacttggttgcagaaacttcttaaattagattttaaaaaaaatgaaatgaatggttgaatgatgaacatctgctcatcccacaaagaatgaaattttcctctcaaaaaagtgatgtttttccaaaagtcgtgtttttctatttgttcttgaaaggcctaaaaaaggattctaaaaattttaatttttttgaatatttattatattcattaaaatattttatagacaaggcacataaggttccatttagtgtatcacttatgaattgagtgtaacgtgtgtcaaagagagaatttctatttatttcacattttcacttatgttttagacaaattttaaaatgttggttagttactctataagcccgtgcttacgaagacctgcttattatgtgctctaatggttaagatgcagtcctgggaaaccaggtacttgggtgtgagccatggaaatgccaaggatgctctggaataatcttggaggaatgattatgtctctccatgcctaatttcactctcttgaggtttgtttcaatttccagttggaatatcctaattaacatttgtaaagcgctgtgtaatgcttaaatgaaaaacgtcatgtgagtataaaatcttttgaaatagcagtttaacaaatttgagttttttgtgcaatgagctattttttaacatcttagaatttataaaaggataaccagaaaggtttgactgggaattgatgacatagtacaaaaaggagaaataatgtttttctacagctcctttatttcgggaacgcaattactgaaatatgcagtttagagtttctaatttcttaattgtcttcgagcttgaaatacgcacttgggatcacccatgtctatgtgtgtataatatgtgcagaatgctactgtgttgtctttttccagaaatgtagatgaagatagaaagtgtgcataagcagacttataaacagactatgaagtaagaataacaatgtatacaaatcaataagaaaaagagacatacccagaattttaaatggagaaaaatatgaccagtctgtgtatcaaatgaggatttcaagtgagtaaacataaatgacaaaaggataaaagggagggaaaaaggaatgaaaaaattcactgtcattaggaatgaaagtggtatatattgacataaaatacatctttttctccagtcatcttagaaaacaatataaaaagacagacaaaacctagtgttgcgataggcacttccagttaaattagtatactcttctgaaaaacacttggtagtgtgtatcaaaagtggttgcaaaattcatattctttttttgtttttgtcgaaataatgtcttgctctgtcgccaggctggagtgcagtggcccgatctcagctcactgcaacctatgcctcctgggttcaagcgattctcctgccttagcctcctgagtagctaggactacagctgtgcaccaccacgcccaactaattttgtatttttaatagagagagagtttcacagtgttggccaggttggtctcgatcttttgacctcatgatccatctgcccgcctcggcctcccaaagtggtgggatgacaggtgtgagccaccgtacctggccaaaattcatattctttatccataaatttcactactaggaaattacttgaggaaatagtaattgacatacagaaatgttaatctacattaatcataatattagtgaaaattggaaacctggtaaataagagattaattacatagtggcatatttgtacaatcaatactatatcaccaataaaaatgataacacagaagaatattgaaaaccatagaaaatcttcgaagtgcggctttaaagtgggaaaagcaggttaaaaagcaggaagtgtcacacgacaccctcttgctgtataaatttctctttctcccactttgtgtctctttctgacacccataaacatttatgtatatgtgtgtatatctatatatgcataaaacaaagattgaaaacaaatatcaaagtgtcagtgacaataatctctgcatagtgatgcttaagtgattgttcttttattctgagtacgtttttggggacatttttcaaaaatatctgcagttaatgcatattttttcttgttcatatgtgaacacaatacctaaactttaaagcaaataatatgactaaatgaaaagaaacaaaattattgtatctttgacacaaagattcatacctagcaagagctagacatcggacaagtagcttaaaaacctgtccggccatcactaggagcactctttgtcttcattcttttattctgaatttgaaaccaacccaatagtcccatagactgtcgttttggataaacatagaaattgacctttctggtcaattgaagcttgaggcttacatttgttttatctgagttccttccttaggaaaggaccttcaagcctctcaaaaaaaagtatcaaataactgaaactcaccagattaccacatcctgacaatgagaagcttggacccctctttcactttgattgcttccttgcccttccttagttcctgttttcttacacacgattacatttcttccctgctatataaacccctagtttcagtcagtcagggagatggatttgagactgagttcccagctcattggctgcagcaccggattaaagcctttttccttggtaataactcatcgtctcagtgattggctttctgtgtggtgagcatcaggacctagaacaaacctctgatgttacagtaacaaattgaaggaattaagtccagtaccaattgttgagcatcaggacctagaacaaatctctgatgttacagtaacaaattgaaggaattaagtccagtatcaattgtttatgaattgagaagcaccatgatgtggttaggctttgtgtccctacccaaatctaatcttgaattgttatccttaggtgttgagggagagacctggatcatggggatggtccccacccgaccctaactattctcatgatagtgagtgagttctcaagagatctgatggttttgtgtttggtagttcctcttgctcacctcttctttctcctgccgccctgtgaagagttgccttctgccatgattgtcagtttcctgtggcctccccagccacgcagaactgtgagtcaattacacttctttgctttataaattacctaatcttgggcagttctttagagcagtgtgagaacagactaatacagtgaattggtactgcagagagtggagtactggtataaattgaaactgcataacaggcagaggttagaacagtttggagggatcagaagactggaagatgtgggaaagtttggaacttcctagagattggtgaatggttttgaccaaaatgctgattagtgatataaacagtgaagtccaggctgaggtggtttcagatagagatgaggaatttgttgggaaccagagcaaagatcactcttgctatactttagcaaagagactggtggcattttgcccctgccctagagatctgtggaactttgaacttgagagagatgatttagggtatctggcagaagaaatttcaaagcagcaaagcattcaggaggaagcagagcatgaatttgaaaaatttgcagtctgacaatgcagtagaaaagaaaaacccattttctggggaggaattcaagctgcctgtagaaatttgcataattagcaggcagccaaatgttaattgccaagacaagggggaaaatgtctccagggcatgtcagagaacttcatggctgtccctcctatcagagacttggaggcataggagggaaaaatggttttgtgggccgggcccagggcactgctgctgctctgtgcagcctagggacttggtgccctctgtcgcaggcgtggctgaaagggaccaccacacagctcaggccattgctgtggagggtgcaagtcctaagccttggtgacttccacatggtattgggcctgcatgtgcacaaagtcaagaattgagatttgggaacctctacctagattttagaggatgtatggaaatgcctggatgtcttgacagaagtttgaggcaggggcagaggcctcatggagaacctctgctagggcagtgcagaagggaaatgggtcagtgcccccacacagagtgcccactggggcactgcctattggtgctgtaagaagagggccaccgtcctccagaccccaaagtggtagatccactgatagcttgcactgtgcccctggaaaagccacagacactcaacaccagcccatgaaagcagctggtgtgggaggggtgccgtaccctgcaaagccacagggggagagctgcccaagacaatgggagcccacctcctgcatcagcatgacctcaatgtgagacatagagtcaaaggagatcattttggagctttaaagtttaatgattgccccgctggatttcagacttgtgtgggacctgtagcccctttgttttggccaatttctcccatttggtgtgagcatttacccaatacctgtacctccattgtattttggaagtaactaacttgcttttgattttacaagctcagaggcagaagggacttgatttgtctcagatgagactttggactgtagattttcgagtcaatgctgaaatgagttgagactttggaggactgttgggaaggcataattggttattaaatatgaaaagacatgagatttgggaggggcccagggcagaatgatatggttaggctttatgtccctacccaaatctcatcttgaattgtaattcctgggtgttgaaggagagaccttgatcatgagggtggttcccctcatgctgttctcatgatagtgagtgagttctcatgagctctgttggttttataactgtttgattaatttatcatccaagtcatatctgcatgtcagtaataatatttatgatggtgctataggaataagccaagactttcaaaggcaacatgtaatgtatgttcaccctattcatgacacattcaaagaaagccaaaccatctatgaactgtctttcatatgatcaaggcagctcttgaatcaagatcagacaacttttaaaatgacagtatcttcatgaacttattcaacttatcatgaatatgaacctgggtctgaaaatggcttttgtatagtcacaaaacagaattggagcttttataattggacttcatggtagccccttgattaggaattattctgattgatgaggatccttgcctataagcaattgtggtgactagctgtataaaagatactaggccagatccataaaagatcgtgttgtttgaaacggtttaaagaaggcaacatttttgttccctttgcatacaaaatacttttggggtgttgagaaataccactgatgtcaagagagctgattttgtggttattttcttgaagtgtggattccctgttggtaataacttggagcagatgagtgttttatagggttggcatagcagcagcaggaattgagctatgcagccagatgcaaatacaattttaaaaaataataaaataaaaattttagatggttttatgtgggcctgggcatgataaaaattgaactttctttatgtttctagaatacatttaccattcactttcagacctaaatggccttttgttgttgttagcccaaggatacctgaaaatcattaggtttattttaagatccattttccaaactgaagggaacactaagtatcctattttcaatttctggtttatgttgtaaatgatatcagtgctttctctgtgagcatagaagagcaaggactactttgctcttaagaaacccatatttcatgatatcagatccttaattaaatgaggggattataatgcctagatataggttcttttattagagagttgcttaggcacactttaatggacattgaactggtctattcttctataatttaatctgggtaatttatgtaccctgaaaattcacacactgaaattactcaaccttggctcccttaatgtccctgagagggactaaacaatgcaattcacttggtcttcaataaatacacttaccttaatctgataacagattagaatttttcagccttcaaaagtttaaggtaagacccaatgaaaattctggcaacttcaagatatctatatcccaggaattctatgattatgaggacattttaattcatattgaatataataattacaactttttatcatatctatttttaaaaattatgtgacaagttttacagaagatagttgtggttacttatcttcaatatggcttgcttctgtgtgtgtgtgtttgtgtgtgtgtgcgtgtgcatgcttttcttcccttgagaggtgaagtctatttttttcctcccattaagtctggcccagaattctttgaccaatagcatgtggcaaaattgatgtcctgggtcttccaaggatgggtcatgcaaagctttgcaccttccactttagccctttggaatacttgatcttgggacattcacactgaaggaaaccactgctatataagaaattcaactattatgaaactgccatgttatgtgatgttcagccacatggggggtcctggaggatgtgatgtcatgcagagagaaagggagaggtccaaccagatacaggaatgaaggagccatcttggaagtgaaatatccaactctggccaccacagttgacatcatgtggatttgagactacctactcagctcagcttttcccaaattcctgacccacaaaatcttaaacaaaacaaaatgcttgtttgaagccactgttctgagatagattgttatacaatacataagtagaatagaactccttttctctttagtatactatgtcagttctaatgcttctgaggtatgtatattgagatagaattaaacctagaatatgcagtcatgaaaaaaatcatcttcataaaacaccgcactgctgtctttcctgctgtgactgaaatccaaaaagagagaggaaagcagcagatgatgtaattatgctctgacatgtcaattaagcacattgacccttttccacctctcatcaacaacttgagatgatcaatgtttgtcattaaataactgaagaaggaaggaaaattttacatgaaatggacctcattgttaatatgagaggcttcctcctggatgaccccctctaggcccatcttccaaagagctctgcagtagagctgcaccaggctattctcacttcactaatctgcaaatcctgtataagagaaatccctggtggtctccgtagtcttttcaggaaagctttaatagtcaaatacattagcaaggtctcacgtggctgagacttcattaatcttccccagtacaccctagtatatttgccagtttatcatgaagcattaatataagtaaaattaaaacgtacttgttagtgtaggaaagggaaaaaattccctctaccctctgagtgctttataattgagtccatgaaataaaccatcactggacagattaataagagaacaggtaaacaaatgtattacatgtacaggggcatcacatgaaagaaaagtgaataccaaaaacccagtgagatctaaaagcttatatgcccacttcataggaaggaggagaggagggatgtaggcaatttagggaaaagtaaatgaattttgggaaagacaaatgggccctcagaagaacaggtgatagcgagtctggttgtaatgtcaacttctagtctcttctgtaatctgagttcatctttggttgatgagattcctggggaaggaaattatgacaattgagttattttagatcagtcttcagacagataaggagagctcagagagagctcctgccagcattggctgttccccaagagccctcagtttgaggtaatcagtgtaccaaagcagggtattttggggtggcatttcctgaactccttcattaggatgatgatacaaatacagcaagggatgaagaatgtggatggattctgttcactgatttttagagtggattaatgtctatggacttttcattttactttcctgactttcaacttgacacttattcaaactctaaagtcaagtacacaacttacagattttaccaaaaatggatttccctcacttaaatcaatgttaagatagactgatagcttctctttcctgctctctcttccttctcacctgtgtttctttatcatttcttgtggaataaagagatttcttatcattaaatgaacatcatttcttgtaaagtttcccatgagcaaagaagatgaatgtctgtttctcttagcatcatggctccttctgatagcagctaacattttaaaatgatgtaaccttttggcatttatagacctttggggatttaagagagaagttactttgggacttgtaatgttgatggaagtgtgttctgattgggttggaacggaggctataggataatgagatttttaaggtggctcaaatattctcaaggtatttaattagttctcatagtgactgcaataataaaaacattctttgaatgtgtacatcattatttccctctgaaataccatgtttaggtttttttttttttttttgacggagtctccctctgtcgcccaggctggagagcagtggcgcgatcttggctcactgcaagctccgcctcctgggttcatgccattctcctgcctcagcctcctgagtagctgagactacaggcacccaccaccacgcccagctaactttttgtatttttagtagagatggggtttcactgtgttagccaggatggtctcgatttcctgacctcatgatccgcctgcctcggcctcccaaagtgctgggattacaggcgtgagccactgcacccggccccaggtttagttttttaaaccagatgacccaatgctaagcattagtgaatattccatattctgcactgtcacctcatatgatattaataatagcaatttctccagtaaaatgagtctgttttttttttaaatgacagttaagcatgggatgcacttattaggaaaatagttacactgtaatagttcttatttgctttagcataaacttctttgcgaactagcatgtgggaaaatgtttctccaccaataagaacattacatcagagatttttgcccattcctattatccttttcccatccatttttatgataaagcataaaatccaatctacggaagaatcatgctggaaggacaaggtaaaggaagccagagccattgtgaaaaatctggggtatgaaccataactggctgttttgatcttctgactgtatatttaaaaccaagaaattatctttatttgttcaagaatatagtgtcgtcttacacttgttactggaattctccattatcttacaccccatttcttcttgctgtctcttttttttcatctaggcaatatttttatgagatatttgtaatgccagatttaaatctctttccctctcttttttggaattcaactatcatattttagcagaacataaagtactatatatgtcatcctttgtgaggtaaacgcaatatttgcacaaaacttaacagtgcttttgcacagataatcttatctgatcttcacacgaatctctgcagggcatgacatagataaccttaccactgactagctgtgcaaccttgagcaaattgcctcatctctctaagcccgatatcaaatggacataatgatatctacctgaagtagttttcataaacaatctgatggaataatttagtttaaagctttagcagggagcctgatacacaacagctcaataaatggcaacttgtttgtggtatcactactgtcttcaatgaggaaactgagactcaaaaaaaggatttaatgagctataaggtattcaaagtggcacaactgataatagcagagaagaaattcaaatccgagtttttaaacccaggccccttactatttcttgtgattgtagcttacctttcttctcatggtgtgaatgaccttcactaagcacactcccttcttttctattttgtgaggaaaagtacacattcatgaagacattgactagagccaggtttaggattaggttatggctcttcctgtggaacagaagtctgtggtgcaccagccccatgctcagccctgtggatcaacccgccatggaaatatatacgtggacatatatttcctttatagaagttcagtgccattcacaatggtggaagcagattcttacagtaaaatagtgtttgtacgtttgggtttctctaaattgtctcaaaggagaagactatgttcagtagtcccaagtgaaataagaagagatgtcctatacgttttcttttttgaatcatcttccaaggactgtaactcatatgttgtcattcctgataaaccttactcatcttctatgtactctgtggaattggccaagaggtactgaatgactcctcattattgttacaaataataattaatgggttgggtctcctgacaaggcaattaacacacatatgaaggactgaaattacatgctccttaaaaaaatgtttcttcccagccttacatggtggctcatgcctataatctgagtgttttgggaggccgagatgggaggatcccttgagcccaggagtttgaggctgtgatcattcaactgcactccagccggggcgacagagcaagatcttgtcttaaaaaatgttttttatgcttgtttttttccgttaaaaaatctgagtctgtggatcctcattagaaaaccagtttgaaatcaaaaggacagaataaactctttaaaatacaatgccatagtttcccagtcatttcactgaatcactttccaggtcacaagcagacagtctgttgcctaaatgttctgttcatctcagtattgaatgacgcgattttgtgctaataaacaaagatggcacataggtaagcttcgctgagtttggaaggatgggatttaggaaaattggttgtgtcatttccatcttcttacagactcatttctatcagtgtgtgcttgatttgactcatttctatcagtgtgtgcttgatttgagcttttttctttttaatccccttcctccccttccttcactgtttgtatttctgtgattttctttccatggttcattctgggatcctgttcaactttccctaacactgtcctccaaatagttgccaattgataagcacttaattgctctttccctcagctcatctgggaaggataagtactcagccctcattgagaataggtagcttttccaccctcattggtcagcagatgacttactttctctgattacattttgcttaatttgattttaattttgagatcagaggtttgcaaatagacttttattctgtttatagagagaaatatttctgtttgaataaagtgggtagcagtagataactggagtgcctaattgctgctgttgctgtttttctttgctgttgtcattatcattatgaaaagcatttattatgcacctgtgatatgggcatctggagctgaattaagctctgagtaaagcaaaagagatatccacacagcagcccattacctctgcttgattccagcccatttatgacaaagaatagacaaatgagccaacaaataatgaacaacatataaaataaatactttttccattaggaccaaagaaatggtacgaaaaagtatatgcccggaggtggtgaagaactttttattaactccacgccacataaaccaataaatggtggaattccaagaacagcatatctaggaaaagaatttggaaaactaaatagtagcagcattcctctgggaagaaggcccgcaggagacgacaactggaaggatcagaaagctgcctgccaaccttttgtagaattacttcctgtagccatatgttgaatctggagcaaactaaagacagtgaaagtgcatttaatttttgatgacactgagctgtcagaaggactaataccaaaaaaaaaaaaaaggagaagtgacgtatttgaaatctataaattgcatttcatgttcatttgtctactctaggaaaagcaaataaagtttcttcttccttctgaagtgggtgatgaatgattgcttggagttgggtggtaggatcctgtgttgccattattgactttctatggaaacaattcatctgcaggtgcagtcagtcggcacaccctgcaaggcataagtaaactggttctaatcactcatgggtggaactgaacagggaataattactttcctgataaaggcagtgtctttctcttatcttcaccttccttgcctcaagtagaacagcgaggatttgctcaaggggactggaaatcccagtgttgcaggggcccctggcctgcaggcagcagaaggcaggaatgaaaaggactcattcatttattcattcctttattcatttacaacagtatgtggacctactatggaacaagctttgatcctggcagacaatgacctctctttttggagagcttactttaggaatctgcaaagcttggattcatgccttttacaaaggcatgctaaaattctgttgtccagaacatgctccagaatacagagaagtaaacacaacaaaacattatttgttcaaagttacatgaagagtcagaaggggataaagagtcattctaaactagcaaaaatagggattgttaggcatctttaagaaatgtaatctattgtttttgaagaatatttgctaatttgaacttactattttgaaaatatttctgagcagaaaatcttgtgagaagatatgacttattcatttatgaacaatatcatctatgtctaaagactggatcatatttattattttcagtgtttgtttctcaagtatgttaaggcttttttatttagatcgcattaaattttttacttattagcttatttatattttattactgataaaatggtaggacaaacatcaattcatttgaagcaaaattattaaagaatttgaatttaagactaaaataataagattttacttattcaattaacaattaggtacatactatgtttcagtcattacaacaatcataatttaattaatttgaaggttgtgattaattggagtacattatacagtcatgtgtgttaacgtgtgtgcatttgtgtgtctatggctcagttaaaaatgaatatttggggggctgggcacagtggttcatgcctgtaatcccagcactttgggaggctgaggcaggcagatcacctgaggtcaggggttcgagaccagcctagccaacatggcgaaccccatctctactaaaatacaaaaattagccaggaggcagagggcagaggttgcagtgagctgagattgtgtcactgcattacagcctgggcaacagagcgatactcttgtctcaaaaaaaaaaaaaaaaaaaatatgggccataatgtcaaacttaaaagaaaaaaccagaataaaatcctcaatccacaataggatatagagatgtggataaagaagtagaaagaaacacaaacatggtttaacttgcaatgatagggtcatgagtttgttttctttttcttttgaattctaccagaggtcttatggagttgtttctgcaataagaaaaataactaatgaaaaatggatccagattgacctgtttgttctgagtagaattgaacagaaatttaagagagcagccactggaatgtttctgtagtacagacatacctataaagctcaccgggaaatttctatttcccattatttccaaaatgtcaaattctcagatggagagttttaggtgagggctgcatagagaaggtgggattttggtctgcctattttcaacatccagaaaaaaagccaaagatacgagtcgctttatttttataatattaagtttccatctgttgggaaatatgtgcgttactctgccactcgcacccaatattacctgatacaggatgtcttatgcagtctgatcacgtggagcataaatgggtatcaaaaatactttaaagtgattgataaaaatcagcttgctttgggaatattctgtaggcctagtttgtaattgtgtttaattttattttgattaagtattctgccaggagaagcaggtggggagatctatactcatgggaaaagaggaaagcatattctggctaacagggaactagaaaatcagagtggggaagggaatcaccttgcctgagacaatagatgttctataaaattgagcttcttcatattatcatggaaatgacttttcggcagtagtgcaaaaaggttgttttacattattgttaattgtgattggagacacaaaacaatatgatcatttgatggcttatttgttattcaaaaaatgacaggttttatgtattcataaatatgaactcacttggaaatattcctgtgaatttaggagccatctaaatgtacttgcttaatgcatacactagattttaatgaagccatatgagtttatacttcgtagattacctgatggctccttgtcggccatctgatgagggaacgccgtctgcttggtgaatgtgagacagagaaatccataactttgtcagaatttatggttggtgggcagtggctttcctggaacatggtacaagaggcaattagtcttcagttttgtgtgcgcttttcatcttgtcgggagtgtagctgatagcaacagcattgccttcaccccattacatcccttttctcctcttcaagaaggggaggttgaaagaacagcaaggaaccttaaattcgtcctggatagcataaacagagtttgggcagagtgtctggcatgcaatccttttgtgccatttacagtgacaggacaccactttcaaagatgacactaactgttcagaggctttaatatgattgcctccaaatgcttgagaaagctccatgtgtttgcctggcactctgctcttttaagatatgattctattcccctctctctctctttcttggaagtgcagcatcctcagctggtaatctttaatccttgggctgcagtgatttcttttcatacagcaacacattaaacacatatttcatgcttccctgaaccaaattcagaaagtaccaattaataagttgatggggaagaggtcaacgggtagcattaaggccacctgtctggagacattaggtgcacactttgaatgaaagacccacagagagttgggaatgaagtaatttatcacacattcgtgaaggcataaaatgaggatttaaggcagtttcgaaggcagctcctccatcttgctgctattgtgattgatcccattgctctggacaaaattgggcatcccaatgagacagtgtaaaacgtctgaagctgtgaatttttacgtatttatagcttcttctgtggtgcagactgtgcagagcaaccaacttttctttcagagagttttagagagtcatgtagacttagaagttgtgaagcttccatccatatctcagagtgttctgggcatctttctatgcattcatttattcattcattcgacaaatatttatcagtgtaccatgcatactggaccttagtctagctgctgggaattcatctgtgaactatacagacagctatctctgttcgcacagggtttattttttagtagaggttatatagacaagaaacaaaataaataagtaaattatatagtaggctagaaggtgatgagggtggtggggtaaaatagcctttgtgaaattcctagagaaagctttagagcctagactgacttaagactcagaaaatcaggctaagtttggatggcgtaggaaatcattgaagtggaatgaaaagattcgaggtagggaagaaaaacaatggactccatcctctttctcttccacttttcccacagcagactataaccagtctgttaatcccccaaaatggaaagtgcataaggcacagtaggaagaagggaagaagggtaagtgttccaggttcaggaaataaccttggaaataaaacaaagagtcccctaaaagagaagagaatacagttatctatttcatccctcgttcttccagcttctcctactcccttcatttctttgtagaaatatttctgtagcattgatccaagatggaaaaataatcctgacagagtcaaggtccctgtttggccaagcattctttgcctgcccctgtccttcccttgtcaaaaattagctaattttcaagttttgcaaatttgtaaacttaattttctgttgtttctttctccaacaattctttgctgcagataatgttactcacagacccggagattgagagcagtttattgatcagctcagatgaaggggcaacttatcaaaagtaccggctgaacttctacattcaaagcttgctttttcaccccaaacaagaagactggattctggcatacagtcaagaccaaaaggtgagcatacttaccttgtttgagacaatgaagcatggttctccggggaaaatagtgctaatttaatcatctctccatttcacctcagtgatcatttttgttctgagcagtagcctgacctctgtgctaatgggacaagggaaagcaaggagagtctcaggttgcttgtttaaatcatgtaaatatctgaaaccacttaccaaataaagattaggtgtactaagtaagacatggtggagaagcagttctcagcatagatgcttaaggcagtcaggagcctctgacccccactgaattggagacagtgtcttatgtttgtggattggtgatcatttctcttggtgaaagacccatggcttttctcaaactcttaaagggaagcataaccctgaaaagtttaagaacacgaagcagggttgttctaaaacactgagagaaatggccagaggaacaataatgatgtatataggtaaccttatgcagaacctagtcatctcagaacttttcttcacttggtggtaaagttgaagaagtccacttcgtaagaaaggattaaatgagctcatggtattagctgtgtgtgtgtatatgtgcatatgacccataaaatgtcatcctataatatatattatgtactctatacgacatatatactataacatacatatggtccctgcctttaaggaacttgctttctcaggtagaataaaaggctagcaatagctaataaaattaaattaaaatgaaaagaaacagcatttacacaggcaaatgtgagagagactctggccataaaaaccagagggataattggtgaaatactagaatactccttgtgaaatgcattatgcagtgaagtcattctgagaattctccttagagggatcatgaattagaaattatataaatttaaagaaatactggacttaactaagtgaggtgaatattctggggtttcatttgtctgggtttgcatagatatgtggcatttttgaaggtaggagaatggtatgagcaacttcccaaggtctctactgacaggagcattttaaaggaagcaaattaaaattcttaagattggagttttattcatgctgcccctactgccaaataaaatgcacattaatcctaaaaatagaaagaatttacaattcatttttttttcctgttgagcagcctggctaccctttcagcagaatgtacaattttgtttctggagtcaagccacagtgcatctggtccaggatggtgcaattaacagaggcgaagcctgaccagctcagacagagtattagtcatttaatccacagggttgttacattttattcgacagttggttaattcccccccaccgatgccagaggcacagcgaggaccagatttacctgcctaagtaaaagctttgcatctttgcagttatgctggaggagatgcccaaatatgtaaccctttcgttcccagcacttcaaagagtgcctcccatggtcactgtggcagagtggatgatacaagaccagttaggatgcctgggctgtgacttcatcccagctacttatggtgaatagtatttagcgttggtttcctttgcgttaaaatgtgtttgtatggataattataattgtaggtacccttccaaagtgatttaaaaagaaacaaatgttagatgccacatctcttttaagtgccatgcatgatacagtgttgatataaaataacaatattctatccatctggagatagatgattaacacatatgagttgaccaatagtttaagagaggccacaaaggcagtgctgtcactgaatattatatacaagggactggatgaattacattaaattggtagctcaaagttcaggagatagagatctagtgatctgtctactctagaagtcttacaaaatgacttcagctggactttaatggatatgtcggatttctattgtaacagtaggggaggccaattttttacaacaggaatgtcatatacatgaaattgtaaaaatcacatttacaaaattgcaaatttttctatttggctgaaactaaaatttgttatagctagttataatttacacacacacacacacacacacacacacacactttggaacctaatccttattatttttcactgttttggctgtttgatttttaggaaaactaatttttgtttccttaattaggagccttcagaaatttgcatccagagaatgatatgtttagggctatagatttcaagcgttaatcagtagtaatatcagtataaactgtggtaatatgaggtcaaaaacaagaccagttgggatgatattacagcagtcctggcatcagatgctaagggtaagaaccaaaaggtaccctttgtgaccacagacccaatgaatcctgtcattttaaagttggaagcagtcttcatttatttgttgttgtttttctgtatgaggccaaggatctaaatatctaagaggttaacacattttctcaaagggaaaaatcactaattggtatcacatgtggatattctacaaatggggtaaggggctacctgacgtttgatagtgttctcattctttttttttttgagatggagtcttgccctgtcacccaggctggagtgcaatggcgcaatctgggctcactgcaatctctgcctccagggttcaggcgattctcctgcctcagcctcccaagtagctgggattacaggtgtgtgccaccacgcctggctaattttttgtatctttagtagagacggggtttcgccttgttggccaggctggtctcaaactcctgaccttgtgatccacccaccttggcctcccaaagtgctgggattacggacatgagccaccacgcccagccagggttctcgtttttgaaggtgatattttgagatgaacagatgggaaagagccaggctttctactgacctctctgtttctttaagagaggatgaaggataaatcatactggaaaaaacacatcatggatagccagctctacaagtaggaatcagagaagacctccgtatctcaaggcttgaatcacagaatagggagtggggcattcgctggaagggagtgagccgcagccgttagctgatggcattggctggaagtcaagttgagagggtctgtggccactcaggtgggtcagtgatacggaaataaaagctgacagtcccccatgggtcgtggaacttttagcactgatgagatgtgtggcaacaaggaggaccatgtgctggtgttggctggccagtgactgcccttgcctaggaaacaggaacatttattctttcatgtaagtattgctcatcagtttttctgtgacagctgctaatgtcactgctgcagatctcccagctaggatcttacttagtattatctctgctggatgctgttttacatcaaattgtggtgaacaatcccttagaaaatgcattattgaggtggcaattcctatgaacagggtcctcctcttttctctttttctttatttgctggcttccttgtttttttaaggcatactctccgtcttttgaacacatagccacatttattttccccttatctccctgacattgctttttctctccttcagtgcatgtgacttttaagctcctaaggacagagtttggagctccggcctgcaggatagaccgtatatgagctgcggtaccctgctctaattgtgtttcattttgggtgcctaaatcccagtggaggctttttgatgtgggcattataagggactcaaagagttttgttgaacaggtgttcctttctggtccaagatagaattttactggatatcagtcctatgggaggtcatattaagattttaaaaggtggttttaatcagggaagaatgtgtatggccaaatgtcctcagaattcacaaaccaaggtttttgatattttttgtttttacttagaaggagaaatctatttgtgatattcaacatctaggtggttgtattattaaggattctccaaagaaacagaaccaataaggggaggagagagagagaggaggggagagagagagagagagagattgattgattgattgattgattgattatgggaatttactcatgtaattgtggaggcttataagtcccaagatctgccatctgcaagctggacaaccaagaatgccagtggtataattcagtccaagtttgaaggcctgagaattggttgggggtggaaccaatggtgtaagtcctggtccaagtccaaagtcctgagaaccaggaactctgatgtctgagggccaggggagacagatggatatcccagctcaaaaagaaagagggaattcaccctccctctgccttttctattcaacacctccaaggattggatgatgcttgcccacactggagagggtggattttctcagcctactgatttaggcactaatgtcttctaaaaaaacccttacagatatacccagataagttttatcagctctttgggcatctcttagccaagtcgacacataaaattgaccaccatcatagttgccaagaggtaaatgctatcttgtctggggatgtggctatccaggcaccactagaatgactgaaaggaaaatgtgtggagccttttacccattgaaattcttaaataagtagcctgcgttcataggaaaccctgccctgagacttatcgagtaaagacataggagctggacttggcctctgaagggcctatgtgaggatgtgcctttggaaagccctgaaatcttcagaaaaaggaacattatagatacaattatagagattctgtttcaaatggacagggggctacttggtgtctacaatcccacccctcacatttttaaaacaatgaatccttgtggaaagtatgaagaattccatggcatttattataggagcaccaaaatgttgctttcttttattaatttactttttttatttctataatttaaacagtaggcaaaccaagcattctacccatttaaaaaaattctttgcatttggaaactgagcagataagagaaaggagatatagtcctttacttcattgctagctgactttcttgcctcaatacaggaaaccacccaaggaaggcttagcagaaggctgagcctgccagattacatctttatttcaatttggcaataaactagtgtacaaactgtgctataaaacattgcctccaacggcatctctcagtctgtcttaaacacctcactaaacatgatgtgttgggaaacatttgaaatgagagaaaacaaagagcagatgtgactgtaaggaaatttaaaaaaaaaaaacaggagagaagtataagaatctgtgtatacctcagctttgctgtctatgccggggtaagggctcttggagcctctgttaggatttgcaacggagacgtgatttgtaaaggggagagtgccatgttgtgaaaccaacatgaacgctgtcaggactcttgctgctgagtggctggagagcagaggccccttgctgtccttatccagacctcttcttcaggtagctccagagaagggcctgctgccccttaccaggagcaggaagggctgctcttctcctgtcctgtgcaattcccacccttgtggacgttcaagaccacgtagagcatgaacgcagttcctatacaaacaggcaagaagtacaactgaacaaaacaggctgggtccaggctgtgggaagttggagagcaggtgttcatttagaaggagggagggatattgtcaagctctagcctgctgttcttgccatgtaggaaggtgggtccaatgtcaccagaccttcagaattctttctttttttgagagaagtaattctgctttgttttcaatgtgaagttttcttatttttatgtgtgtaacaatgacctcagaaatttaaaaagaagcactgcataggacaaataaacctcatctgctgccctgtggttgtcctttcttctttcccattatctttgtttttctttgttcatgggtctctcttttgattttatttgagaagatgttaattttttttttttttttgcgattttttgaaaaaagtacattcaaataaatgatcggttttgtcgagggagaataaaacttttaggacagtttggtgggccaccctttattttgtggcagttctagaatatttgtaagtttatattgactcgcttattttggagctctatgagtccaagtaagaacatgtggaaaacttgcttcattcctgatcttctttaaattccaaaggatcacagtttatgaaataaacagaaaatcctaaggcctgtatgttggccttcccttcaacattttttggtacatatgtgtcagataccaaaacatacttttaaaggcagaaaacaggctttgatagggaggttctgtttacaaataatggaaaatctaattttttcttctttttttgagacagtcttactgtcttgcccaggctggagtgcagtgatgtcatcttggctcactgcaacctctgcttcctgggttccagcgattctcctgcctcagcttcccgcatagctgggattacaggcacctgccaccatgcctgtctaatttttgcatttttttagtagagactgggtttgaccatgttggccaggctggtctcgaactcctggcctcaagtgatccgcctcggcctctgaaagtgctgggattacaggcgtgagccctgtgcctggctggaaactctaaatattaacagctggcattctcttcagaaatgaaggctgactttcagttaaaatcatatggtgatagaaaaggaaaaatggactgccaatgtgatgaacagccaatgacagaattttagtaacatgcataaaagtgaattttattaaaaaagaactaattttagttctctgccttctttctctctctaccagtcctgcaatgtttttaaagtttcatatctattctacatgtatatctataaacatatctataaacaaaaaatcttctctttattccttttaattgttcctttctttctttctttttttttttttttttgagacggagtctagctctgtcacccaggctggagtgcaatggcgcgatctcagctcactgtaacctccgcctcctggcttcaagcgattctcctgcctcagcctcccaagtagctgggattactggcacccgcccccacgcccggctaatttttgtattttttagtagagacggggcttcactgtgttggccaggctggcctcaaactcctgaccttgtgatctgcctgcctcagcctcccaaagtgctgggattacaagcgtgagccaccgctcccagccaattgttcctttcttttcctgagtgagccttcacagaagggcaatacttatcatggctgctttcaatggcagacattccctgggaaatattgactacttaataaagaaatagatgccagcgctttcaaaatctcagtcatactaaggtttctcaccactgaccgacagtagagtgagctggtaagaggatcagctctctgctctgtcacgtcctacccctgctctgtgaccttcaacaggtcgtttaaatgtagtttctccaactgtaaagtgggaacaataataagagtacctggctcatgggactatttgatgatactgagataacgcatgcaaaatatgaacacagagcctgacacatagcaaacatggcatagatgccagccagtgtattatccaaagacctgaaagaaagcacccctggtgtggtgcagctggaattagacaaagcatgtcttaggcagaggctgtcttatccctgtgcctttccagtacgcagagctacaggcactttaatcaatttaatttaaatgcctttttagacaatcactaaaaggtcccatggaagcagaatgaatggaacaggaccgacagatatgtggtacttagaaatattattgattataacaatagaaaaccattaaatattaaagtatttatcttcacattaactctatttgttttttaatagacctagcagccccttaatgtcaaaagggcaagattgagataaagacaaattgatccttgaaattcaaccccctggggatattcaaatgatttctgcacaagcacaaacacttaggaaactgatatctacctaatgccatcatgtttccccaaggcactgcattaagttaaaaggcactcagttttttataagaaatatgttgagcattatataccatgctggtttggcaggattttcatgtgcttgaaatttcccagtgtcagatctgatttctaacctcatgaatatgtgagtaatttaagtatccaagtacaaaactggcaattagagtggaaaccagggagctcgctaaatgtcaaccccaacacttgtttataaaacgaattctcaagctgaaatgccatcatatgcaaacaaggaaggcctactacgttcaccttagatactgtgtttaaacaggttgtatcattatttttcaattgctacctggaacagtttgatttgcctgtttctaatgatttcgggaaaaaaaaatagagctacaagaataaggagaaatgaacattttaaaacaagcaattgggtttaagatttgaacaggcacaattgtgctatttaatagttttgtaggctttgaaagagaggtatttgtttgtccaaatttttagctagttcttcatctgttctatgccaccaacgcttgtctttaagaacctttaaggggccgggcgtggtggctcatgcctgtaatctcagcactttaggaggccaaggcaggcagatctcttgaggtcatgagtttgagaccagcctggtcaacatcgtgaaaccacccctctctactaaaaatacaaaaattagccgggcgtggtggtgcatgcctgtgatcctagctaatggggaggctgaggcaggggaatctcttgaaccctggaggcagaggttgcagtgagccgagatggcgccactgtactccaacctgaacaacagagcgaaactctgtctcaaaaataaataaataaataaatatataagaatctttaaggccaagattttatcttatcattttcctatatacctccagacctgaatgcacaggaggtgttcacaaatcaaactcgcccacagtcatatattggccctcccttcccaaccggctctagttccgtaagtctaatcttccaagcttcagagtaccaccctcaactgtagggcatttgacagacttcagtgacagctggggaatgggcagtgacaaatttgataaatccagctgtaggagagattggtggaaccagcaataggccatcattcctgcccagccttcatcagcaaagcctgactgttcagctttgatactcttatcttttgaccttaatgacatttggatccagtctacatcagctccccacaagtattggtaagattgcacctacccagcctggttccaggctctctttgtagccccagcttccacttcactctattatgtatcccagccaaactgggtctcttgctattgaccaaagaaatgtgagaacatcaccctgagttttgctgctctgtttatttgcacagactgacccattcccctagaacactttttctgcatgtcttcattctaagacatattaattgtattacaaagcccgctgtgaattcttttgcaaattccaaactttttctctacaacataggccactacaacactgtgcacaaaatattacacattactgtaggttgtctgtgatatcactaatacacaacattttctttgagaaacttaaatctattggggcagggttgggtgtgggggtctggattgggcatcatggctctttcactatctgctctctgtacggaacagccaagttaaagacttgtgtcagctcttagtgaagtttatggaatccttttaagtgttgtagattttggttcccctttgcatgggtcgtggccccctcctatgctgtggaaccagagcatcagaacatacttctgaggaccgcatttttctctggactgattctctttcttcctattgagggtgatggaaaaaagaacttgatatttgtgatgcctcaggcctggcattaggaatttatatgaagtccttaaggtaccatctctttcttgctaaaaaaggatggaggaacagcagtgagaagcagagagtcataaggtggatgagtgctttgtacccaggccatccccagggcagtattaggatgaggcaaataaaatagaactggcaggattttctgtcagccttttcaagaagtacaatttgcaggccccctgcttccaaaatgttaagaggagagaaggaaagaggagtgggcaggcaaccttgaaaagagccgacagcaggatgttttccgccaacacaggcgcctcctaaggagcctgtgtggaggatccccaggaaactaccccttgaccggggaagccaccgtgggaagctttgtggtgaacaacatctggtcccatgaaccaaagacttaaaacgttatcacaactcttagcttctatggaattctcgtagcacaaatttctttgaaatggatgctctttcactcatttcccagctgcaaaagagaattctatcacgtgcacctgtctaacaatctgaaaagagaggatacgttgatccgatttaggaatattgaaaagactttctagggacactgacaattgcaagcttgtggatcaccacaaggagttgaatttcttatctagtagcaagttgtcactcttctagggatttaaccaaaatgtgaatgttaaggtggaaatgaaagttggaaatggctgctacccttctctcatcccatcttcatctgctgtagactaggaattgagcaaaaccagtgcatcccattctttccctcccccaggctattttgccctgctgtggcatccctctttgtcagtgcctaccacccaactggcagctccaaagacattcagaggatggcgccagagatgcctaacagttggctcaaagctctcaatgaaactaaccctggcaatttcatcctttggaattaagtgtatttttatctgcattcttcttaaagcaaacaaagacagatggcaaggaaacaagccaatgtgaaagatgtcttaaaaaaaaaaacccttcaggagaggaacatgtcaggatagagagagaagtgctaatagccccagagtagcataatgacagtgtggagggttaggccctaaggctgctaatagatcttgagcacaggtgagtgttgggtttgtgctcattaagttgtatttactaatgcaatgtagtcacagatactttagaatgattttacacagaaaggattttctgtgttgcattcttattgcagatataaccagaatctttccctgttctctaacatttctgctccttcagttctttttcaacatttatactaatgttagctaaacaaaatcaaacccaagaatggcttttttttttttttttttttttgagacagtgtcttgctctgttgcccaggctggagtgcagtggcgcgatctcggctcactgcaagctccacatcccaggttcacaccatcctcctgcctcagtctcccgagtagctgggactacaggcaccggccaccacgcccagctaattttttgtatttttagtagagacggagtttcaccgtgttagccaggatggtctcaatctcctgacctcgtgatccgcccgcctcgccctcccaaagtgctgggattacaggcgtgagccaccgcgcccggccaagaatggcatttttaagttcatgacacggcactagtagaggaatagtgccctcctaaaactagtttaagtactctttcattctcttcctaatctttctatctttctctaagcttggcatagctagagaaagctgctgctgctttctctgatgtgacagatagtaatgatagttctcagttccgtgttctgacagtcaaaagaaaccttggagtcagagacagacagggagggaaataaatcttacttaggtgctgccaacactatgaattttattaaaggacattgactcattctacagggaaagccttccgctggtggctgagacagtcattgggtaaaatgctttgataccattcccttctttgtggaggagcactttgcttccagactctgtaggtttaattaacacgttaacttgaatggcagagttgttgttttctttttggtcggtataacaccaggctggacaattaattttttagggagaaaatgtctgaagtagtaggtggagaatatagagcaattttgtctaaaagtgaatattcaagactctgctttcaaatccttgggagtttcaaatatactgatatttatagggttttgtggatgtgtgttttatttgttttttaggtatacgcctctagttataaatccatggaagcaaaacatattcctctgataaattttctttgtacaccaattgtgaaacctgtgttctctattaggtagaaacgtgactaggaaattcacgtggtacaaaatcattatctttttcctttatcatctactgtgtttgaggcacccgtacacgtagaaggataggatttccaacatctaaaagctttgcaatctcattaaagaggcaggaagtggtcttagatattttagagtaattttagatagaaaggaatttctgccttgcatttgtgaaaggttctcttgaaaggctattaagagaattaaatataaatacgtggctggtagtttgatagcatctgctcttgttccacagttctttggagatgagaccggtaggaatcttagtaggtagaggagggttcatagaagaggtggcctttcatctggctctgaaaacaagactggtgttgaagaaggaaagtcttgaagccacttctgccagagtgggcagcctcagtgaaggcgtagcagggcatgtgtgagaaggtgacagggccagcccaccaggaccgaaagttacctttggagagagtaaattgaaagaatctcagtaagctgaataagagaggcttggtttagtggattgttttgtatacccaccacttgaggggcctctatatgctcacaaataacaaagttgctctttgaagatataaacaaatgtcatgggacatacctgagtggtccacaggctccagattcaagcttaggggatacatttaacaagagaaaaaaagaaccacaaacgctggcgcccaacaattcctcacagagatgaattctctgtgggagcaggaatagcaatcctttggtatagccataggagcacacagagtttatatattattcttgcagcatgtatatgagttcagcctgttacccagacatattattattttgaactgtcctgatacttttacatttgcattaatttttgtatgttactaaatatcgatatatctatatgacataggcacaccacaatggtatgaactctgttccctttaaacttatagaaagaagtagagctccgggcttaaaaaaaagaagacaaaggggagagagagagaagcggatactctcgggttgggtgcctgctgttgttgtacagtcctctgtgttgaaataccaggtgttcaggacatgctgagagcaagaagcaggccatgtatacactggctgtttgagttctcagttaagacagtgtgacctgtcccatcttctgttatctctatgaggggagttgtcacccatctctccttggcactcataaaatatatcaaacatgaaatgtacccaggaaaccagtctcccccaggcatgatggccaaagaatgaataataggctgggcacggtggctcacgcctgtaatcccagcgctttgggaggccgaggtgggcggatcatgaggtcaggagatcgagaccatcctgactaacatggtgaaaccccatctctactaaaaatacaaaaaaaaaaattagccgggcttggtggcaggcacctgtagtcccagctacttgggaggctgaggcagtagaatggcgtgaacccgggaggcagagcttgcagtgagccgaggtcacaccactgcactccagcctgggcgacagagcaagactctgtctcaaaaaaaaaaaaaaaaaaaaaaaagaataataaaaaagacttagaaagaaaaagttacagattctccttggctagatgcctgaataatgtgtaattattacttagataagcttacatagataagctaggcttatttatatcttgtccctgtctatcttaccactttaactcatgttgttccttttgtgaataatgctatttttgtccatttgaatgctgtcattcgttcaggtcccagctgtttcaccacagcatctggaaagcatccctaaattggctcctgtcttctgcattattttctcactggctgcctcgtgcatttctcattatgtgagccaggttcaggttacattgcgtactcttccagaaccaggtctagattttgcacttctttgcatcacccacaatgctcagcacatgctaggtcaagtggcacagctgactttatcgccaggcagaacagggtgtgcattccagttcattcaaccacttctttgacatgtaatttctcacaagtcggttaatccttctaagcttcagtttcctcaactgtaaaatgatgatattagtctgacttgcagaatttgtataaggaatagagatggtacacatggagcactcaccttgtatatggcaggtgttcagtaaatgttgggtattattattattactattgatccaatgaactgatgtttgtgtatttgatgtactatagaaccatagtgctgagtaatttctgttctttacagttatacagctctgctgaatttgggagaagatggcagcttatccaagaaggggttgtaccaaacaggttctactggtaagtctcactttatcttgtagcacattaagatatgacctagtcagatatgacctagtaaatgcccattggaatcttgttctcaccagtgctctcacataaggtctgttcttattgggacatgcccacatcccctcagggcaggatgtgacattagagtaagaaacactttaagagaatgttaaaaaatgtgtcacagtcttcttgaaaaacctcaaatggattatggaggttagtgaactgcaggggctttatgagaattgctttgttatattttggtggaacctttgagacagacatttaaaaaaatctaatagtgactttttattattaaaagcattatatacacatatatcgcatattcagatgaagattttcagtctaaataagtaggttttatttagtctaaaagtagatcttcctctcattcctgattttagatcttgtaggccttctccttgttatttatttatttatttattttagacagtctcactctgtcacccaggctgcagtgcagtggtgcggtctgagctccctgcaacttctgtttgctttgttcaaatgattccccttcctcatccttcccagtagcttggattataggtgcacgccaccatgcctggctactttttggatttttagtagagatggggtttcaccatgttggccaggctggtcttgaactcctgacctcaagtggtccacccacctcagcttcccaaagtgctgggattacaggtgtgagccagcatgcctggccggccttccccttgtcatgtgggacacagttgctattgctagtttctcaattatctttctagaaatgttctgtgaattgccaaatgtgcgtgtgtgtgtgtgtgtgtgtgtgtgttagtgtgtgtgtgtgtttgtgtgtatgtagtcttactttgcttgggttgccgtaacagaataccatagactgggtggcttaaacaacggatatttattcttcgttgttctggaggctggggagttcgagatcaatgtgccggcagatttggttcctgctaacgactccctttctggcttgcagatggctgccttctgtctgtgtccatacatggtagaaagagagagctctgatctctcttcctctttttttttttttttttttttttgagacggagtctcactctgtcaccaggctggagtgcagtggtctgatctcagctcactgcaagctctgcctcccaggttcacgccattctcctgcctcagccacccaagtagctgggactacaggcgcccaccatcacgcctggctaagtttttgtatttttagtagagacggagtttcaccgtgttagccaggatggtctcgatctaatgacctcaagatccccccacctcggcctcccaaagtgctgggattacaggcgtgagccatcacgcccggcctcttcctcctcttatcagggcattaatcccatcataaggaccctatcctcatgatctaagctaaacctaatcacttcttaaaggccctatttgcaaataccatcacatcatagtgggttatggtttcaacatatgaattttgaggagacaaaaatattcagtccctaacatatatagatagagatacttgcatttacataaatggtagctgtgcacactgttctatgccttgtttttttttgagggatgcagtttattatgcatatatcattatttttagttaactacatatcattttgctctaaaaatatagattggaggtaaatcttatgcctaattaatgcaaaacataaactatatatgttagcgggaatctgtgtatgggaaaagagaaatacgtgaagagagagagaagggggcagcaagagaaagaaagggacaaaggaaatagcattcctttctttaactgcctcagttcatccccctaattaaactagaggtggctgtgtccatgggaatgggtgggtaaaattgaaaacaagaaaaatatcagaagttaactgtggcttttaagtttccaagatcttagattctggcaaagtaagaacaaatcacagaacattctagtgtgattttgatattaatatttatcaatacctttgaatgtacatcctacctcctgccaaaagacgtgattctaccttaccctaatttctctaatctgcctgtggaaaagacatttaggttgtttcaagatttttactactataaaccgtgttacaaggaattggctcagacaagagtttaaatatcctttattcatgtcatttagaatcactgtgacagtgaccttttaggagccaatgatctccctgtaatgagggcagtgaaagtatctcctcttgattcctcctgaaatcacactgcctctcatcagcctttagagttacaggcagaatagatcaccgaagtacataatagcttcccacctccactccaattctttcgcttttatatgaacttctaagaggaatgcatttttatctttctcattttcaaacactgccctaaaacccctgtgggagttgaaagccagagaactacattagagaaatctcttaaaaagctagcaaaactgcctgaaaaagttagacaagctatttgcaaacaaactggctcagagataacacagggacttctatatggtaagataccactttttcccctatcataatgagacatttgtaactaaaggaggtttttgttgcacagaagcttatttacctctctccctctggtgctcttgttcaggatgctgtgagccttgcttctaaagtccaaattgacatcttctttctccaggatctcaactctgtctcttactgaatcttccttctctggtcagcgtttttttctccctctcttactaattttgtatcgtattcatgagaaaccttcatctctgtgtgttttacatgtaaagtataaagttagtttatggaagagagggttcatgtctttttctttcattctctccctttttgggggtgttatatgtgcatagaaaggcctcagaaagtaagcaaatgaaggactgaaataaatgaatgttgtccccctagtttatcctggaaatggagttgctgctttgctaatgaaaaagcatgagggacaaatcttttctcaagtcctactttcaaatgactgcaaatatctgtacatggtgcccagaactagagggtaggaagtagggcttggcagaagttggttcctaccaatagaaacaatgaaaaatattgaaaggatgggcaagagaaaggaactgagatgagaacacttcccatgtaaatggtacatatatacagtgttttctatgtcaccagaggtcttatttatgcattattataacctgaacagacctcaccactgcttccgccagtgctaattgcaatattttctttcctattccttgaagaaggaatcttctatgtgaaagcttgatcagcaaagctcttctaatcaaaagccataaaattatttttataaaagccattacacattattgtatgtgaattctgattgatgtgttaagtaaaataaataaaacctccttcttttgtttttgaatacagacatatcttgcccattcacgtcttagtagtgcaacaagcactacttaaacttaagctatttaatcctcataacaaccttctgaagtaagcttctcattatcatcattaacagatagggaacctatggcatagagaaggtaagtaatttggctaaagttacccagctggaaagtgccagagccagaatttgaatgaaggctgtctgtcaccacagtctgtgctctactaaatcaacaaatgctcttgtctctgcctcttagccttacgttcttggctgggactgtgagccctggaaatctagcccactcaggcatatcagtggtgagagcccaaagttcttttgaccacagtgccaactgtgcttgtcaaatggctcacaagggttccttaagcttggatgatttttctagagaaggcatgggaactcgtaaattgcatagtaccatgactgttgatgaaaatctcggtctctgcccacatggtctgtattttctaactctgagcaactaccttaagctgacagaaaagttgtcaatcaaagcaatatttattagactcacttctggaaaccagttacttcaaattatgtaggaactatggggctatctaggataattcagcaagcgtagttaaaagaaacctcctttaatcatttctgcttggaacctggctattgggggtgtgtatgggactgagggagatttctctagtgttaaatcaaattgttaagttaccatgggtaataacatagaatttccctagagaagaaatgaaggcaaattcatattttttcctcatcacctaacatattgataattatttttatttctggtagcaatggtcatgccacccctggaagtaataaatagcaattgtgaaataattatggcatgcaacagcttattcttacgttatcacagtggtttctgataatgttaccaaagcactggaggtttggtcaagaccctactgcacacaaagccagtcactgagacagcaagtattgccaaagaagaaggctttaatcaggtgctgcagccaaggagacgggggctcagtctcaaatccatctccctggctaaaagtatgggtttatatagcaggaaatcaatgtaacagggtgtaaaacaggaactagggaggggcaaggaggcatctggttcatgatctggtgagtttcagttctttaatactttttttttgagaggcttgaagatcctttcctgaggaaggaactcagataaaacaaatacaagtttcaagctttaacagcagaagggtcaatttctatgtttatctaaaagaacagtgtatgggagtattgagctggttttattaatactaccatagcaaccataaataagaactttcctccaaggagttcagattgtttctaaaactgacttacatatataggacatcatgtaagagacagcataatattaccattaatagaataggtgtccttttaatttaactgacagcaacagtggtcttgttctttcctgtgctggaaatcaattatattgggaggcagtacaacttgcaggtcaaggggttcaaggacactgaggtttactttctagcattgccatttactaagtaaaaaaatcatggggaagttacataacttctgtgtgactcagttttttcccctgtaaaataattaatacctacttcatcaaatgagatgcttcttgtgagttggttacatgccttgtgcctaagaaccatattgaatgcccactggctaccagtgttaatattattcatatctatttctatctctattagttttgtttttctttgtgttgtcttatgatcaggtttgctttccccattttgtgacagcagtggacactagcagctttaggcttacttattttatttatttttttttttgagacattgtcttgctctgtcacccaggctggagtgcagtggtgcaatctcagctcattgccacctctgcctcccgggttcaagagattctcctgcctcagcctcctgagtagttgagactacaggcacaggccaccatgcctggctaattttttgtattttagtagagacggaatttcaccgtgttggccaggctggtcttgaactcctgagctcaggcaatccgcctgcctcagcctcccaaagtgctaggattacaggtgtgggccgccatgcccagcctaggcttacattttaacagcttagaagccccatcaagccagtctgtctctttttctctatttccagggattgaatctgagaggcctggcttggatcaaggacatacaagataattcattactcatgtaggtcagacacatatctaccccaagaattgaaatacagtctggggttgagacctaatcaaactgcatggttcaaggttggaggaaatgtaattcctaaaaagggaaaaaaagacacacacacacacacacacacaaagattatgttactgtaagggaagatgggttttcttcttagggaaaaaatatagagatgggagaactgagtgtcataaggatataattccatcaggggatttatatttgttgagtaactacattggtctagctagccacatgataatcatgctatttgatcctcttaacaagattatatggtagcggttattatccccattctgatgaaacagaaaagtgaagtgatgttgtttatccaacataacacataatttgtaacagccaggttttgaaagatcagttcaaattcaagacttactcccttctcatcctccaataaaagacaggagaaaaaactttaaattttgaaattgtattttagtttagcacttcagtaggtaaaagctaaggtgccgcatttgacactgaacaaagaacatggtggtggacgatcagtggtatccaaatgccttaaataaggaaacctcctgccaaaagccaaattctctactggaggatggtgagtgtggtttgttaggatctgagtcaagtttagtataaagcaatggaaggcatttctcattagaaactcttcagcaacctattaattatgcaaaagacaatgcaatcttggggctgtttcacttaattaaaaataggttcagccttaccttattgattatgttgctctgacatacagacagctggcttgaaatagggacagctgaatggtgatacatattttctgtgactaattcacacatggaaaatcaagagctgactcagcaatgaacctttgttattttggaatgccagctatgtttcaaggatgtccctccgggagttatatgacatctgtattatatagcagaaggataaatgtttatccttatgctatactcagtgcatttcagcatgtatacacattctcattcttccccacagttcaatgccagtcaatgtgaatgacttcccattccccatctttttcaacaagtcccatttgttgagcatttactgtgtgccaagccttgtgctaagtattttgcatatatcgtttaaatcaatcctcaaataattgatgtgaaatagtttattgatcaagactctttcaagatatgtgatagaaaaatgcatcctgttttaagaagaaaaaaattttaaagagatattggcttatgggtctggaaagtcagaaggaactttattagactccactgtatccataggcttcttaaaggcataagagcttgatctctccccatcattccactctcctttcctctgttttagcttcacttgggcaaaatatctctttgcagtggcctctagaagcttctatcttcccaattcactccaatgttaaagaaaaggacttcttgcttgttccagaaaaactcctagcattaaatcttatgggctctgattaggtaaaatgcccatagatagacctcgggctagaatcaactttactaaaccacatggacagaaagtaaggaatatgatgccccaggagagactaaggtgcttttaccaaaagacgtggggaagataatgcgaaggcatcaacaagaggtacccattatccagagatgtttcagtcctctttttcagaggagaaataaataaggtaaataaataaacacaatcttatataattttgcctaatgtttcccactagtagacaatagtaatgaaatttaaacccaggtatgtctggctagagagcctgtgttatctgcacactatgctataatctacctccagtgtatcttcatggcgcccactgtgctatggaccaataaagtctggcttttgagcttgagttctcttcttacgtaaaactcctacactggcagatactttatccatatccactgggcctcaccgctagtccttgaagtgacttttttttttttttaatatacctggcctattatcgctgccccaaattttctcctctaaccttgagtatcaaggctgacacgaaagaggcagcttcataaacttttgctaacatacctgtccatgatcagaaaacactccagaatataaaatagcctctctctctctctgattctgactcgtatcattaccattcattctcaaggccttgttgaatattgctgccgagccaacttcaggtttttatccctcttattattgtttgatagtttgttatatacacacgaggtcaccatggccattcctcttcctccttcagatataccagctattcagcacagtacccctaagacttctctaagccacccacaccaaagagacttagagaatgtggcgcgagatggctgtaactctttcctcttcctgccccctggtgaatttagtggattcagtaacaagagactgagcctctgcatttttccttctccaggttctgcaaactggaaataggatgaagtctaaaaaggttacaaaaaaaggagagaaagagcataaaactctattagataaaaatgaccagatataccgataatatattaggaagggggtatggctttttttttttccaagatactctgcctcatctcttactcaaagctatgaagcaggtcactgtctgcaaaaaacttcaaaatgaataccatcactcactttcaatttatgttgcggtggcagtggaatatcttaccatttagaatcagctttttaaaaataggcttccatatttcctgattcctcatatcccagtgtgaatactcttgggtcatatttatctctgctgtcttacctcttcttaaatatgtggatttccaagttgtgtcagttcttccctcatagtattatccctgcccacttcctcccccattctccttagcattaccctggtttagctccaccaccaacaccccaatgagaaataatgaaaaagcctctccattcatcttcctatatcactgcccaaggactcttgtgtctccccaatcaaatatttgtctcattcctcattgtttgcaacataaattgaagaggaagaatctaactaggttcttgccattgtggggttgaatgtactttttctgacctactacccactctaattctgtatgctaaattccaggagtccaggtaagtaatagtaagcactagtaagtctatggatctgtcaatacttcttatatctgtccttatttattttagcaatgattaatttttagcacctattatgagccaggacagttttagtctttgaatacaaagatgctgtgtgaggatttttgtcatttattaggatcacagtggatctttctggccgtatacgaaagcccacctgtgccatggagccttctttagttcttcctgcttttggggacaaaagaaatctctttcttctctgaatttaaatgtgatgatgtcacagataaaatgtaatatatcataccatgtaccagattgcagctctatatatgtgattggtaggaaaagcatggatttaggatgaacatattcaggtgtaaatttctagctttactattaactaactaggtgattccaagaaacaatttcacctgcccaagcttcaatttcctgctacaaagtcttatttttagcattaaaaatgacatattatcattattaccattaagtaacttagcacttagtatgttctccatatatatttctttattgtcttcttttcatttccttctagaagataagttttttaaggttcaaggctctgcctttaacatatttctatcttgtgtactacagtaaatagagcagcagaaacttgtgcatacacacacacagggtactaaaattcatcagatttacacatgcttgtacatgtacacatgtaaatccatcaacgcagagactgaaatatcttgagtagacctcattagttaaattagagagctatagtaggtaacctctgtatttccctctagcatgaaaatgccagaattctaaatcactggagtatatatattgaaggaatgaaaattttagatccatgaaaggcacacttttccatgcactaggctatttattaactccttaggctgtcctaaggagtaatgagatccctgtaaccagagaaattcaagcaaaaacagaaagactcatcctagactgctctcacagtgcgagcctgtcctttactgctgattttgacaggtcttgatacatttcagaatatggagttcaggagaagaactcagaaagcccttttctttgagaatggactttgttcgctcttcttttacactttccctaattctctgaggcagtctcttctaattctgagcccctgccctctgagtagaatcctgtatggtttggataaggagcagggagaagtggcagagaatcttcccagagatcccttcccaaggtctactgaggcgtttctagtgcctgcactaggagtgctagataagaaaatttttattaccttgagaggcgtggtatttcttcttctttttttattgttaatgatctccacatgaatgctgcttgctaacgcttttgcacctcctccgcattttttttttttttttttttttttttttttttttttgagacggagtctcaccctgtcgcccaggctggagtgcagtggcactatctcggctcactgcaacctctgcctcacagtttcacgccattctcccgcctcagcctccctagtagctgggactacggcgcccgccaccacgcccagctgatttttttatatttttagtagagagggggtttcaccgtgttagccaggatggtctccatctcttgacctcgtgatccgcccgcctcggcctcccaaagtgctgggattacaggcatgagccacagcgcccggccttttctttttcttttctttttttttttttttttttttttttttttttttgagagggagtctcaccctgtcgcccagtctggagtgcagtggtgcgatctcggctcactgcaagttccgtctcccaggttcacgccattctcctgcctcagcctcccgagtagctgggactacaggcatccgccaccaagcctggctaattttttgtatttttaatagagacggggtttcaccgtgttagccaggatcgtctcgatctcctatctcgtaatccgcccgcctcggcctcccaaagtgctggtattgcaggcctgaaccactgcgcccggcccctcctccacttcttaatcttttcctgtgattagcaagttttaccttcaaattaagttaaatttccccttctgcagtgtgagcccatcacttttcatgcgaccttcattcactaatggccatcactgattcctgtgatccttatcttgatgatgcctgtccccataggctgcagcttctctatctttgaacaatattcagtcacttctcgagacttcactaagaattcctatgatggcagaatgcaagtgattaccatgagtgagggtaagagggaaaaaaaatcctcataattgtgtcttcttaatttataattttattaggaggagtttacttggccctagtgatcacacctcacttagctttcaaattaagggcctctaagtttgcttcacgtctttgtatgcttatccttgttcattcaatcatcgattttgaatgttgcctttagtcaataggagatggtgtttaatgtgtaaaaattggagttctggagtcagaatacctttgccagaatcctgttttcaaggggtgtgacattgagctctttaattaacttctttaagccttacagtattcatcagtaaaatggtcctcataagagtatcttcctcgtatactcattgtaaggattaaaatgagatcattcaggttggttacatatgtgatgagtaaatgttaactgctgctaaaaggaggaatagggaagagttggatattaatgtgtttctgaaatgtggcaatctcattttgattcgattgaataatttatattttcaatgggaatttttaatgtgtgcatgtattttacttctttgttgtccagaatcaggaacagtggatagaaaatcagctgaaggttttatttgtagcttctcaattttatattattcaactcatttaattagtttcaatggagtgattttacaggccaaattctggccacaaagatgtaggaaacacagttccttccataaaggggcttgcagctgcttaggtaggactgcaaagagaatgcctaaggaagcatatggaaggatattttccctgcatagctactgctcagtgagtttgcagccaagcaggtttggggcctgaggtcacaaggcgggcagtctcaagtaaaactgggcatggaattgggaagagaagaacaaggacaaactagaacctgtcgggacatctgcatctgcctctcactacctctaactaaaatgagtcttggaaggaattgactgcgcccctttcctgccttccaaatctcatatttcctattggtgaattgtaatatgaaaccttacagagactctgagaaatatagttcaggcagaagtaaatcacagtctatcctttgaaaacttgtcacctgtgcaggtattttgaaaccatgtataactcccaaataaaagcaaaagcaaaattatgcttctacctagcatgatggcatttctgttcctccataacttaaatgtgataaataactttccccaaaatgaaatcatttgtgtatgccacattatgtatatttaggtaatattcctcctctggttgagtcatgcttcccctttctatatcctgaaagcaaaatgctgagatgtaggattagtcaatataatcaatattgacatattttctgcagaaaacataggtaaatgtgggagaagaagacaaaaggaaaggattgttacacacactcacacacaggtgtaagaagaaattgaccacagagcagagacagcaaagtgcctagaacagttggtggcatgtaatgttatcataaagtctaaattttcatcaaatggaggtgcattattattttatgtatcagcaaaaaaaaatgctgccaattaaactacaggtatatctaagatatattgtgggtttcgttccagactagcacgaataagtgaatgttgcaatattcttgcatctcggggaatagggaggcctgaggagagggagagagatgggggaatcgctggtctgtggagccatcagaacacacatgccattaagtttgcaattaagtttgcatcaattaagtttgcagtcttatatggttgttgtttgtggcactcaaaaacaatcacaatagtcacatcaaagatcactgaccacacatcgccgtaacagatgttataatcatgaaaaagtttgaaatattgcaaaaattagcaaaatgtggcacggagacatgaagtgagcacgtgcttttggaaaaatggcactgatagaattgctgcatgaagggctgccacaaaccttctatttgtaaaaaacaaacaaaacaaaacaaaaaaactcagtatctatgaagagcaataaaaagaagtgcaatcaaagtatgcctgtataacatttgaacaatcataagatacctactgatgtacaagatgttaaaatgagaaaaaatttgcattttggaatggatggaagaggtgctcaataaatattttctgagtgagtgaaaaatgtaggacagatgatgggaatgaggtggcattatttattcattttatttattttaatatttcaattgacacgtaatagtacatatttatgggatacatatatatatagttatcggatcagagtaattagcatatccatcttctcaaacatttatttctttgggctgggatcattctatatcctctcctcttgctattggaaaatatataatagattattgttaactgtagtcaccctgttgtgctatagaacacgagcacttatgcttcctatctatctgtcatgttgtatctttaagtacattttcaaattgaaggttaaatagggttgtcatagtagataactaccgagatgcagaatgctaaattcaagacagaagagtagagaagacccaaaaactgaaggttgacttatttgactgagcacaaaagaaaggcagagtagatagaggaaaattctaaaaccaactgtaagactagtgaatctatgtaggtgatgagccctgatgtatttatgcatcggaatctcaggatcaaagataacttagaagacatctcatctgaccccctatgacttgcaggaatctcttctaaaaaatgctagagaaatggatggaaacatcattttggtttgggaatggaacttggtctgtctgtcaggatctgtcttcctctaaagagaataactagaggaaatggagctgtcccactattttttattgttgactctggcacttaaaacatcaacacctctaaacaggacaattctataatttagagaaagctgtcaaggttttcacaggcatggcaagatgtgccctggggtgagggacagaacctgcgtttatgagatttatggtaaagggttttacatgagtgctgaagtttaaggcagctaaatcccagaagacaaatactaccaataattgaattacaaagccattatcatgtgctgaacagagcaattttatgactctattgtgacaggatgaaacctgttagaatatttatgcacttgggatagcttctgcttcaccatcccagggaacaaaccagctcttccattgccttctatgatcagttggccttcctgagtaattgagtagtcaaggaaagcgagatgcctaagagagaggaatccaaaagagacatagcagacaaccacatcaggcacaagcctcacatttgacctcacatttcagcagctcctggacccaacatctttatgttgtcatctgctatcaggttctgtctgtggtaaccagggaagcccaagaataaataagaacgctggctgtcagcattgttttctacttatgaataaatcaaaaataaaaacatcccagaaataagagccactaaaacaaccttaacacttttttgaaaaatgaagtagcttaattattttgtgattgtcgaaatgcctgaatcataaatataagacagctgaagtgatacagttgtttaccttctttaatgacagtataaccagtccattccatgtgatgaggctgacttactgaatagattactttcctctttgtaggaaattgtggctttgctctaattcatgtccttaataagatttgggcataggatttttttcctcttttatttaaaaataattttagaattgcagaacaattacaaagataatacagagagttcccatatcctattcacccagctttacctaatgttaacatcttacattaccatggtgcaatgtttaccaataaaaaattaacattggtaaaaaacagtgaactaaaatagagactgtctggttttctccagattttctactaatatcccccgcttttttttttcctgacccagggtacaatccagaatcccaaattgcatttatttttcatgtctttttagtctcttcaaatccataggagttcctccgtctttccttgtctctgatgacctggacagttttgaagagtactagtcaggtattttgtagagtgcccctcaaattgggttagttagtctgatattttctcatgattacagggttatagattgttgggaagaatatcaaagaaatgatgtacccttctcatcacctcatatcaaggagtacaagatatcaatatgtcttattactgatgatgttaactttgatcacttggtgaagggggcgtctcccaggtttctccattgcaaagttactttttttcttgtcccgtactctatttgttggaagctcccagatttctccattgaaaagttactctttttcttgtcccatactctgtttgttggaagcaagtaactaagttcagcccacactcaaaggaaggagaattaagctctaactcctggcaggataagtatcaaaaagtgtgtgaacatatgttaatataaccagaaaattgatcaagattttggagagatacgttgagaacatgcgttttgcctactatagtattcatagccaatcttgcctacagcaattattactgtagtgtgctaatgaaggtgaataagctcaattctagattgtgttttgttgtttctttttttctttttctttttcttttctttttttttttttagacgttgtctcactctgtcgcccaggctggagtgtggtggcacaatctccgcttattgcaagctccacctcccaggttcacccattctcctgcctcagcctcccgagtagctgggactacaggcacctgccaccatgcccagctaatttttgtatttttagtagagatggggtttcaccatgttagccaggatggtcttgatctcctgacctcttggtctgcccggcctcccaaagtgctgggattacaggtgtgaaccaccgcacctggcccttattgtttctttactaatatctctttctcactttaggtgtccctctgccctggctctgagctattgtcaagaggatccctgttgacctactaattaagggcaagactttttggctaataaactttttgttggtctttttttaaggagcattttagagtctgacctggaatggagacgtcagaagcaaatgcactttctctgtgactgattttcttggttgaccatggaggtggggttctcacccagtagttctgagctttcctctttgttcagttgggcaactcacacatcttttccaaaaggaagatgttatacacatacacacacatgcacacactcacactcacactctgttttaccttttcctgtctctcctctgtcttaaccaaggaaaaaagcaagcctggctgctcccaaaaacaaaacagacctgtaagcaggctactaacctctgtgtttaagtcattttaattcccaaaacaaagaatgaaggttctaaattcaccaattaaaaaatacatgaaaaatatggtatagtcataaggtaaatattctaaacattgtaagcactcttataccttatggacttaaactttgtgggtaagggaagactacaatatctcctcttataacagttgttcctattgaaaaactagagagattagagacacatacagatatttacctacaaagatcatcagtgcagcatcatgtctaaaagtaacatgatggccgggcacggtggctcaagcctgaaataccaggactttgagaggccgaggtgggcggatcacgaggtcaggagattgagaccatcctggctaacacggtgaaaccccgtctctactaaaactacaaaaaaattagctgggcctggtggcgggcgcctgtagtcccagctacttgggagactgaggcaggagaatggcgtgaacccaggaggtggagcttgcagtgagctgagatcgcgccactgcactccagcctgggtgacagagcgagactctatgtcaagtaaataaataaataaataaataaaagtaaaacgatagatattaccaatactctgtgatcagaaaactagttaagtcaactatagaatattgtacggctggcaaaacagtgtgttctaatattacatcgtgtgttacgctgtgttcgtgatatgatgcaaaagtcttaaaaagaaaaaggagtgcctacacgaacactgaaaaagtactgaaggattaacagcaaaatattaaaggtggttaattctagatggagggattgtaagaatgttttagtttccttttttttacttctgtatacttagtattatattttcaatgaatacatactccttttgcagtcagatttttcacagcggtgttatttttaaagcatgctatttaaataaattatacaggccgggtgcggtggctcacacctataatcccagcactttaggaggccaaggtgggtggatcacttgaggtcaggagttagagaccagcctgaccaacatggtgaaaccccgtctccactaaacatacaaaaattagccaggcacggtggtatgcacctgtagttccagctactcaggaggctgaggcaggagaatcacttgaacctgggaggcggaggttgcagtgagctgagatcgcaccattgctctgcactccagcctgggtggcagaatgagactccttctcaataaaataaaatatacaaataatgataataataaagcagtcaaacatatttccagatggatggtggtgtggtgggactggtggcagccaggcagcaggagggcatggtgacccctgtggaatagtcatagcgaagaaagtctcctctctctggcttctctttcctccctttctatcctcattctgtctccaatgccttcatttgcccttctcattctcctatcctctctttcccatgttctcttttactccctctctttccctttccctcctccacttctctcttttctttgtcacattgagatattttcaaaaccaactttaggaattcacatccatagtggactactgatttaaaaacagaccccaaaatgagataaattaagaggtgtgtttttctttttttgtcatcacactagtttccttggccaaggagtttacatgagttcaaaagcaaactggcacagcctttaaattattttcacaaaatagcttccctgtctttgcccagtttcaaatcccttcacaccttatactcagaactccagaaatttttcatcaacaaacaaagtacaggtagtacagccctaatttgaaaatccccaaccataaatgctccaaaatctgaaactttttgagtgacaacatgatgtcacaagtgggaaatttcataccatacttcgtgccatgggttctggtcgaaatgcagtcacaacttggttttatgcacagaactaataaacgtattgtatgaaattggccaggcgtggtgactcacacctgtaatcccagcactttgggaggccgaggcaggtggatcacttgaggtcaagagtttgagaccaacctggccaacatagtgaaacctcatttccactaaaaatacaaaaattagccgggtgtggtggcatgcgcctatagtcccagccacttgggaggctgaggcatgagaatcacttgaacccagaagacagaggctgcagtgagctgagattgtgccactgtactccagcctgggcaacagagctagactccatctcaaaaaaaaaattgtgtaaaattatcttctggctatatgtacaaggtgttataaaacataaatggattttgtgtttagacttgcgttccatccctaagatatctcagtatgtatatgtagacattctaaaatctgaaaaataaaatccaaaatctgaaaccttctggtcccaagtacttcagataagggatactcaacctctgctaaggagagcagttgccatttcgcaccccaggaattgcctctccaatgaagatcaatctaatttcctcctatatctaacccaattctattcttactcccttccaagctttactgactggatctcttttccttctcagttgaagtatttgagggcaatagcctcttagtgtatttttgcagaagtaccaatacccaaccataaagcaagagaagactttgtgtcataataatctgacgaagtatggaaaagcgactacaaggatagctaaaccagccttacctacaggccaggcactgagctgtccgtgtaaaaactgacactgtgttttctgagaagggagagaatgtattagtcattttgcaagtgactgcaaaaaagccaccttcaaacttagaaaccctgctatttaaggtctaagctgaagaaattaatatctagtctgtttccaatctctgggacatgggacccctcatatatgtctaggctcatgtatgccaatacacttaacgcttgcaggatgttgaaatgtcaggattttccattctctctctctctcactctctctctctctatatataattattattattttttgagacaaagagtctcactctgtcacccaggccggattgcagtgacgcaatcttggctcactgcaaactctgcttcctgggttcaggtgattctcctgcctcaccctcccaggtagctgggattacaggtgcatgccaccacgccagctaatttttgtatttttagtagaaacggggtttcaccatgttggctaggctggtcttcacctcctggcttcaaacaatccacctgccttagcctctcaaactgctagaattacaggtgtgagtcatcacgtctggcttctccttatctttttagtgtgtaagacacacattatcttcctagttaacactgtcttgcctcagacactaaggggtaatttttttttctatgaaaagaattattgacatgagttaaggacctgggttagtaattccaaccttgatacactctgagtggtatgactttggacatggtatttgctctctggaagcctgggctttcttaattgtaacaggaggtatttgaactagttaatctctaacagactttctgtccctaaaggattccttgattcatactcttgacagtagtagtagctacacgtatttcgtcttttacctttcacaacaatcgtattattcggtactattatctctactcttttttacaggtggtgtatagagccctagagaaattagaatgcctaggttccagtctgattgtatcttttattagctctatgcccttaggcaagtaaattgctttcagagataacactgtctttctcttatcttttcattatttttcctgaatttgtgtcatgtatgaattttctaggcacacaacatgtattttcacccaagttgttgacaattgatgagcaggacaccaacaagagcacagccttgtggccctatatgacatcaatctcacacttaatagatggaaaccagccattgattgacaccggggaacaatgggtttttttttctgatggagctaaatgccttgtattttatatatttttcctcacacagctttcaagaaatgttatgagcatcacctgacatgtttatttttaatttctctgtgttccatattgaattgtaagcttcacaaggtacagggatttttcttttttattcaattttaaacccctaatgtctagaactacacctagcatttgtagttactcagtaaacatattcaaaaatttatttatttattcattaaaaaattaattcagaatcaaccatctgccatgcctggtgttaaatattaaggatatcccaggaatcctcagtttagagcaacagtctccatggtgacttacctgcacccacaccctaggggggtaattggtgattcactgaggtgtgggaagaagatactttctgattattctttgctccgattttagtttctattttgtgtatattttctaaagttagtatgtaagtactgtactgcatttccacaacttatatctaataaaccatcatgtattgggggtgcctaatttcccccccttgcttgatgtgttcaaacaaaacatgtggagatagctgttctggaattctcttatagaatatcatttccatggggtcaggttatctccagcagcaaaatgctcaggtttaaattttctttttttttttttttttgagacagagtctcactctgtcgcccaggctggagctcaatggcgtgatctcagctcattgcaagctctgcctccgggttgacgccattgtcctgcctcagcctcccaagtagctgggactacaggtgcccaccaccacatccagctaattttttgtgttttttagtagagacggggtttcaccacattagccaggattatcttgatctcctgacctcgtgatctgcccgactcggcctcccaaagtgctgggattacggcgctcgccaccacacccagctatatatatatattttttttgtatttttagtagagacggggtttcatcgtgttagccagatggtctcgatcttctgacctcgtgatccacctgcctcggcctcccaaagtgctgggattacaggcatgagccaccacgcccggcctggtttaaattttcaattccttttttttttttttctttttgagacagtctctctctctctgtcacccagactggagtgcagtggtgcaatcttggctcactgcggcctctgcctcctgggttcaagtgattctcctgcctcagcctcttgagtagctgggattgcaggtatgtgccaccacgccaggataatttttgtatttttagtgagatgaggtttcaccatgttggccaggctggtctcaaactcctgacctaaagtgatccacctaccttgaactcccaaagtgctaggattacaggcatgagccaccatgcccagccaagacaatgacagttttccccaggggaagagtgggccaaactctggactttcttctctgaatttccatcttctctcagtttttggcctcatgattcttttatttctttgcttggtctcttattacttttaatatttacccaacctttctgatcatccatagtgagtctgtagttcaaatacctagtccactaaccttgccttttaaaacaatccctggctggccacagcggctcacgcctgtcatctcagaactttgggaggccaaagtggacagattgcttgagtccaggagttcaagaccagccggggcagtatagtgagaccctgggattacagacgtgagccactgtgcctggcctttttaaaaatttttaatagagatggggtctggctttgttgcccaggctggtctcaaactcctggagtcaagcgatcctcccatctcagcctcccaaaatactgggattacaggtgtgagccactgcgctgagcaattcctttaaacttatatttgttctaccctctagtctgaagttctttgtccttaacagaaatggataaagagaggagaagtggagaggttctctcttctccctgtcttctgtcactgtggcccctctggccccacgcaggatctccagcctccttcctctcacactgattttaacatcaacacaagcacacccctccaggaagtccttagcactgcttctctgaccacaactcttctaggctttcaccttcctggccctctcactaagatggtgtctgacttataagtattcaagatttgagaaaatcccaggtctcctccctacagaaatgtcactcatccttttttctctccctttgtgatttgctcacatttactacccacttagattttattttccagatggagaatattttctttttattaatagtacagctgtattaattattagacaatcgcatatatacatcttccttataaaagttcttaaattactgataaagataaggatccctttgactattacccacaacccccaaactctaccaaaagtgactacaattatgaatttttaatgtgtatctccagttttttcttccccatttatgtatattttttctttgcgtccatcaatagacaacgactgaaaaaatcggatattttcatttaataggttgcaataaaatagttagagatttatctcattaattttttgttctggtatggaaccatctccaagatatattattgagtacatttaacaagttgctaaaaatatgcagggtatgataccactaaagtttaaaaagataaaaagaaaccttattaaaaatattttaagcttttcctttaccttaatctcatgctctttttgatcagttgaagtgcatttctctgtatctcattggcactgtgatttttgtttggggatcaggagcactgatttgagcatggtccctggtatctctctagaccccccacatacttttatccttttttggtgggggtgggtaggggagtgcagtggcatgatttcggctcactgcaacccctgcctcctgagttcaagcaattcgcctgcctcagcctcctgagtagctgggattacagatgtgtgccaccacgcctggctaatttttgtatttttagtagagatggggtttcattatgttggccaggctcgtctcgaacttccaacctcaagtgatccacccacctcggcctcccaaagtgtgtgagccaccatgcctgcaccacccccctctttaaaaaaaatatttatttaagaaacaacaaagacaaagagggggcataaaagtggggaaataagaaggaaacagaaaaatgcaaacactgatggaaaaagcaaagtcattaaattagaaaagggaaagtggggaaaggaaggggagagctgctgcagaaagcttcttcttggctggtttaggtctggtcattgtgatgtctttagagacaggttgcttgtttctaaacattgttgtttaaacttttagtcctatttaccaagccctttgctcaataaacatcttcatctcctcactgctctcctgagctttatgtatttcttcattccaggtcagacttgcgtgcctcactttgctccctgacacctacacatacacacacactcacatgcacacacacacacacactttgctgcagacatcatagaaataaacacttgggcttctggcttggggagtaaggatgacaaaatgcagcacgtggagggcctcaggttgctggcaatgctgattctcagtaggccattgtgcattgaggagattaagcattgtttttatctgtctgtttatctattgatctatttatttgttatttttagtaggcacctttggttctggagaaccaatgtgactgacagtgtcgggggccagaggaataaaagcagaaagcagacatgtttcttaggctaaagggagaggttaaatggcaccttcggctgctttgtagattatctggcccatttgcccgtgttggacgcagacgagacctcaggctaagatgatctattcaaaaacaaaaactgtggccttaaccagggttatctttttttttttttttttttaaccagggttatcttgatgatgtttttctgagggcctaattatagtggcaggtgaaggggaaacccttgactgtaggagaggaaaccaaggtatgtcactgccaatacctgccaggcactttggtagcagacaggacctgttgccctcatggactttgtttatgaagaggggctgtgggaacatgaagaggaaggcaggggtctccaaccttccagcctctgttcctctgcaggtccctcctcgtttcttcccatatgccattaactgcaattctgaatctgaataaataggtgctatcccatcatgatatttattttgtaatacttgctctgcggttatctacatcaggacattttgtggctctgcagcatttattgggcactatattaagctggtataaactcagacaaaatgccaggcgaatgataaactagtgacatttctgagtttctctgtagaaaatgtctacaaaggctgcatttggctgattgtatttcagaaggctgatgttgcgctgctatgtcactggtatactatttcagagtgtgatttgtttttattcatattcttgtctttagtgatctttaggttttatttcaaaatagctcttaaatgtgaaaacctacttaagatactggaagtatagatgtaggaggctgcaatgggctttgtcttgttttcatcaacaaagctcatctagatgacctgtgcaacttcgcctcatactccctcaatagcgaggaccacacatagaccaggactgaagtcttttcacctgcttataaatgtatacgcttacctttctttagcaccatctcatggcttttaggatcaaatacaaaacctgagcattacacaaaaggtgctttttgattgggcccctggtgtcttttcagttctcttttgctaatctactttggaaacactggatccatcctattgacttacaatagatacatatatgggtcatcctttctttgagctagggccccagtacctgctatttgtctgtaaatggaatgctcttcactccttctgtccattgatcctattgctgcatatacttgaagatttgattcatttactccaaagggttcctggaccttgcttttcctccaggtttccatctgcaggtgaaaggtcattcctcctgtgtcttcaaatagcaccttgaatgttagaaccctttcttcattgggttactgcctcttctgtagttctaaagctcttaagtgcagtaattatgtagccctcattcttatttcatagtaggggtttggaatgtttcactgactaaataaatgaataaataattgaattgtatttattcatataattgatctctgagccattgactcattttttgtctattgacttatgacaatcaataattttgatagatcatttctgttagcaaggcatccatgatatgtcaagaattttttttttttttttgagatggagtctcgctcttgtcgcccagcctggagtgcactggcttgatctcggctcactgcaacctccacctcccgggttcaagcgattttcctgcctcagcctcctgagtagctgggattacagctgcccgccaccatgcccggctaatttttgtacttttagtagagacggggttttgccatgttggccagtctggtctcaaactcctgacctcaggtgatcctcggattataggtgtgagccaccacgcctggtcaagagttttttaataccagcatacattttaatttcttaggtattaatattcccccacccatttcttgaaataaaaagggggaaaaagagaagaaataaattaactgtatttcctgagccctagctctgtgccaggagtcttctaggtacttaaagatgtatattataggaaaaatatagaaaaaattatgttaacttattttaaagactaaaaaagtgacggcacagagatgttaactaacttaacaaaagttacatatacagataaattaatacatgctgatatggctggtttgtgtacttctcttttctcaaaagccattcagttaatgctttttgctaatctatctgtggcatgcaggtgcctggcacagaggtacagaaaggtttgagtctgtctgtcaataaaggagattgacaaatgagtcaccaattataacatggcctaattttttctgtgcaaaagtatgttcatcattctgaaagtctcagaaaggataaccaacttggcttaagtggcacccccactgagaagcctgttttcaacttcagtcatctgcagctgagccacagcaataagagttatgaaggcagaagaaggatgagaggagatcccaggcagacaccaggatgtacacagaaagactccctttcccttccataaaattcacttcaagaagggagttcattttcctagttcaacataaaggcagtgtaaaggtacacaagatacatctacctattgcctttttttaaataattaaaatatcctagacaaaatttttatcatatatttacagagaggttctgagtcccagaaagaataacatgctgtattggatgttagtaaatattgactggtgcaaaaatgttgtatatgtatttactgagaaaacttgcttctctgtacttaggcaagcagagagagttcagtgataaaagacagaacacttgcctttgggagtccggtgtattaagagagtcatttatgcagacatgtagcaaatcattatgaactatgacagtgatatgtgtcggataatctagaggcataaaacaaaggtgcccaatcccttatacttaataccagaagtcagatttaccaacgtctttggatagagatgcttgaatatcagtctcaagatctcattctgcaagtaagaccatgaagagttcattttgtattaaattctatgttgatgctgtttttctttgatgattataatgatgatgacagtgatgtttaatgatgaggatgaggatgaaacacatagttggtcttaaaacacacagaatgctacctaactctgtagctccagctaaaatttagcagcatatataggctagagtaatgatatcatttgggtcaactgcaatgatatgcttttctaaggtatctggtcaatgacaggaccgttaaaatcagcacttatacagacattcagcattgattggcctcagcaattaagaactcactaggccataaagtaaaagcagcaataattctttatcatctgtaactgctagagatactcttggaccacaggtctaggggtgaggcatcatcaaataaaaatcattggaaacactgtggtttgactttcatatgtaaagctttgttttgtagttgtaattgttttactatagatgagaaaacatttaggcagaataaggaggtttgttagccacagtagatttggggagaacagagaactctgttttgctcttgcctcttttttttctttttcttttcttttcttttcttttcttttcttttttttgaaatggagtatcactttgtcgcccatgctagagtacagcagtgtgatcttggctcactgcaacctccacctcccaggttcaagggattttcctgactcagcctcccgaaacaggtacacaccaccacacccagctaatttctgtagttttagtagatacggggtttcaccatgttggccaggatggtctcaatctcttgacctcattatccgcctgccttagcctcccacagtgctgggattacaggcgtgagccactgcacctggccttgcctgttttttgtttgttgataaggcagtgggagatgtcactggaaacaacagctttgccattaaagataatacaagatttttaaaaactactgctattatttatttgagactatacgcacatggaaagctacactgaatccagcgtaattattttgcctcccgttgacactagccgtaagccaagtagataggcttgcatgctagttttaaccttgtgtttctggggtactgcgtttctcctgggaataagtggtggtagtcatttcaaggatgaaacttaaggcaaggtggacagttgaacaacatgtaactgcccattttgaaataaaacagttaactgctgagctttctggattgaggcttgtcaagcagctcattttcttttttaatgctcatgacttgcagtcttgtcagaaaaggtcacctgcggatccagttaatgcttcagtgtgaggagagtcaccacccaaagcctagtagtcgctgcagtacttaactgaaattctgatgaaagggtcactttctgcctggattcaagcagattccagtgattaaaatgtgcaaatgcatgtcccatgtctatatgagggaaattatgagacccttattaggaaatatctgcttcctaggggaagaacaaagtaggatttaatgtttcaagcataggctctgaattgcaggccatgtatcaatcagagaaaacttattgacagcgataacagggctttaaggagacttcttttctccagatgaagagtgattaagccagctagccactcagcttctttgagttggaaaaatgagtttaagtaagtagagttctgggaataaccctaggacaatgattaatgtacttacttcagaaaacccgcagacctttatagccccttcgctttctttctctttacctccttcctcttgtcctccctgcctttcctcctaacttctttccttttctttagtctttccttcattccttccttctttcatttcacatttgactgtctgttatataccaggaactatatctatgaatataaagtgtgtaaagagaagaccttccagtagctttattgggtatctctgtgtgtgtatcttttgtatttgtgtgttgtgtgtgtgtctgttgggggaagaggatgccttcatattggaaaaacacaaaaataattctttataacaaactctgataaggaccttacaggatttataacaaacacttgctgatcggaggaaaagcctttccctgtcgtaaatgagacatatttaacagaggaagtgacttttcacttgtgtcttaaactatgattcaggggttaggtgaagctggagaagagcatctcaacctgaaggcagaagcttagagactcacagaggggcgaggaaatgagtgtggcactttcagacaatggcaacatctttcagtgtggcaggagatgaggcagcaaaagtgagatggacccagtctgtgcagggtcgtggataccgcactaggctctggagagataagtactttttttttttttttttttttttttttttgagacggagtctcactccgtcacccaggctggagtgcagtggtgcgatctcggctcactgcaagctctacctcccgggttcatgcctctggagcagctggggctacaggcaccccaccaccacgcccggctaattttttgtatttttagtagagatggggtttcaccgtgttagccaggatggtctcaatctcctgaccttgtgatccgcccacctcagcctcccaaagtgctgggattacaggcgtgagccaccacgcccggcccagggataagtagttttaacatctgcattttctagccttgattgagtggctgggctgagtggctgggggcaggcagagggaccagtttggaggcatttcgctgttttctgtgtagaaatggaataaattaaagttctgcaaagcctgattttttcaaaaagtgcagatgttcccaagtttaattaatctcattgtataaaaatcctagagataaagcgtgattgcccatattatttatgttccagaataataattattttctatttaatatagcttactgcaggattacacaaaataatatgtgtctccaaggcattttaaataggcttttattttgcttacacatatggtttcaggcacgtatcagaaagtgaggtgcatctatttctcttcacacgggttcgacaatacagagaatcatcactctgctgtaactgctgctgtattggttgagtcacagggtttgttcatagggcagtcgtaggtggtttggcaaatttcagtgaaaaaattaattagatcagtgtgctatgggaatcgctgatcaagtcacccagctgaagcagcatgcctgcctaataagttttgaaagtttaatacactgtcactggggttgttgcaagagtacacacccaacatgcgtaggacctgtatgcaagtcccagctaataacatgcaacatccttgctagaatgcagcctgcctttcatcaaatgtagttttcattatcatttttattttaagtggaaattttactgtcaggctgtataaatacatagagtagatatattctaaggattgtgggtttagatgcctgtggatattaatagtctgggggctctgccgagttccactaaggcacatgtgaagtcattaatatggatgtttcttttcatgtttctccattttttaggtctgtgatggggtcaaataaagaaccagaccttgtgcatcttgaggccagaactgtggatggtcgtaagtaaatcaactttgccgcaatactcatagtaatattagttctatgactctgtcatgaactgagtctgtgtaataatctcatggtgtatgcagagtaatagtggatgtgtggtttctgaggatttggggttgcaggggtgacctgcttcttttgactctaagctagtaaagtgcaggtatcttctgttcggaagagctaaggataggtaggcaggcacagtggcacagtggcaataatcgtgtgatttaggcatgaagacatttcctgtcttcagtaatacaaaatagtcttaataatttttcataaatatatattttcacatatatttgtaaatataaatatataggttatccagaaatatgcatattttgatagtggtgataccagcacagccctctcatccaatcaaagtgtctttccaggtaaagagaatacttccaaactcttgattcctaaagtgtttcattgttgttgctgctgctactcttttgtgttgaattgtttcttcagtctccttattttgtcagataccatccaggccatgcctcactgtcttgtttggagattcacaaaacacttggaaagaattaaaaaaaaaaaaagagagagagagaatttttctgtgtgtccccatgagaggcagcaggaggagagtcagttgagtgaattgctcacctgtcagtagttcttatcaactccgggtggttatgctgcagtgaaggacaggactacactttgtagcctcatgacaatgttgtaggttgtttttctcatttcacatatgaagaagcaaaggcatagaaagcttaagtaataatatagctaagctaatatggtaaataagtagaggacagtgatgtctatctcacagagcctattcaggtgagaattcaagaaacccatgcatatacaatacttcacacagtgcctgacctactaacaccagcaatgaatgtttccttccccttctctggtacagaggatcctcagaagggctaagcatttgcaggggtaccgctaggcctaggatagagcactccaggtgagggggtaaaagaaaatgagaaaagggggaaactgtatatagaagagggtgaggggagaaaagacagggagaaaggaagaggtctcagatgtagaggagaggaagagaatggactatccacaattaccacagagcaatgaggctgttgtaggctacccagcgctggcccagagagtgaccatctcatttccaagaccttcccagtttctaaaatatccctcacaattcaaaagcaccctaatcactgccgtttgtgcctaccagtccttggctcttctgaacacaaaggcagaaggtcctgcactttaccagcttacagccaaacaaagcaggtcaaccctataacccaaactccccagaaaccacacatttttcattactatgcatgtaccatgagatttctcatctctaaaggtttgtttcccttttgggggagtgaatatattttttgacagagtcagttggggcacaggttagggatcaaggctgaccatcatcctctgtaacccaggcaaagctgccacatgtaacatgcccagcactgtgcctgacacagaatgagctcaacaggtcagagcagctttcccacctcctcagggggctcgctctggtggtgacgtctccatttccctggagcagatgatgttatcttggattccaaggtccagttcttgctacataacagatcaatattttcttaatgcaaaagtaaacacatcattgtttaaaagtcttgcttactggagatagagaccatcctggccaacatggtgagaccccatctctactaaaaatacaaaaattagctgagtgtggtggtgcgtgcctgttgtcccagcgacttgggaggtggaggcaggataatcacttgaacccaggaggcggaggttgcagtgagctgagatcgcaccactgctctccagcctggcgacagagccagactccgtctcaaaaaaaaaaagtcttgcttacttcccattgctttgatgataaagagctaaattctcatcttgacctatagctccagcataacttgtgtctgcccattccctcagcctaatcttagtctgccctctcctcactcgttgcctgcaggcctttaggcgggttttcaattcttggaacatacaggggtatgtgtcttgccataaagccttggtacatgctgttttctctatctggaatacccttctttcttgcccataccctgaccaatcgagcataattgattactgtggatggttgagacctcaggttaatcgcctatttcttagaaaagcctctcgtaaactctcagtctaaatgagtttcttattttgattgcttttatacaactattttttttctttatcatgttcttctctgtttgaaattatactttctttttacgtgtttattcgatcacaaccgtttctcgccaccagtctgtaagttttatgagagcagggaccatgtatatcatattcagtattgtgtctccagagccaggaatggtagcacacatctgtagtcccagctagtcagaaggctgaggcagggggatcatttgagcccaggagttcaagactgtagtgcactgtgaacacaactgtgaatagcaactttactccagcctgggcaatatagtgagatcccatgtcaaaacaaaaacattatgtctccagcacatgccatggcatctacatgtagagagatctcactaagcatatgttgaatgatggcatacccggctgaccagttgtcagggctaccagtggctatctcacctcacttaccaggttgtctgaaaatgctagagcctcacatcttaaaccttagcatgtatgctacccacctagggaccttgttaagatctgcattgtaattcagtaggggcctgacagtctgcatttcttttttctttttttttttttttgagacagagtctcgctctgtcacgcaggctggagtgcagtggcactatctcggctcactgcaagctccgcctcccaggttcaggccattctcctgcctcagcctcctgagtagctgggactacaggcacccgctaccacgcccggctaattttttgtatttttagtagagacggggtttcaccgtgttagccaggatggtctcgatctcctcacctcgtgatccgcccgtctcggcctcccaaagtgctgggattataggcgtgagccaccgcacccggccgagagtctgcatttctaacaagctcctagatgatatccatgctgcgggtctgtgaaacatgctttgagtagcaaagttccacaacagaaaattagtgaaagagcttgagggtctgtttcccatgattgcacccctagtttaggaagctctggatggaattggtagcatcccgggttgctttcattttcaagcttttgggcatatgctgctgttttctggcttgtggcatccaatgcacatgacgctttatcctaaaaacaatgaggccatcactctctgtgatctgcacattttcttacacccagcattattcctgtgctccctgaaggcatggcggttgataatgccaaactgtcatctcaggcttagctttcacaaagcatgaaatgtatcagttctaattttatttattttactttttttttttttttttttttttttttttgcgaaggcagcatcttcagaaactatccaagggtgaaaattcaataaaaggatttaatttgaaaagttagccctgtcgaaacaaaacaggaaaaaaaaaatctaccaattgttttaaagggtccaagcataacacctgacctgtcacagtgtaaaaaaaaaaaaaaaaaaaaaagagagggaaagagattgtctcaataaccaaggctccagttaaaacaacaacaacaacaacaaaataaacagagaggaggaggttggaagtaaatagcacagagaggtcagggtagcaaggtgtcagcaaatgtagtgggcaaagtttgacagtgtatttatcaaaatcaggttacagtctcatcagctgcactacgaatttcatatctctgtgttatctctttctcatttcctattttttttttttttttttcctgagacagagtctcactctgtcacccagtctggagtgcactggcaccatctcggctcactgcaacctctgccccctgggttcaagccatcctcctgcctcagcctcccaaggagctgggactccaggcgtgcaccaccacaccaggctaatttttgtatttttggtagagatggggttttgccgtgttggctaggctgctctcgaactcctgacctcaagtgatccgcctgcctctgcctctcaaagtactgggattacaagcgtgagccaccatggctggcctctttctcatttcctaattgagatcctctgtttttttctccatccattcattactgttattatttatttatttatttatttatttatttttgtgtatgtgatggagttttgctcttgttgcctaggctggagtgtaatggcgcgatctcagctcactgcaacctccgcctcctgggttcaagtgattctcctgcctcagcctcctgagtagctgggattataggtgcccgccaccacacccagctggttttttgcatttttagcagagatggggtttcactatgttggccgagctggtatggaactcctgatctcaggtgatccacctgcctcggcctttcaaagtgctgtgattacagacatgagccactgcgcccgaccccattcattattgtttatgtatatggaacccatggtttttattctaggttgtacatcctgtagagtatatgccaaatatactttacaataatataatgtttttattttgttttgttttgttttgttttgagatgaagtctctctctgttgcccagcccggagtgcagtggtgcactctcagctcactgcaacctctgcctcctggattcaagggattctcctgcctcagcctccccagtagctaggattacaggcacctaccaccacacctggctgatttttgtatttttagtagagatgaggttttgccatgttggtcagactgatctcaaactcctgacctcaagtgatccacccacgctggcctcctaaagggctgagattacaggcatgagccaccacacctggccatcatgtttttgactttgaaccagaaattattttctgattttagtgtgttcacatattttgtagtcaagatactgagacatttgacacaggaaaaatcccccacttgccagtttggctcttccccatggagtgtgttgtgaattcttatctgggtttgttattcaaaatttagttttggtctatttcagatgtccctagattacatgttatacttaatttctgtttccattgaagttcccatatttcaggggaggtgagctctggaaagctttagttttttacatgagaaaaaagaattatatctttatttttatttttttatttttattttattttattttgtttttttttcttgagatggagtctcactctgtctcctaggctggagtgcaatggtgcaatctcagtttactgcaacctccacctcctgggttcaagtgattcgcctcagcctcctgagtagctgggattacaggtgcacaccaccacgcccagctaattttggtatttttagtagagatggggtttcaccatgttggtcagactggtcttgaacccctgaccttgagatccgcccgcctcggcctcccaaagtgctgggattacaggcgtgagccaccatgcccggccttatatctttatttttataaaccttataacttacaagattactttcaattgtaagggttggaaattaactcgagtagtattagcaatataagcgactttgttgcaatagaaatcacagaaatttttatatcataatacagtcattacatctgaaaatattatttatgctcattctttcctcaaaattgtagtagttatcagacctgccagtagatcttgatatataatatattaatttaaaaagtacatacaagggtattaaatatttgttttttaatcttttaataactttatttaaatttaattgaattagttttttttggtctattctgggtaatttattttatgcattaaaaacattctgaaaaaatgggtccacaggctttctcagattgctgatggggtccatggcacagattctgaacctttgctcccaaagcaacaagtgtctgcataggaatgtgtggttatttatataaactagtactttatcttagatcctttagaaagcttttgttctgtgagagtctatggttggcactgatgtttcttaccaactatcctctaatatgtagatatcttgtagtttacatctgtgacaaggatgttattctttattgtattactttctgccttgggaggtgagctgaaaagagcaggctcaactacaatcaatcacgggaggtattactggaaatttttgaacatatttattggatgtggcatttattattggcccctgagttcaaagaagacaaattgacaggtcctcatccatgaagcagatcttttattgtttaaatattctgtgtgtgtgtgtgtgtgtgtgtgcatcgtaggagcccagtacattaaaatactaaaaaggaaacctacattctattgatttacctaacataggtgcatttgtgtatgtgtgtgtgtaatgcatatagttaaagagaaaacgttgaccaaactgttggattgaaagctgtgtgaaaagttgtatcttatttaatctccgttctatgtccaaaagataacttagagcccaaaacattcttttttattttattttacgtttttagtagagataaggtctcaccatgttgcccaggctggtcttaaactcctgggctcaagcgatcctcctgccttgaccaagtgctgggataggcatgagccaccacacccagatgaaacatttaatatttgttgaataaatatattaatgtgtcactgtttaggtatatctactgaaagaaggatctttaaccactgggtctgtggagtcctggagcactaacagatgaatgcaagagacttactacctccctgaaactgggtgccacattttatgcatatttgattttggaggaaaataacataacttttatcagaatttttcacatggcaattacacatggatatatagttgtatattatggtcatctgtaagagaacctgcagtaccacctttggccattattgcttctcccttttacttctgaaataaaaggcccaacccgcaacctgaatgtttctgtactggtggtgatctgtgccagcaggaacaggggacaggggacaattactggtcccagtgtttattttcatgaataagtaacctcataacaagtttcccaaggactaatctcattcaccggggaacaacaaaccttggccctttaaccaactgtgaaaatgactgcctgagaactctgtgaaatgaacctcaaactagcattttaacaagcagaaataaaagaaactcacaactttatataactatgcatcccactaattctggtcttgggtaagaactggaaatctcattttctacttcctatccaccagctttccaacctagtttccgtattgaacagtaagtatgtcaaaatctggataaggtaagcgctgctgaaatgctttggggaggtaatagagatctcagttctcaaagtcttcaatatctcagctacagagtgtgtttactatgaatatagattacttttataccaacaaaaatagcaatgataacaataaaaaggtatatatatatataaactcttatctttttattgttatatatatatgtgtgtgtgtgtgtgtgtgtgtgtgtgtatttatatatttgctatatttctccagaaattgtttaggcttatacagatgagtatgtatatgtatagacacgtatacttacacgcatgttcttgttgaaaaattgttgtggcaaatttagtgtttgtgcatacaaatataagttaaaaatcttttcatatcagcacatataaatttagcaacttcatggttaattgatacatagaactccattataaagtcaactatatttagtaattactaaattatagagacctttgtagatatacagacctctggttatttcaaacaatgcgaatatatacacatacacacatattatttatttggttagtccgcattcaagctcgcgtaagcagcaaacactacggaaagagaatttatgaaggaaaattcctgggtcagagattatatacatttcaaatttttgtaaacattgtcagattgccttctgaaatatttgcaacaataaatagtctatcagtatcataatgcctgtgtttgcaagccctcagcaatcttggacattatcaaagacttttcaaatataacccatctgagagcaaattttaaaaaggcatatccttattgttttaatctgtatttatttaattaggagtgaggttgagaatttttatttgtttttcgtcactacctttatttcttcttcagtgaactttaaaaaatcaaatcttttgaatagaaaagatgaaacctttggcattgatacacacatttaaaaatatcagattgctacccccactttggccaaagttccaacactagcacaacagttgccattattagaccccgcatttcatagtcttcctttatcttttttttagtcaatttattaataacttccaaggtagaccttggaagaggttagacgtttccatttctggtcagcttcagattctaacagatccttaccacttcctgacatgctgagaaaatgcacattctcacctctcttctatccccaaataaagcatcaaggtttagctagtatagccagaatctagtactatgctttttttttttctagcagtgttattctgaccccatatttcgtattgcaaaaggctcttgatttcaatgactagtgatatccacttgacctctctgatttagtagcctgaagacagccctaacaaccacccagaaaagcatgaaataagataacacgggcctcctagcacagcattgaaaagcctgatagtgacagtacaacaacaggctcagctgggcagctttcaaattgggttctttgtagccattatatgccacttcctctgcttcccaggtgcccacccacctgcatgaagctctgtgcccttatcttccatgctgaggctgagagaacaaaggtgcacagaaaacttttcactcacaggccttaactttaggacaaagatctaggctttgggtccttggtatccctcagaatacaatagcagcactccatataacatgcaggtgtggtaatccccaagtgaaaaatttctaatgtttctggctccggcttaaaaaaaaagtagcatcgtacttaaaaaaaaagtagcatcggcatttactcacatattttcttcctttgtcctctaaattctcaagtgacagtgatgctaggatcatgcattatattcctattatttatctggtgtgagcacactagatacttttcagctgccttacttataacaatccttggaggtagacactattcttattttcctcattttaatgatggggaagtggggcttacaaagattaagtgttttttccattgtttcagagttaggatttaaagccaggtctgtttcactctggacctattattcattcattcaaaaaatattgttggacatctacgccacatcagatgctcttctaggcatgaatgagggatgattaggaattgatgcaaaggctctgctctcataaagtttaccttctagttaggggagatgttataaaaaatgcatgaagtatttgtatgagaagtggagctacaaatgtgtgagaaaaacagagtagggagaatagagagtgatcagagaaagagggccatcaaggaagaaatctcggataaggtggcatttggtatttaagccaagtctgtatggaaatatgggagagacttgtgtgtctgcctggtggaagagcattccagacaaatggaagagtacatgcaaaggatatggatatgaggatgcttagcatggctgaggcataacagaaggccaggtggctggaatagagagaggggcgggcaaacgtgtcatctgtctttattccattatctgagacaaggactgtgccatactgttctttgttgagcatctcttatgtttcaggtatgatagctggtatggagggtgataaaaataatcaagaagttattcattgaggccgggcgcagtggctcatgcctgtaacgccagcactttggaaggccgaggcaggtggatcacaacatcaagagatcgagaccatcctggccaacatggtgaaaccccgtctctactaaaaatacaaaaagtagctgggcactgtgttacttgtctatagtcccagctacttgggaggctgaggcaggagaatcgcttgaacctgggagacggaggttgcagtgagccaagatggtgccactgcattccagcctggcgacagagcgagactccatcaaaaaaaaaaaaaaagaaagaaagaaactgttcattgaatatatccacatgtcttagaggcagtgtctctctgttctgaaattaatcttatagcgtgtagacacatctaagtaaatgtgcacaccttctcccctcactcccccttccaaaaataaaaataaaacacctggagaagaaactggaaactgtatgctttctccttcatgagctaaatggtttcatttcttcctccccactttccacttttcattcttgcttgctttcttcttttcttcctactttttatccttctctctctgtctctgtcgctctttaactccttcccctactccctactgtctttgtaaacttaatttggacatgagaggtgaagctgggtgggcttctggattgggtggggacttggagaacttttgtgtctagctaaaggtttgtaaacgcactaatcagtgctttgtgtctagctaaaggtttgtaaacgcaccaatcagcactctgtaaaaacgcacccatcagcggtctgtgtctagctaaaggtttgtaaacgcaccaatcagcactctgtaaaaacgcacccatcagcggtctgtgtctagctaaaggtttgtaaatccaccaatcagcactctgtaaaaacacaccagtcagcactctgtgtctagccaaaggtttgtaagtgcaccaatcagcactctgtaaaaacggaccaatcagcactctgtaaaatggaccaatcagcaggacgtgggcagggccaaataagggaataaaagctggccaccccagccagcagtggcaacccactcgggttcccttccatgctgtggcagctttgttcttttgctctttgcaataaatcttgctgctgctcactctttgggtctgcattacctttatgagctgtaacagcgcgaaggtttgcggcttcactcctgaagtcagaaagaccacgaacccaccagaaggaagaaactctggacacatctgaacatctgaaggaataaactccgggcacaccatctttaagaactgtaacactcaccgtgagggtctgcagcttcattcatgaagtcagcaagaccaagaacccaccagaaggaaccaattgcggacacagaaagttatgtgatgtgcttctcagttctccatgattgagtgtgactttgtatatgattttctgtctttacccaactaaactaggttctagtgtgggtttccagtaggactttctcgcaaaacacacagccagtgttccccaaacacatctcacattctctcttgcctctctgctcctgcccagtgctccttctttctggaataatgagttatccttgtcatcattccaggcagccttctaggctttccctcagcttttccatcatgtccccatccctgacgaaagtaattcactctataacatagtctgaatagtaaaatagtctctagcctaaagaggactaaataggccatgaaagaataacaagtccacagctctgtgtgatacaaagtgaaataaattcagagtcacaggaaaagtttctagcacagagtaaaacatctgtgcagaggtatgaggattaaatatttcaccggcaagcccatagcacttccattcatcctagaatgcgctcaccatgctgcattgtaattggacagtgaactttctgtatttatattattagattggtgcaaaggtaattgcggtttttggcaattactgcagttactttttgcaccaacctaatagtgtgcttttgttttctctctcatgttcccagtttttagtttcatgcttggctaaattttatgatcccagaattttccctgtagtagtcatggtctcctgaatgcctgaaggccaacaataaaatacaatatttagtcaattacactggtcccaaatcaagaaatttcacagaagaaagcaatgctaaatcacactcatcatgccaagctagaacatttgatgtaagtctataattttcacagaagtatcttgtcctctgtgtagactttctggaaccaagactagaatctcacttttgacattctcaatttctagctggtacatgtgacagagggcactagaatcctgataggaattaagtgtatatgaacagcagcgtgttgacacgtgtgtgcgtgcgtgatgagtgagaacatttaatacagaagtttcaaaataagtaatagagcagtagaacaaaaggaaaagttatatgcgcttgtatgggctttaaaatctgttctgcttttaaacagattgcttaaattgctgatttaaattgtttccaagtggaaacaatgaggaataggtgagtttcaaagtgcttatgcttgcctgcatcgtttctagctttgtttataattaaacgtctacaatattagggaaaattaaagtatttggtgctaaataaacacttgttgaatgatagaatggatggatagagtcccagagacctgtaatatatttttttgctgtgttggtcaggctggtcgcaaactcctgacctcaagtgatccacccgcctcggcatcccaaagtttggggattacaagtgtgaatcaccgagcccggcctggattttaagcaaaatttaagagagaaaaaaacatgtgatccacttagcacagttcctgaccccgaggaaaggttgctctggttattttggaggttagtgctgctgctgctgttatcaatgaagacattctggggatggaaaggtttgtctaagccccaggaaaaagttcacagaagaaggtccaggaagtatttggactgagtaacaggaaaggaaaaggctgttcaagccagcagaactctgaatgaacatagggaatcagccaggagttaagcatgctgtttagaaatagcagaagccctcaagacacagacttgccagcaacatcacagagctttgttttgttttggcagcagtgggaaggaaacaggtttcagtggataatttatggtaaagatttgttggatcttaaagtcatagtctgatttttaacatccgttttgtttctaagcttctaataactctcattatgtaaagaaatagtctaaaactgagcttggttgatgaccttctcagagtcacacgccatgctggagatggaactaggacctagaagatagctccaacaggaagacggaacacctgccacacctgctgattggccctgtgtgttgggtgcagagatgacttccacattctccttgtagccctacttatttggcagtgctgtctgctgcctatgcagaagatctgtatttgtattaattattatataaggagaatattttttcatggtgtttttaaaaacgtacttaaaaaatctttaacccaaacaaaaattgaatataaaaagaaagaagtggccgggtgtggtggctcactcctgtaatcacagcactttgggaggctgaggcagacgaatcacgaggtcaggagttcgagaccagcctgaccgacatggtgaaaccctgtctctactaaaaatacaaaaattagccaggcgtggtggcatgcgcctgtggtcccagctactcgggaggctggggcaggagaattgtttgaactcgggaggttgcagtgacctgagatcgctgccactgtactccagcctgggtgacagagtgagactctgtcctcaaaaaaaagaaaaagaaagaagctgcctcaggtagaaatatccttagcactttacaggtggttagcttgagacacagtgagcagtattggtgattacagagagaggacttaaataccaactacagctatcattatgtgagtacagtctaatctggcgctagactcaacacatttcaagactaaggtcatcaaatgtcataacttctggctagatggatattgtttgttcccattttctagatcagcgtttggagacgtggagtgatttactaagctagcaggccttgagcctgcatttaaacctctgatcctctgttcaaagcctacctttttaaaagcagcttcccttctctagaacagcacaggttttgggtggatggggattgcattattctaagcagcagctgttgcagagagtgaagatgcttgaaaagaacagcacagtgtcctaattacctatggcaaggaaaacatctgtgtaggaaaagtaatgaaattaattctaatgtctagcagttgcatgcattaattgacattaattaatgccaaattacaagatacttcctatggaatcacatcatacactcaccagaattgaatatggaaagagttcatcatacttaatactattacagcaagccccaagggggatgagtgcttggtcccttattatgaagtgcagccagtttctttctgttttccattaggaggagaaagggaacaaaccaggaacactttaccacgggcagactgttcaagatggttcatttccccttcagcttgcaaatttcactttgagccactcagagcaagaagtggtttgaagacctcttccggggcttttcttgtgtccctattttaaacttggtaattctcagaccaaagataggcttattgcacagctcaacagcaatatgaggcatgggaagtagagaaagaacaagcagagagattagagacagttgatctcacaagtccatcttgactccccgctcccctacttgcccggctgtagaagggctggactagggatttgttgtaaagattgccaactctttcacattagtggctctccgctgttgttgacatctcatatatatcttttatttatttttcctgtgcaaacatacatttatagatatatatacgacttgcaaaaaaactcaggtccataatgcacgtattttggtaacctactttttaaaaacttttattttggaataattttagatacacagaaaagtcacccaagatagtacagaatacatgtactttatacccagcttcctctaatgttaacattttatgtaaccatggtatatttttcaaaactaggaaattaacattggaataatattactaattggtaacctacttctataatataaaatatattaagcatttcctcataaaagcaagattttaatagcaaactctaaatgttccatagtttattaagttctttttctattgttggccattatgttttctccaaaattttttattataaataacactgataaatatctttgttgttgaatctttgcattgatccttgatttttttccttagatagaattctcagaaataaaccctaggtcaaagggtatcttttttttttttttttttttttttttttgaggcagagtttcactgttgttgccaggctggagtgcagtgccgtgatcccagcttactgcaatctccacctcctgagttaaagtgattctgctgtctcagactcccagccaagtagctgggattacaggcacgtgccaccatgcctggctaattattgtgtttttagtagagatggagtttcactatgttggtcaggctggtcctgcatttttaagtatcttgattcatattgccaaattaccacacaaaaatattaaggtgttcttattttgtatcttggggtatctgtttgaaccttagatagaagccaaaatatacttaacaaaaattggccccaaacttactgggatttttcatgcaacacagtatactagaaataaaccaaagttggagtcagtctaaccacgttgcaaccacatactgccgtttctacacatcactattttttagcttcattctctttatctgcaaagtcagttggtatactctgcagtgttgtgaagactaaacgtgctatagctatgtgaacatgcttcagactgcctggctcacagatgaacaacaaatgttaaattccatctttgttttctccctaaattccttagattaataatttctatataggtgaattagaaacatgaaaagggtatgttattattttccatcttatgtttgtacagggtcttaaggaaaagaaaagagccatcagacactaatacaaataaaacaagaattgtgtatgcatcaagtcctcattaggtgtcagtcttaaaaattctagttggaaattgtatttgtaatttgaaggtcaagacctcctaatcaaactctcattgtgtttagccattgtttttgttcattatctcacataacaagaagcacagaggttggggcagcttgaggctcagtaccatcaacagctcaatgatgtcattaggaaatgggtactttccatctagttgtcatactcgttatataagcttgactgtaagactggctcctttgggcaaccagaaacctagagccattcacattgagacacagtgtttacagaggcagaagatcttctgctgtatctcctgatatctctcagattccccttaaaagctctctcctcacttctcatgtaccagtactaggtttaaataccctcttctaaaacaaccaatggcaagtggagaaggaaggcttgagtaggtttagagtgacaacattcctccttgcatatgggaacttctgagtcacatggagaaaagatgagctgacagatccgatattggatttttcagcaaaaagccagagaacaatgggtgttcagtagctcgccaaagaacctgattcagaaatataactggaatatttaaatttggcttaactagtctttttaagtgtgttcccaaaatttctcatcattatgaaaggtggcaaaacagaaaacagaaatattatcattcttaatcataacaactaacatttgtatgaatttgagtttcaaaacatttagcatatatgttattttaattcttacagctaaagtacaagatagttgatattggcatcctcctttaatagatgaaggaggcagtgaaattggcccagttgtcccatagaacatgatgtttatgctttcttttgaataaacacagaaattgatccttccagtcttcaaacttgagaaagttacatttgttttatccgagttcttatccaagttcctttctcaggaaaccaaccatcaggcctcccaggtatcatcaaggaacttaagcttaccagatcactgcatctagacaatgagataccagacccctcactcatcctgattgcctaactgacaacttgctttctgttgaccagctcttcttccttacaccccctaattcctattttcccacacattgttacatttcttccctgctatataaactcctaattttagtttgccagggagatagatttgagactgatcttccatttcctcagctgtggcatctgattcaagtcttcttccttagcaatactcattgtctcagtgattcgctttcagtaccatgaacagaaaaaccaagatggaacattggttagcattgcagtaacagcaagactcaggaagatgaaaggatttcttatgaactacacagctaataaataaaccacaccagaattcaagcccagttcttatcgtcataaatctccattgtttctatgacccccaagctacattttggaaaacagaagtcacttaaaagctgtaaaacagtctggtggagtgtaaaattgtgaggtaaagattttgtgtgctagacggaggatcgttctgggaagggatagtcccagaaactgtctttaaggaaaaagatcctgtgttctgctctaacgtgaaattacaggaatgcctgaaaaaggagatgaggaaggaagaatagaggactctaatttaattttggaggtggcttcaccaggactagacaggttaaagcacttgagagctatccccatcttcggaaatggcagtggggtgaaggaagatggtgtgtaaggctctccaccattgtctactgagaggttatcagaaaccccatcagtcattggtcagagggagcaagagtgcatgccgccccctagtggcactctgcagaatacaggtaggtacacataagttccttaagtaaaggtggtcctggacaattccgccttcctagttttcttaagagaaatctttagtgaatccttatatctagcttatctatctctacatactattccccacctctatttcctgtaaataatcatcttctgatattttcatttggaaaaatagaattctgcataagtctctgatatcttaaaatcaaacccacctactcattaagcatcaaaaacaagtaaaataactccttttttatactcaaaaggatatatttcaataagtggcatgttccaacaaatattcatttattgcctactgtgtgccaggaacagtattaggatctggtggacacaacagtgaataacagcaacaacaacaaaaacaaaaaaggcatttgtctttatagagattacattctaatgggagcacggctcagtaagaaagaaataacaaggtaattttatattgtgataaattccatagaaagaattaataggatggtgtgtgataaagaataactatggaagatcctcagatgtaacagtgagctagctgaaatctagaacgtgctttgagaacagcctggggagaagcattttaggcagagggaatgcaaatgaagagtctttaaagtggtagaaagtttggccaacttcctgaacataaagtagggtggattagaagaatcacagagagagtagaagagattagcatggtgagaagtgggggaggttggagggttggcatggtgggtggtggagagtttgaatttattctcaatacaatgaggcaaaaggagttttaagtaagggagtaacataatctgattagatagaggccaggatagtgtgctcaaaaaacaggaatagcctccctgataaaatgtatttccagcaatagcgaccaaactgacgtaagagttgtcattactgatgttgtatttatcaccaggtgagatccagggtctcaactgattcaattgtaaagtaaaagcaaagtcttaactcaaggaactcctcccaattcggttttgctttttttttttttttttcctgtcacccaggttggagtgcagtggcgtgatcttggcccactgcaacctccgccccgctgggttcaagtgattctgttgcctcagcctcctgagtagctgtgattttacgtgcctgccactgcgcccagctcatttttgtatttttagtagagacggggtttcaccatcttggccaggctggttgtgaactccagacctcgtgatccacctgctttggcctcccaaagtgctgggattacaggcatgagccacagctcccggctctgttttacttctaatgaattatgaaagaaaaacccttatcttacttaacctagaatcttataaccacatcatttttatcattagatgatgaatgattagatgtatgtgtgttttcctctttgtcaaagatcaaagtgtgaaggtgaaacctactaatgagaaaaaattgaccatgaaatcccaagtattattgccagtttttgaaaatattttcatttgggtttgggagggaaaaaaataattagcaagaatttagtattctaggatatcaagacttggtggaagcaccaggagatgatgtaggtggtattgagagcaagtgagtaaaataataatgataataatttaaataataataacaatgacaataacgtatttaacaaagactgtgaggcttgtttaaagaactggaaatggtggctgggcgcggtggctcacgcctgtaatcccagcactttgggaggccagggcaggcagatcatgaggtcaggagatcgagaccatcctggctaacacggtgaaaccccgtctctactaaaaatacaaaaaattagccgggcattgtggtggatgcctgtagtcccggctactcaggaggctgaggcaggagaatggcgtgaacccgggaggcggagcttgcagtgagccgagatcgcaccactgcactccagcctgggcgacagagcgagactccatctcaaaaaaaaaaaaaaaaaaaaaaattggaaatggtaagggaaatatcaaacgtccaccctgactgtaaatctctgtctgtatatccccctcaaccccatgtttttgtttttgtttttgtttttcagattcacattatctaacttgccgaatgcagaactgtacagaggccaacaggaatcagccttttccaggctacattgacccagactctttgattgttcaggatcattatgtgtttgttcaggtaggaaaaatccacttctgttgattgtctcagaaacctttcttttccttgtttctgtcccttttgcctgctttacactccattaagagtcaaaaagagaggatgggagggagggaaggaggtagggagagaggggaaaatcactatcttttcaataaaaggataattagtgagtgtggaatcttctatactaacagactagtcatgaatttctttgggctgtgtccagaggatcttatcaacatggggtcatgaaggcatcgcacagagtagtgagattgtctctaggatgatgcacagtacgatctgtcccccacacctgcattccaaagaagctcccagttatcaaagggactgaacaaatatgtcagtctctttctatctgggaaagggtcagccaatcagccccctccccaatacccaccttaaaagtggagaagcaggaatgggaagggaagctgtggggtggctggagatagtgggaggcagaggccagggggagagtaatcagcttttattgtcatgcaccaactgtgattagaataaagacacttcagagcagatgtattcagccaggtttttcacccccaagagagtggagaacagtttaagaagctgacgtttcctgagttgttagtagagacaagaagcaaatacgctgcactgcttttcagcattcaaggaaaaatttaagcttgtttggacaatgcattttaaaactcagttaccaccttccatgttaaaaatgacaaaggtacaattactaaatagcttatacgtatatataaaagtatacatatatatatataaagacccattctagacagtattacatttatttcgacaagaaattgtgatttggaatatttaattacatgctttgaggatgcaatttgtttaaatgcctaccaccctgtgtacttataaaatgtttcacatatgatcacacacatacacacacacacacacacacacaccatttctttattcttcagggaaattagtaattaatactctgacaatttcagcatcaagttgtcaatggacattcgaatagttacatgtattggttctgtctataataattcatttctgtatcagtgctgctcccaggaaccttttctggtttctaataacactttgtgatccacatctatgacttacaaatgagaatcaattctgcatttggaatttcacacagtctttacccatgccaccatgaacatcctgtaacccctcactagacctaagaggtcatctggccacatgacggtgaagatgataactttccaagtcacattcctaatgtgatgaacatgcgcatttgttgacattctgagtatgcagactccagctgtcattgaaactccaggcatttagaggggttaagagtggctgtgtaggagagagagagagagacgtggtggtgcccttgacactgtgcctgcaggttgctcatgtgctggctggagaccacacctgccctctctacctgccctctgtaccttcctgccctctctcacacccaccaggattctttgggctgcatgctttggacaagattggaggggaactggctgtggtggcacctgcttgtagtctcagctcctggggaggatcacttgagcccaggagttgaagggtgcatgagctatgattgtgccactgcactctagccctgggcaatagagtgagatttagctttaaaaattttttcaaaaaggctgggcacagtgggtcatgcctgtaatcccagcattttgggaggccgaggcgggcagatcacctgaggtcaggagttcgagaccagcttgggcaacatggtgaaaccctcccccccaccatctctactaaaagaatacaaaacatagccaggtgtggtggcaagggcttgtaatcctagatactctggaggctaaggcaggagaatcacttgaacctgggaggcggaggttgcagtgagccgagatagtgccattgtactccagcctgggtaacagcagtgaaacttcatctcaaaaaaaaaaaaaaaattaaattaaatagaagagacctagattgaatttggacaccaatcctagcctggttttccatctaatatgccagcactcctgtctgtgccatgtgcccataatcatcagtgtaacaccatcaaactggaattcagtgcccagagatgtgagcctccagctctgccactgtttgggttgggccatttcattctgatatggcacagggacctacttgtagggtcatagacttgggtctagagacctgggctggtgatggcaatcagccaatgtaccccatttgaaaaaaataactcaaaatgttttctggcatctgagtcacagtgcaaacttaagaattgtatttttgtccagtaggttcagtttgggccgctgaccagctcatatgtctttataagttgtgtttgaactgaaggccaattctttacacttgtccgcaatagacattaatgccatttgttgtgttggaagcttcctccttccattcaggtgactgttctgtgacctgtgcctgttacagtagctcgagcttcttacagtcttgtttttatgatccagctgacatcaggagggcggccacattactacgtgtcctaccgaaggaatgcatttgcccaaatgaagcttccgaaatatgctttgcccaaggtatggcctaaatcactttcttcatttcactcttgactctcattcacagaagccagcctccatccctttcccaaggactctttcagcctctcatagtcatgttttctttacatctctcatctctgtttcccaagtttgctctgccttactgtctctttggtcagtcctattaccctcctcttgtttcctccctccctcccttcctttctctctctctcttcctttctttctttccttctttctttctttctctttctccttcatcttactttctttttttctctttctctttttctttctttcatcttactttctctttttctctttctttcttttttctttctttctttcttctctgtctctgagattgttgctataggaacattcatatgaattttaataattgatttgcttttcaatagtaaagattttcaagccatatgtattggttttctaacaagacagaaaatattttttggatgtgttatgtatcagtgcaacagctgccgtccatttctgtcccatttgattatcagttgtttactgagcagtgatgccgtgacgtggcaccagcctttgctttctcagccagtcagctccctgtaaacttatgagactggttgtctttagagttctgagtcgcagctaattttttagacttccccaaaggcatatcctttggaaaacagaggcaaacaaaagttaaagaccctcaactgttgacatccccaggctgtctttccagaagtgctgaagaactgcgttaatatggagcgccacctagtggaggtcaaactgactcgggagctcagagctgtgtatttgcgatcttgctgccatcgtgatgtatttgaagtgactaggaactgtaaatgtactgtgccttaatcttagagcaagggagatgcatgtggctataagaaagggactatgcaggtttaaagagagttatagctcaactttgaagcctttgggttgcacaaagaacatacctaactttttttaattgagttgccatgcctctttctcttatattttcatccatcactttgtcgtatgttgtcttgaaccaacaccagatagctgcccaggaagtcatataatagacataacacaaggacacagcacgcctcctctcccgggagagccagtggtaacagattgttctggtttctccaggatgaattctctttcttggctaccacccttccctcaccctaacgtagtgaaaggtgggatgtaagcctcagcccattagaggtaataacacacactgagttgcactattaacttgaaagaactatagctatgttcgtggttgttattttcagctgctgagagattaatgactgtggtaattatccagaactgtatgtatgtctgtgtatggatacatttaagttcttgttgttcttgatttggcttaagtgtttgttttttttttctccagtaagacaagaatttacaacacttaagttgtgccttagatgagaattggataacatcactatgtaaaaggaaaactgagtgttgttcaaattacctctgataatctcttaggaaggtctgtcagagaaatgaacatgttaactcaataaatacaacagagccaggttttgttttgtttttttcctcttgagcattgaaataaattgttgtttctttgattgactaataaatgaagtagttgacttgcaggatttgcaccttaaaaaaagaattatcctcaatgtaatgacatgctgctgttgttcaagggggatgtggaaatggagaccatatcctcatcttatgcgcactcttgggaataaactgttttttgtttttgtttttgtttttgttttgttttgtttttgagacacaatctcgctctgtcacccaggctggagtgcagtggcgcagtcttggctcactgcaacctccacctcccgggttcaagcgattctcctgcctcagcctcccgagtagctgggactacaggagcgtgccaccaagcctggctaatttttgtatttttagcggagacagactttcaccatattggtcaggctggtcttgaactcctgacctcgtgatccgcctgccttggcctcccaaagtggtgggattacaggtgtgagccactgagcctggccggtaataaactcgttaagtgacataagttttggtggaaatcaaatgctatttgtagcataattgaggctagaactcaagtctcctgactctcaaggtagtacttttttatattatactttcttagtaaattaatagcttctgttattaaaacatagcatcatcaccccatcaaaattccatatactgtcaggggcattaagaagaaaatcccattgacttaaggagccccagaaatcatagtttaaaatcaaagaaatgtttgtagactcattgctggaggtttgggaaacagatactttgcattgcttgttcatagccatcacacagatcactgctgacagttgcccgcagtggcatctagccaatatggaaggaaaaagttttactttgaacccaaatttgcatctgtcttcttcctcctgttctcccagaagagcatgttccattactcagtcttatctgggttctgagggtagaatgcagtgattaatttagcttgttcccagaaaaaataggggctagtacagcagatgaatgtattatttagtccgggtggatgtttattatttaaggcaatgagattctttattacaatcccattataccttcaaaaagaaaccccagcttgggtggaatgatctgcaacaaaggtgcatatatttcatggcctgtcagggctggtgcaactggaaatgaacaaagcttcatgccgaccaaaggaattgagacaaaccagcacttttatgctcaattttctttaatcacccactaccattgtatcaactcctgaaagatcatagtcaccctgagctgtgctcaaaaaaatatttactaatagtaaagaatgacagtgggtagggagattttaatattgccattgccattaagagcatgtggccctccagacaggggaaagtaatgagttttccttcttttaacttgctgggaacccattctgagctactcaagtgagataaatgaggcaatacatacgaaagtgctttgagcattttggaggacagatactctataaaagcaaggtaatattattattagtatggatctagttgtctccgtggtggaagatcgatgtggaccaggatgcaggtgatgtgaaggctgcttgatttgcagcaggagacctggattagggacccagatctgtcactaacttgctttgaaaccttgggctggtttgtcaatgtctcttttctttattttttttttttttaaataaggagcttagattcacaacaatattttctcatatgtgttacttagaataaaatgtccttagtaatccttcctgagaatttggttgtgtggtcaaatatgtctgaaaaaaggaataaacttcattctgtgtttcttgcctagagagtaacagtagctcactggtgtgttgaaggtttagaacatccaataagcaagaaagctctttaattcaccattaattaatatgttttaccaaaggatcccttcctccttttcaagtctactaaaatcctaacaacattgtcgtcctatggagcagactttagaaaatgcttcaatacaaaatctgtaagatcacaccttgctctcaaattctgtgattcggttaaagcattcaacataaagtgccacattgggagaaaaagcgcatttctcccaatagaaacaggatttagggaaggagaaaaaagaaggataatatataaatattttaaacttttcaattaaactatttaagaccaatatcatttgaaaatggctgtacaacataattacatgaaacaaaggaaggattggaactcagctcatatctagagatggccattttaatctgttatcattgtgtgattagttctctaagtgacctagaccacaatatttgatacatctgtgttttcctatccaaatctacaaaataaagtcttgggagaagtggccggtataggtgatgcactttactcttccagcctaggattatttaatcaaatgtctattgtgagaaactcagaggttcaccagtgcagagattcattgtaaatcacagaagtgggaattagctatgcgggggtcaggttattgttgagatattttaacttggcttcagggatgatgctgcatcttactgacaaagaagggaagatgaattgggaatagttgtttgatgtttctcaaggccaaggtaaggatttaggtctttaccctataggatggggagccatgggaggtttggttgtcaaggcaggaacagctctggagctaatttccacagacaagtctctccattagaaagaaaccaaacacttgggtatagcttctcctggttcaaagaattttaaattttattttaaacaataacaacaaaaacacttgggtgaaccactttcttatcgtgtatatagttaggacttgagtatttgcgataaacagaaaggtcacatgaacctagattaatcaacaaaagggatgtaagggctcacttaactgagagtagctaacatacctagagcatatgctaagtgccaggcactattaggagtgcttaacactgattaactgatttcatcctcaccactccatgggggacctattatccttgtctctattttgtagattgaaattatgagacacagagtttcattcacatggctaagttatagagccaagatttgaactcaactagttttactccaaagtccattcttcagccactttactagactgtcttctttaactgaaaagtctggcggtgggatgagcttcttaaatgtccacatttagggaccaaaaaaatgtcacaggattgggccatctctctccatccgctgagcctgttttcatcaggattggtttcatcctttacctccaagatatatctccagcagatctggagttttcttttttattcttactgcttaaaaaccaatagtgagatactaattttgtctctccctaataactccgcagtcattccagaaacatgtcatattgaccttatgtgggccacctgcccatcacctattcagttgctgttgccagagaaatggaatattctgaaagccggttctaaaagctcatttcttgtgctgctggtagaagaaagtaggaaaaagtttagatttaatatagaaatatatctgagagggatgaggctgtttttcaaaaaacatcaatccatacacttggacctgtgtctcctcaggttctgcatcagattgaaaatattaaaaaaaatacaaagtaatacaaattaaataaatgatacaactatttacatagcctttacattgtattaggtattgtaagtaatccagagatgatctgaagtgtacaggaggatgtgcataggttacatgcaaatattacaccactttatataaggaacttgagcttctgtggattttggtatctgagggcaattgtggaaccaatccccctgcagatacctagagagagcaataattaccaggagaaatgtaaatagacattcaacagatagaagcacacattaaattaatgggcaggattcattttttgacctatccacttggggttctttctacaaaaatgttaccaaacttgagtatgtcatatggaacctgagtagaggtgaggaatataaagccctttggatatggacttctccctctgggatcacgagtttactgtgataaacggtaaagaggatagggagtcttgttcctacacgtctagaggagagtcagagctgaaatgctgcttgattgagaacatgggcatatatgacaataagaaatttaggttagtagttaggtggaatttccccgcactggaattgttaacaggaagattgtcagatttcctaaagcttttcaaaaatagagtatggtgcatctggaaagattagagcactaagtgatgccgaaaacaagaattgttctacgttgttcttctacctttgtggttatatgcaatctttgttttcgtttgtttgttttggttacttagctttaatttttttggtttttggaagttgttttatgactactatcttgggcaaagggtaaaatgcaggctagagcatatgaacagacatcccataaagaagaaagcaggccttggtctgagtcagcaagctttggactgtggtagcttccattgtacttctctagagttatgaatgggggaaaaagaatttgaaattcccaccccaggggcacttgttactgcctccgcgctacctttgctttaattctatcttccaggacaaacaggctctgaaaacatcatcagttatgcaggctatcttttaccctttttcactggaggattcctgcagaacctctcagtttagattttgataagcagctaagtctttgaacacactaacatgagggttagtactttgggtttctctggtgaatgttttcttagggctgagggtagaggagactggctaggggttgctgaacctttgggcagtgcttttcaaactttaatatgcatggtaattatttagcaatcttattaaatgcacattttgattcaccaggtgaggcccaaggttctatatgtttaataagcttccaggtgatgtccttgctgctggtccatgagccatgctgagacatgcagggtttgtctattttctctctgttcctccagcttttcctcatatctaccccatatatgccttctgagcaagtatcatatttgtgcttggcaaaaatatcaggatgcttgattctccgaatcatacatatttaagaaagcatttttcgaattatgtaatgaggcaattaaaactggtctatcaaacatcccttcatcctattttctcatgaccttattgcctaaccccacaagtgacaaaggaaatatatgattaatgcttaactattatttcttatatatgcaaaaggaagctatcttccattaaagtgctcattctggtattcctcatttgattccacactctttggatgcctgccaggttaatgtataaaactctttttccctcttcacgaccttgtgtcttttcacaggacatgcatgttatcagcaccgatgagaatcaggtgttcgcagcggtccaagaatggaaccagaatgacacgtacaacctctacatctcagacacacgtggtgtctacttcaccctggccttggagaatgtccagagcagcagaggccctgagggcaacatcatgatcgacctctatgaggtatgtcacgaggcatatgtggtcctaagccacagcagtgcccagctggctgatggaagccccgcatggactcttttcctggtcattttaatacagttccttatgtggcctcatttctcttgggagatggaaagatttgcagaacatttttattagttaatttgcaatccacagaagatctctgggggattctgggagggattcttttttgacaaactccataggacatgaaggctttgtggacttgcggaatgtctggggaggcagtcaattacagggtttgatgagagtggtctgcttgtgatgtttggacatagttctgaaaggcagacagggctgtgagtaaagggatggtggatgcactcccttgtctctcagaagaaagaatgaaggggataaggtctcctgcatccagcagaagacactccatttggacttgaagacctttctggttaaataagctcccttggctaatggcctttttctcacagggccagagaatgagataagattaacaggtgcttgtctcctaaatccagaaaaataaaataaacaactacaacatcaagaacagagcttagcagagtctttatttctcaaaatggccaagattcaaaagaaaatcatgtatgttggattggttggctttcatgataaataccaatgctttaattgccattgaaggcacagttagctagaaagaaaactgctgctttggcatggattttagccattcgttactcttatcatgcgctatgaaagatttataataggttataataagccatttgaaaacagtcagaatttgggaagtgtaacaatatacctatattctagctgaaaaaaatctaaaatggattcagatatgtacagtcataatgacactgtcatttagttgagaacaagagcagtgagtcaagagattgtttgtctaagaagtaagggtatatccagtatgaaagaaactaatttcacttaagaaattttaacctatcattgtaattcctttcaatgatgtgttctatcttccttctcgttcagaggttcttagtgattttcttctagtatctaaacttctgtgtatgtataaaagcatgttagtaaactgtatgccaaatttagagcccaggtatttgtaatagaaattatggcagactagcatagggtctagtttatgtgtatatgtttagaaaaatgcattgcaaactttttcatactttcataagtttttccacttcttctcctgcccatgtttcagataaatacaatatcatgtatgacagcctcagactgtattctagaagaaatttacatattgtgatgatttagtttcatcttcatgttgaataaaatttaatttagagtacagattttggatttaggttgcttgtgcttaaatcctagcgatgccacttgtatgtattcttgagacaaatccagtaatttctgagccacagtttcgttgcttaaaatatggagataaacatgaaacctactagatgtgatttttctgaggattaaatgagttaatcctttcaaagcacggagcacagggctttaatattattttccaatgtgttcaagcaccactacagtgttcttctactctcatagccttaacatctccctgcattgtgtaaatgcccaaaacatttatattattttggattcctacatcttcccatactgaaattagtgcagccacgtgacattctttataccaagtagttgtcttttatttatttatttatttattttgagatggagtctcactctgtcacccaggctggagtgcagtggcgtgatcttggttcactgcaatctccgcctcctgggttgaagctattctccttcctcagcctcccgagtagctgggactcccactaccatgcccggctaatttctgtatttttagtagagacggagtttcaccatattggccaggctgatctcgaactcctgaccttgtgatctgcccgcctcggcctcccaaagtgctgggattatggcctataccaagtagctgtcttcttataaataagtgtaaattgcaacatttctcttttcatttgtaaatagattataaacattttaacttgaagtatgttttgttgaaatgccatgcattttcttgccttgactgaacacttgaaatggaaggattcttgctctgagcatccactggcatgaagtcaaagcaactgcccaagcttaatccccagttttctttcctagccctcgttctatccttagtctcccaaaaacatattctgactttcaggttccattttccccttcctgattatcctcttccctctttttgtgtcaacatggaattgattctctggataaattttgtttactgccagaaataaaaaccattttaattggtcccttgatgatgaaaaaatgacaaatttagacaggaatgactttgcaatgtcttgttgtttgcagctattttcatgactagttttctgaattcaaacatcggtaacaggtatgaaatgaaaagaggaaacaaggcgacctctggacatgccaaacattgctttgttaatcttgtgtttcccctttgtgcctctcttgcagttgactatctgtagggaaactgctggctcttattatcatcattttgagcagtgatgtgactgtattatgtaaaggtgctctgcatcctggggctgggagagaggagtctttgttttattagcctgacagttcacagcaacttgaattgaaattgatgtgatcagaacggcagtgccgtatctgctgattacctagatagaaagaatattggctgacacagagcctggcacaaatgttcccttaaatctgattgttctggctagcaggaagctgaaagccatccagcatgaatttcccagtagaattgcaatgaatgatgagagtttagagataaatgagaagtaagaaaatccataaatgaattactaaggagcaaagatgagcaacacatgaggtgggggttacagagatagcatacatggagtgcatgtctgctcacatttggggtgactgaagaggatggcctttgttctttgtttgcttcttcatgccaattatgtgctattcctgcctttgtgagctcttcaggctattttagcagaggtgaactgtataatgtataaacatgtagatggatctgtgtatcaaggatgtgcattgctgacgggtctttctaaaaaatgcagaaggaagcactgtgctcattaaaattaagcattttgtttgcaaatacattggaacctggctacagattctgtgttctctaccctagaactatgtgtgtgtgtggaatgagagagagaaatgctggagacaaagtgttgagggtacagcttgtatggtttagttattgaaatatcagaattttccatcagtgtcaattggactccattcaagagagccaagaaatgagagccaggaaagttggccacagagcaaaaatactagaaatgaattttgttatcattaatatcattaattgatatcattaataatggctaatattttgggccactttatgccaggcatggtgtaaagaaccttccataactctcccattcagtacatacattatgaggtagggactgttgtcactttcacttcaaatataagtaaatggaggcagagggaatacagcaacttttgcaagaccgcaaagatggtaagtggcagagttaggacctaaaccctagagtgtgcaaactctcaactatagactgtcacatttttcctgaaggatcagcatctgggcttgtatttggttgtggaagagtgacagcattaagactgaagaacgtagaagggcagggtaaatagggttagactttgcataccagtgaaaacagaagactggaagaagaaaatgatctggggaaaagtcaatgtaaagagaatcagaagtttgattgcccgagacctatctatgcagcacctttagtaccaagtccttagttacagctaagttcaggctatatttacacatggctcacagtcttgtcgggtggatgtatttgtgtaagaaaagcctggaaacaagtgtcctaaaactccatcacacctgaatagaatgaatggtccggtgcatcgtgtgcatcatgcagtgcatcaggctgcatgtctgatggtggccagagcaaaaaaaaaatgtgctgagtgtctgtgagaagagtgatgcctgatggttttgtgtagtgtggatgatgagagggagcctgacaggtttggatggtaccttctctcctttgggaagtgaatattaattaatgatgatgaagagcactttggcttaatagacaatgacagttcaccccagctgagtgcaaagggttgtgttgggagtgaagccacctggctgacaaattcagaatacacaagaatgtgtgcatacatgagtgagccctggtgggtgtcatgaaggacagccagtgaccagggcatgttctgttacacacagtgtcttctgtacgttatgagtaccctctctttaaaagagaaaactcaacggttatgataatatagcatacatcttgattttttggagcaagactgcctcttacaatctagtttaggaggtagggaagaaaaatgctgtcctattgaagatacatttattacaggatattgaatgtactattggccaggtgcagtggctcatgcttgtaatcccagcactttaggaggcagaggcagaagaatcaccagagggtaagtgtttatgaccagcctggccaacatggcgaaaccatctctactaaaaatacagaaattagctgggtgtggtgaagtcccagctacttgggaggctgaggcaggagaatcacttgcacccatgaggtggaggttgcagtgagccgagatggtgccagcctgggcgacagagcaagactcctcctcaaaaaaggaaaaataataataataaaagaatgtactattatttcaggctactgtctctagaggaggagagtgctgtttgaggaggagagtgctctttggttgaggcaacagagaaggaaagaacatttaggtttttcttggccagtgggttccctgattgtgaaggcaccccggcctcatgtttatccttcctgttgtcctctcgagaaaaatatcccatccacaaagcccaaagaaattgtggccatgaatatgttctctttcttgccacagtcgttgtttcatctttttaatttttttttgaaattttggcacttaggatttgtaatttaagtctgagactgagagggtggtaggtagtattcatcttttagtcagcattaaaggcagaaataagcaaaaactcttgcacaggagtcttcccaacttagcctctgcatggaacttacaaaaggttttcttacacaaatatgtaagttcctttgaattgatttataataaagagcataagaagtactagagatatttatgggaagactgattcccataagaacaggacagaaccatccagaaagtaaacctaaaaagcaagggagatacctgtgtttttttctttaagtcaccaaagaaataggaattctcagcacctagcacattctaactctcaaaaaagatagttgttgagatcttctacatattatatctgccaagtgcctagaagatcatatgatacgtagtagatgctcagaaaatatttattgaatggctagagtaaatgtactaacgactgaataaaatacaatttctttgagtagaacattctgatacgatatttctctcaggccactctaggatgagagagaagttcgaagagacagtacagccacaggcctaagggtgtagactctgtagttagacagactgacttggagtccagatctaagattctccaatgggatgaccttaggcaagtgattagccacatctgaatttcagttttctcttctgtaaaataaggataatatgaattctaaagcatgcaaagattcacaagttcatgtttgcaaagcctttcatgtacaggttgagtataccttatctgaaatgcttgggaccagtagggtttcagattttagacatttttggattttgcaatatttgcatatatataatgagatatattggaactgggacccaagtgtacacacagggttaatttatgtttcatatataccttatcacatagcctgaaggtaattttaaacaatatgtttaataattttgtgcattaaacagtttttttgtattctagaaatttattttttattttttattggtacataataggcacacattttcagggtatatataataatttaatacatttatataattagtaaataacatattagtatacttgagattattcatcaccttaaatatttttcttttctttagagttttgattgtgttttgactgtgacccatcacatatgattaggtgtagaatgttacacttatagcatcatgtcagtgcttaaaacattccaagttttggagcattttggatttctggattagggatgttcaacctctggtacctgaaatttaataatcaataaatttggattgttatatctttcctttaaaacagctttattaagatgtaagtcacatatcatacagtttgcccacttaaaatgtaaaatccagtggtttctagtgtgttcacagagctgcacagccaccaccacaattttaggtcattttcattgtccagtacagaagctccacaaccattagtagtcattccccatttctcctcctcgcatcttctccccagtcgtggttaccagaggcttgggtgttgtaccttctaatgcagaactcttactacctatttcagtaggaaaaaaaacaggggctggcgctgtggctcacacctggaatcccagcactttgggaggccaaggcaggtggcttgcttgagcccaggagtttgagaccagcctgggcaatgtgacaaaaccctgtctctaccaaaaacaaaacaaaacaaacaaacaaaagaacccaaaattagctgggcatagtggtgtgcaactgtagtctcagctacttggaaggctgaggtgggaggatcgcttgagcccaggaggtcgtggctgcagtgagctgtggtcacaccactgctctccagcttaggtgccagagagagagagaccctgtttcaaacaaacaaacaaacagggttctttgtataaagttactttactgttattaattttaaagagcaggttggtggagtgaatgacaatccgaaggttgtattagagtaggagaccataatgtgagaggtcacacaggggatgaccaaattggaattaatttatgataaagagcataaggagtactagagatgtttacaggaatattgagtcccctaggaagatcccacagttcttgacagtcaagatacagataccatctgtatgagagacaaattaaagaacagagaagtgttgggataatcaggatgaaaagagatcctggtttttggaaaaggtttatgagctgaatctttaaggatgaataggtagaggcacatcaggaggctttctcagggagttgggggtggcctttgtgaacaaagagagtcagataagagaagggaaggaagtgttctgagaccatcacgttggcaacaggaaatgcaccgatgtactttgtgttaggcttaaggtttgagctataacacttcatatttagtctaattaaaatgatatcttgacttatatgatattaaataataagaaataactattaattacttttgagatgtctggtagcaaatttctctgtaggagaagcaaagggactaaagtagcattccagcacacttagaattcttaaagatctttatgcagaattcagaagggcattaaaggcaacaattcttttcccaaaggaggacagacttccaacagtgggatgtaccattcccatgggaggtttgtcatcagaaattctgtgtctatgggaagacatggcttccgtaggaaatattactttaccccaccctaccccatcccttagctccactctattccataaatatgcatgcagtatggatacagagaggttatctagaaacataaacatgctccctcatcctcagtggaacctcagaccttacactcacacaaagagagacatatactacatgcatagacaggtacacccatgtacacccacacacattccacatttggggcactaatgcttggtattagtccccttgatagccaaagtcctacagtgagagggtagaggttccaagaaacgtaggatgagaccttagaatagagtactggaagaaggtggcttgtgcgtgcctaggggtttccgtgagacacacagaaagacggatttctcaagctcagagtgaaaggaacagtgaatagcacaaaaacctaagactagggctgactacatttgcagaccaggccaaagcaacaaaagaaaacaacaaaataaaaaaccctaccttaaatggacaaagtgccttggctgcaagaggaaaataagcaataagcagaccctctccagctctatcccctgtcgatacacattccctttactttgccaagtttttattcctcaagataaacctgaaggccaagctgccagagatgaattacaaagcacagctctttgctcaagtggcatttgataatgccaagcagtcgggggccaataaagtcgccacttctgcgaatcaaatgaaccagctcccaaacatgtataaccctgcgctggcacccttgccagaagagggagagggcaggaaggaaaatgggcaatgaaactactggaataggtaacatttttattccttctgcagttattgtcaccctttagagtgttgaatggctaagacatggtcatttgtcatttctgggaatggtatagaggaaggaccagtatgactttgtgaaattctgatttacgtaatttaattttttaaagaactggcagtttattcatatttgagtatgtaacagcttcttgaacatatacaaaaccaatatggaattccctggtgggaagcccttgcggagctggtgtagtaaattactaaatattatttgtaattaacacactgctgttgtgaggtagagtgctcctggagtttatgccttccacatttgttgagtttagacaatgcacaagaagttggtctggctgctactgattgcacagaatgcaccttgtttcctgagtatgatagttcaaagtattcctctctgcagctcatttataccatttagttgtttaacatgcttgttgtttcaaaagagtacaaatttggcccaactataaattatcccagatgccagatcagcaggtacacactaatgaggtctgactgtcaaaagcaaaggcaaaatgtgtgtcttctatcgattgaaacccaacctcttagaattgacaaattcaagctgtatttgttgaaacaatcttggaagtcaggcagatttgggtgtgaatctcaactttctgtgatctcagtttctttatctgtagaattggggtaaaagctgcaggtgcaggtttgtagtgagtattggaggttttgtaaataaaatgctggacatagtgcttggcgtttggcgaggtctggagaggtgacagctaattgcttcactattctgcttaaaaatttttcgtgttataaagggcccaagttaagtaggttcaaataggcttgctagcctgctcacttactccctaggtgtgttccagaaagccaccaagtcaaagtatctatttcctcatcctcaaaatgtggctaatgataattattccatggttattctgagtattaaatgaggtaatgtacatgcagcattggaatgcattactcaacatgtttcagtccttttcctcactgccctccagttttcctgagctgttacagttgcaagcagggtaaaatatgcatgaatgtgtttgataaactccaaaacacaagaaaaatgtaatgcacaattatttgcttttgtaatagtttgacaaattactaattactacttcttacctaacatatagaagggaggagacaatcatattttcagagccaaataattaatagcatctgtttaggctgagaacaaccatgttataaaaacaaagtagggagtatttgatgatttagggaaatcaccatttatttaaatttaaaagctgtcctcttatgttccgtgtattctggtggcttaacagagagatcttacatagaaataaagcaacagtaattggttcaggagctttaactgcctctttcaactgcccaagcctgcagatagcttgataattgaggtaggcattaagagcatgagctgtgaagccgcagagttgtgggttaataatcctgagtctgatacttactgtgtgcccttgggcagtgtgaccttaggcaagtcactttgtttggatgagcctgagctttcttcatctgtgaaatagaataaacgataccaaagaggagtgttttaaggattaagtgagatctgggtgctacactagcatacaatagaagtagcccctatttatttattattacttaccaagcaacagagctgaaaccatgagaatttatctcttggcaactgcgggctcctgtcagcctatgttaggggtaataagaaacccctatcaaactcctgttgtgacccccatatgataaggatcaccaatctgttgttgtttgtccagtagcctaggaagtcattataccttgagccacctccttcccccatcgtcaacctttctttcctccaaggcaagtgctctcagctgactttgacagccttctttttttaaaaagtaaacaaatatatcccttctcaaattgatgtatttttcagccatgtcaatttttcccaggtagcagggataaagggaatgttcttggctaacaagaagattgacaaccaagtgaagactttcatcacatataacaaaggcagagactggcgtttgctgcaggcgccggacacggatctaaggggggaccccgtgcactgcttgctggtgagtcttcctattgaagcagaatgcctcacacagtagagggatggaaatggatatttaacagagggtgaggatagttctgggacttttgctcagttgatgaacaaaagggagtggggaagggcgtgaaggcaaagggtgtagaaaactcacagcactgcctagtgtgatgtgccaaagagatgggagaacatgggcatatttcttgtgcccttccaggatccttgtttcccgcccaagttctgatgagggcctcaaatggtagtttgagggagaatatgacagtttctatccctggtgaggatacacactgaacaacctattttctcatgagtaacctgttgcagaactaatgatacataaattcagctgtagagttgatgaactgaatgcagagtcgtgtaggtgtattttcttgtggagatgtttaatcatattttcagaggagtttatgactcaaaaaaggtaagaaccactgatttatacccttattggtattctttacaatatattctgttcatttatgtcttactccgtaaaactgaagttggcaaactatagcctgtgggaaaaatatggcccaccacttgtttttctaaatagggttttattggaacacagtcatgcttattcattcatgtattgttgacggctgctttcactctacaaaggcagaattgagtagtcacgagagagactttgtttggtgaacaaaggccaaggtatttattatctgtatcacaaaaaaagcctgatatttattatctggccctttacaaaggtttgctgacccctactttaaagtatggctttcttttagttgccttacatttgggcagtatatagattagtatgaatttatttatatatttgatatatgatggcatccaaaaggaggatcaaagatgaatcttgctttcaaggagtttgcagtctacttgtctacttgaatgtgtctagattaataaatggaagattgcagggtcacgtcttattcctcttagtagctctgatgcctgccccaattttgacacacagataagtaatgagtgaatgcagaaggaggcgaggaagaggcaaattgcaaattgcaaacattattaatactatcaatgtctgtaaaacacttcagaagttgtgtctacatttagaaaaaggacagctgattgtgtaagcctagagggaggaccacttcatttgagtaagaagggcttgtaggggagggggttgtgtgtgtatgaactacacatatatagttgttcacactcttcatgcggttctgactttgatgttatccgcactcagcttgcttccttccatcccataaagtctggacagtcactttgcaggttcatctcttacagctgtaggcgggtcacccttctagttgagaagatgccagcagccatagcttgaccttattagttgcagaggatatcacagttgtcactgtgcatcagggaagcagtctaaaattcagcctcccactcagcttctatccttattactggcaacttaagaggaggaaaaagccagttgttatagtaagtgcacaatgccagtgacagagtaagtaaatgtagcagctatttattgaatacctactctacgcaaggcacagtttggtggcattttaaaaaacagggccaccttcctagttcagctatagcaagttggagcgtagtgctgcttaaccaaagatgcatgggatatgccagttccttaagctggtctctactctgcactttggagattaaatgcctatgagagataattaaccatgtcacctaaatgggcttgcctggggactctggcatcataaatgaaccattaaaaatggcttttaagcacttagcaaggtattccctgcttcacccccaacgcagtgtcagaaactcttattgttgtacttccaaaatataaatgtaatatcagcttacttccccatcaccactgggactgccctaatccaagccagcattgttgctcacctgatccacagtggcaggcttctaactggtcctcccacttttacttggcaatcacttctctagacagcagccaatgggaccattttttttaaaaaatcaactttattttgaggtaaaatatacttacataccgattttaagagtatagttcaatgaattttgacagatgtatataccgatataaccattgctacaatcaagacaacatttccattgccctgaaaaatacctttgtgcctctttgcagttagaacccacactctcagcccagcacaaccaatgatccactttattttactatatatcagattgctgttttttaaaattgtgtgtaaatgttatcaacttgaacttttgaaaaatcagatcgtatcccttctttccttaaaccttctaatggcttctaatacatgtagaataaataaaaatactttatcatgaccgatgaggccccatgtgatctggcccctgtgtagttctcctccctggtctccagcctctccctcctccccttcttccttatatgtaagccagagtggaggagggggtgtttctttgcatactgtgaactcaccatgttcatgtatctcttagggtctttgcatttgttataatttctcttaaaatgcccttctctttgtctggcttgttcttggccttcagatcattgcttcattatcttaattttagagaactttcttgagcatcccctaaagttgtatttgtcttaactctttttttcttcatggtccttattgttatctgaaatgagcaggtgtactacttaattttcttgtccatcttgcctgctgaagtgtgggcttcatgaacctagggacggtgcctgtgtttttgaccactccaaagaatcaactccaggaatcatacctgccatgtggtaggggctcaacccatgtggtaggggctcaacattaggggtgccacgttgggagtgtgcactccatcgaaaggtgttgtgacagtttcgcgtttggattttaatggaagctgttcattccctctgagagtccactggaggatttgtcacattttctaccttctgaagctcgtgggctcaagtggaacccaaagttaacaaaagcaggaagctcattaagatggaagaaagagggattattgggacacagatgtatggaactcgggagttttccagccttccttcttagttaaccctgttgtttaatgtagtttcaacctgagcttcagaaagcaggctgcaggtgagaaggggaaaatgacaaagggaagcagggaggagagaccaaaatcactttacaaaaatctgccaaaggcactaaataggaaagaaaatctttgagctacaggagacgaagactgttaaaaaccttctttaggcttgggagctggtggcagagatgagataaaaagtgatttcgattgtgagtacttggaaagtgacagtgtcactgaaagcacagcctagtgattagaaaagagattttttcagcagggctgttacagatgtggaataagttcagaattgcagcccgaatgcagtgttcctggtaaaaatctatgctatagaaataaaacatctagggtaatttgggctatatttttaggacttttagactgattgcctggagggcccagctgggatttctttcctctgaagactgcattgtacaattagatagaatattacaggtcatggtccacctgcgtccaatgcctcaggattgggctcccaaggggcaagatgtgagctgaactgagcctgtgacaaatccttgggcccttagggaaagcacagtgtttaatggaaagaggcgctgactttgtggattcatctggcagttttcttttcttttctgtttttttgagactgagtctcactttgtcacccaggctggagtgcagtggtgcgatctcggctcactgcaacctctgcctcctggattcaagtgattctcctgccttggcctcccgagtagatgggattacaggtgtgtgccactatgcccagctaatttttgtatttttagtagagacagggtttcaccatgttggttggccaggatggtcttgatctcttgacctcatgatccacctaccttggcttcccaaagtgctgggattacaggcatgagccaccgtgcccggcctatctggcagtttgctactggagctgagcagacagctgccccaggagaatctgtttttcacctttcttccattggagaatctgtttttcacctttcttccattgtctgtgactctatatattttgctgatttgggctggagctgaattccccatacccagccagttgttccaggggcctccttcctctttgccgttgactctttattgaagatgtaataaatttgagttccaactcaaagaaagaaattatacaaatgagtatgtatttcgggagggagagtgttggggatactatttgggagcttgttctttacaaaagctctgatctgtcctttcagtacaatattcagattagataccatggagataaaggtaccatgaagatagcatctaaaggcagttgatacagaggctgaggagaaagaattgggatttgaagctggttgacccttaagtaatataacagcttttaaagttgatttattacatggtggggaaatgtcttccattttatggtaattccccagtgggatccacaatgctagaaacacagtagataattaatggatcagctggagaacattatgctaagtgaaataagccaggtacaaaaagaccaagtctgcatttctgtcttctatgtggaacctaaaacaatcaaactcatggaagcagagacagaatggtagtcactggaggctagaagttgggggaaatagggagatattggtcaaagggtacaatgtttcagttagacaagaggaataaatgataaatatttgaagtaaacaataataatggatcagttaaattcagcagacatttattgaacacttggaatagccaaagtattttattggttaaaagaatcaggcaaagaaaggtaactagtaactagaggtccacttatgggtttcggggtttgcagactccctgaaattaagtgaaaaactctgtatggttgtgtctgtgcactttttcttggtctttcatttgcatcagatccccaaactttgtacctgacccagaaaagattacagactaacagtctagttgctcctagaatttaccaattgatgatatgccatggcctgtgactatgtgtgaggatgcaaagggcagcttccaagcatgtgtgctggtcattctgtcctctgtaggtcagctgctggcattggtggtttgggtgtacatttctacattttcttaatgtggaaaggtcaggaaaatagagaactgcctttggaacaggctgtgctttgactctattgacttggagataactattgtgactattagcatatgtaggtactcagcacatatttgctaatgagagaaaagaaggcagaagacaagagaaatgaagagaggggcctatgatgtgcccccagcctgggcaaaatgtgcataaggactggagagctttgtcctgtgtccttcagaaacttggaggggtttgataagcattataataaaatatactaatataaactatattaattatttatgacttaacttggacaaatgtccaaaactggtcagtacaacagcttaagttaaaaaagtgaagatgaatcacttcacactgttttttccttaaatatttgtgtagactatgttacttccttgaagaaaatgaaagaaaaaagccacagaatattttccttataccagctgggggcaatccagtactacaaatgtgagagtggagaaaaaagtacaccaaaagatcatttctaatgttgctgttactgagtgaactggtgtcttttttcctcagattaatgtatcccagccctctgaaagccatagcaacagaggcatgctgaggtagccaatggaaaaatgacatcttttctttgttcttgttttttgttttgtttgtttgtttgttttttgtttgtttttgttttggttttgtattagagatggagtctcactctgtcacccagggtggagtgcagtggtgtgatcttggctaactgcaacctccacctcccgggtttgagtgattctcctgcctcagcctcccgagtagctgggactacaggtgcccaccaccatgcctggctaatttttgtatttttagtagagacagggtttcaccatgttggccaggttggtctcgaactcctgacctcaagtgatccacccaccttggcctcccgaagtgctgggattacaggcgtgagccaccatgcccggcctgacatctttcttttgtaatggcaactgccccttaccaaataatccttaggtcaggtggcaaataactcaaaatcttccagcagtggcaagcaactggcttaagattgaaagttgggtgctctcctggctagggatgtcctcctctgtttggtggtgcagaaagtcctctgttaagctcatatgtctagggataatccgcaagcagtagtctacttcttggaatgccatacagatgctcacaacattattcagattatgtggttgataatccagcccacatactcctggcattgctctgagtaaaatagtaaagtgatatctttcatgtcccaacaaaaaagcattacttgatattgcaagcttctatttattatcttgtttagattctatgctaggtttcacaaaagatgcgaaacagtacttaatcagttatctttatttatagagtgtattcttagagagatataattgtatgtacctgaaatagataatacaagattgtgcatagtgaaacaaattgttgtggattagaggagaggagagcctgataggctgcagttatcgggaagactttcatggaaaactggttttgcactcctggtttaccctgtcttacatcatctgagtgttgtactatgctgttctggaacatccacagcatttaattatatctgttctagtcttcctcttggacaaataaaagccaagagtctaggcctgatatttcttctaataggggctgtcttctttagtcctatagaacattataaagtcaaaactcctttttttgaaagctttacatgaaatttttatgcaaaaccaatcatttgttactattagtgcaccttgagagttttactttgttggcagtaaagaaaatatcccattgtgatctgctgttttatttcaccagcgttctggctgtttttattcctgagtttcattttcactttgtcatttactccatcctatataaatttaatcattgtatctgtaggtgtctgaatgtctgctggctgaaacttacagagcagaataaaagtaataacagagatacactggtgattccagaaactcaagttgataagattagaaagtaatcttcctgagatatgaaaagaaatgtgggctcaaacacaaacttatattttttgacaactcagtacaagaactattttaaacaaaattcatataagatttattatccttttttcttgaaaactgttgatatttcaatcagataatttgaatgaggtttctgcacaaacaagtcccttacattttcagttaaatttttactactagtgcattttgtctacaagtgtgacttttatattgaatatttctgattctgataatatcctggtagagatactgggtcagttgtctggcgggtatttggataatttcacatactttttctatacaactgagaccaaggtctcaaatggagaatgactaagagatgccaacctactttttcaaaatcctcccagcttgacttgaccttctctcctggcttcatatcccatttctcctcttcagtcttttctgatgacatactgtgctgctcagcttttctgcttctttttctttgttattgctgttactcaggcttgaaatattctttaacgtcttgaacatctacctactgttcatagcctatccatctttgcttcaggcactgttttctttttggagtcattcatgattcaaagttcagcatagtctctccaccttctagaatctcatactattttgtctcttcattttttatggctgttaaaagattctctttttatggtaattaatggaaggatctcatgccctctatataaattgtaagctctgtaatgacaaagaccaaattagattatacctaaaatgaaggtggtctttactaacttgaaggctgttttacacttagtggacactagatatttgggggatggaagatgttgggtaggtatagatacaatgggtggttggagtggtgcatggatgtatggtaaatgggatggttggttagatggatggatgatctgattctgagcttcaaatgaccattttgattatgtgattttgtggcacttattatttctcttttcagccctattgctcactacaccttcacctgaaggtctctgagaatccctacacatcagggatcattgccagcaaagacacagctccaagcatcatagtggcatcaggtaagaagcttacctggtttgctggctgtggtaaatagtgtttattttaagaagctagatatctgtacttggaagtttattttaagaagctagatatctgtacttggaacttaatgagcaagctaaaaataattttgaaaggcacctaaaccattggacctgaagcaagtctgcagaaaacccctgcacagacagaatgcttgcagtcaaaatctttctcaggcagtgcacctgccaatatagtccattgttgcttttgcagaaagttcttttcactaatggcacctttctctttctaggtaatataggttctgaattgtcagacactgacatcagcatgtttgtctcttcagatgcagggaacacctggagacaggtaagaaaataccctgggtcaaatcgctgaagtttaagtaacataaaaattgcccagcttggttcaaatctgggaacttttttcagcggtgctacacataaatcctaatgactgtgaatatgtttatttttcctttttatataaaagtcttaaatgttggagtgtagcaaatatttatggaatttgattttttatcatttaataaagatgttccttactcagagcttgtatgtaagggtgtttataagtcacaatgaaaccaaattaagtctgactaaatttttcccacagatgaaaaccagaattcctaagggtttatcatatagggaatatgcagccttaagggtagattacatatctaatgctgagttggctccataaattccccttgccttgaagtcagaataggaaggaatgcagatatagaaatggccattacccaggtggtgttctgagatgtttaaatctcatgtgcaaaagacagagtaataaccatcaggatgcatatgttagagaaagtagaaatggaatactttaaaccagtgtgtttagcttaagtgcttcctgcctttcttctgaatgaaaattagatacccatagcttacaaaacaggcatttaatgaggtttagcaatcttaacaagatatgcacctaatgcttggttgttatacttcaatcaatatgttttaataacctactgacgtttaattatcatacaataactagcactgtaaattgaaatctaatgcacaggtaatcacacttagtgatgagagcactctcctttaaattttagtcagaggtgtccacattatattccaaatgccatttcttagcttcagaccctctatagatcctcagtgggattctgatattttgagcggaggaggaagggaagaaatttgcataagaaactccatagcaattgatcttggaggtatgtagaaacctggactattctaagtaaacttcctctggagaatagagagccaggatcccattttcttctttccaacaccgcaagcaaggcaaagaagtctttacttctatagtcttgggttgcatcttgggtataagaaataaacaaattggaagaagattgtctgtaatgtaactccaggcaaggctacactaataatctgacgagaaaacagcatgcatcttatacagaaaggatctagagattgtttccattgtgtctccatttgacttcaaatttctttctctacatttggagaaagaccaaatgacacatgtacccaaagatgacaacagaactcaccatgattttggtggaacatctattaattaaacaagaacagttttctttgataacagttggaaacttcaaaataataagatctggaaagggcactgtaatgcagcaagtccaagctctatccattactgtatgcatgatctcaggcaagttaccacatctctctaaaccttagatttcttatttatgaaaatgagactattggagtaaatgatttctaaggttccctctgtctagagatgtataatatatgacagttaaccaatattctgacatcatcataactgggaatcaatagaaattatcatgaaaatgaaggaatctaagcatgaacccataaatattcattgttcaaatttattttatacacacctaaaattattttgtacaacaccaatggtataatagcccatgttgggaagaactgttctatagctttattttcgcaaagatttagggaaacctatttttatcatgggaaggatttttgttctcatgtgaagactgattctctgaagcctgggtatgtgtggatgtggatgtgtgtccatgtatgtgttttcctcatccagatctttgaagaagagcacagtgttttgtacctggatcaaggtggagtcctggttgctatgaaacacacatctctcccaattcgacatctttggtaagggcacatgctgcctgtgaaatctgcacctgatggtcctgaactgctaagatcagtctaggagtcaggctatcaaaccgtgtctgtttctgtagtaaatctgttaccaaaatgccgaggtttggttcaggtcctgttactctccacacaaaaagccaatccactgagacaacaaatattgccagtgaagaaagctttaagtgggtgctgcagccaaggatatgggcaatcagtcccaagtccatctctctgatgactaaaagtaggggtttatatagagggaagaaatgtaaccaggtgtaaggaaacaggaattagggaagggtaaagaagaggaggtgaggaagaggaagtggtcaacaggaagcaagttgtcaattaggcaatcatgatgggtaagtagtctggcttctcattgtccagatgtctttatctggtaagtttcagctccttgatactacctgggaggcctgatggttggtttcctgagagaagaactcagataagacaaatgtaactttctcaagttttaagacaaggaggatcaatttctgtgtttattcaaagaaaccataaacatcagttctatgggacagttgggccagtttcagaatgtcaaggtctactagaacagtggaggtaggaaagagagagagacacagacagagagagagagagggagagttttactccatgagagagaaattgcattatactttgcaaatgtgataatactttcaccctcacaccctcaccagtatattattctctcagcacgattacaggtagaacaatgttcatgatcaggtatagtctctgaatagcttgacttcttgcagtcacctttcccaaataacatctcctggagtttaatatccatatccatttttgcattccacacagagatgatcagtgcatgacagttctgctccagtctcatttctcctgatcttgctttcttatttttcttttttgaggtgatattccacaattctgcctgtgcgtgtcccacagatggatgtataaagactaactcccagaggagttatcaataggctcttttaactgtgtttttgaaagtggttctctccgtatatgagtttgtccaaaatcaaaagcctggttttccttctactgttagtcagtttgatgactgaagggaaagctgcaaaagagagaaaaaagaaaggctaagcttgggcaagggcattcataaagaaatgcagagcaaagaaaaggtcctcggtggccatcttagttcatttggcctgctataacaaaataccataaactgggtggcttataaacaacggaaattaatttcttgtagttctggaggttgagatgtccagtatcaaaatgctggcagattcagtgtctgatgagggttccacttttgggtttatagatagcaccattttgctgtatcctcacgtggtggaagggcaaggcacttctctgaggcctcttttaaaagatcactaattcctttcatgggtggtccacccttaggatctaatcacctcccaaggtctccaccttctaaaatcatcatattggcgattagatattcaacatttgaattttagagaggacacaagcatttagagcattccagtgaccatcaggactgaagaattatcttctcttgctttcaagagcctatcttgtactcattcattcagtaaggtcaaccaggatttatggttgtaagaaggacacactgaggacttggtcacttagagatgggttggttgaaatctaagtaagtcttacaaggtcatcgctcttcaggatcacctgtaagacttgttagacagtagagaggttttggacagggtcaagagcttgaggcctaagatataataaaatatccaaactttcaacaattttataaaagacttatagttattctcatttaatgtagctctgcttttattgatgttttaatacatctgtgtcccggtggcttggctaactgtatttctactttctgatataattaagaatacttattcatatgaaaggctcattttgacaaaatctcagctacttttaaaatgtattatctctgggttgagagtatctttcctttgaaatgacatttttttttcctttggagatctgatgactgatattttttatatcattaggttgagttttgatgaagggagatcttggagcaaatacagtttcacatctattccactttttgtggatggggttctgggtgagcctggagaagagactctcatcatgacgtaagttgaaaagtatgatgtggtccagccttcatagaaaagagtaatccacaaaaatgttttatagctaagcctgtttgatttgcagctgttaggttcaaggttgttgcatcttactgcaagagtgtacagcaaatagggaagaaaaatgtgggcagctattttcttggttctctgatagtttttaggagacccagactgaggcgcttagagaaattagaagtgatgatttcaataggaaataaagctgtacatttaaaacttcagtaataaagaacctggatatgtagaaaatctcaggtatataggaatgagttcgctttaagtcagagcatagtttcatcaaaatgccacaaagcattgtatttttccctggctctttacctaacccaattgtgaggcatattaggaaaatcatgagaacagtctgttattgtgaaattgcatttacactcatttttgtctggaatgtgatgatcattaatttgtgaaagattaatgacgctgcctatgggtttcaatacatggactttgaatttcaagtatgaaactgtgagagttccttcctttggaaaactggacatggaaagtagaaagggaaggttataaagtagttgatctggtcatcaatgaaaactttcaagccaaagtcaatacttggtaagctaattctctcccctaccactactactttttttttttttttttttttttttttttgagacggagtcttactctgtcgcccaggctggagtgcagtggcatgatctcggctcattgcaggctctgcctcctgggttcatgccattctcctgccttagcctcctgagtagctaggactacaggtgcctgccaccacgcccgggtaatttttttataattttttttttttttttagtagagacagagtttcaccacgttagccaggatggtctcgatctcctgaccttgtgatccacctgcctcggcctcccaaagtactgggattacaggtgtgagccaccacgcctggcctaccacttctgctttttaatggtagaaaacaacaataaaaatctaatatgcctaatagctacacttttctcaatgagagacgtagctaaattagcaatgcattccataatttgtctttcttcaatttttatattttcaaaacagattttaaaaaactgacccaacaggccacttcatggcttttcttcaaacctatggttggtaattcaaacatctcagtaaatacttaagtctctctgagtaaagagagtagaatgtacagtgtaggaaaccattattagtacttggttctgctgatcactttcactaggggctggtgggaaagtaaaatagcatggaaaccatgggaactatgtacattagcaagataacctagaagtctaatcttggaccacatagaatacagcatttatgattgtttttctcaaccatattttctcaaccaatcctgtggcacaatatgtacaagtgggctcttgaattaaatactctgggtctggttctgcctgttattatgacttgattttgtttttgcaatgttaacaaaactcattgaatctcatattatctatctgcgaagtggatccagtaatagtaccctcctcggccaagtgcggtggctcacacctgtaatctagcactttgggaggccaaggcgggcggatcatgaggtcaggagatcaagaccatcctggccaacatggtggaaccccatctctactaaaaatagaaaaaattagcttggtgtggtggctcgtgcctgtaatcccagctagtcgggaggctgaggcaggagaattgcttgaaccagggagtcaggggttgtagtgagccgagatcgcaccactgcgctccagcctggtgacagagcgagactctgtctcaaaaaaaaaaaaaagtaccctcttcatgaatgcgttttgaggattaaatgatatgattcatgtaatgtgcttagctcagggtgaacgccccacaaatgctctctgttgttattactcattacattgttatcattgtaattatttttatcaccatgaactctgtagagtgtttggacacttcagccaccgctctgaatggcagctggtcaaagtagattacaagtccatttttgatagacggtgtgccgaagaggactacagaccttggcagctgcacagccaggtaggaggaaaagaactgagactaaggcctgggcaggaagcatgagtggtgttgggggaaagctagttgctaaggtataggaactaggatgctctaggccaaaatgtccatctactgttttcttacacatttgtgttccacagcagtgaacaaactcaccattaatagcttgttgtgaagtcatttctgtttttattgtgctaggatataatgagataaaattcaaatgtgcttggcttaggcttacaaatcaaaatgaaataccagttcagcactcagatccaaacatatttcatctgagaatgtcatatggttgcatggtgggggcagggatgaggaagatatcttcaattttatctagcaatgcaagcagagacataaaataacaaaattatgctgggtgagtgttgccggagaaatccttcttcccctttgccttgattccttggaactatatggtactttttgcctccttgcaaggtacttctggtatgagaatgcagaattattaataggaaactttcatttgtcctggcctctcacatatccagcttatatcaaaatgcttggatggaagtgtctctcccttgatttcccaaggtacaagtcgttccgcagatctctcaaaggatttggtagaagtacctgctgcaaagccatcaccatattcaggcagaaaaacgtcatatacctcaaacctagactaagtaatatatgtaaatgtagatgtataatgaagccagttaaagtgagtttgctcaagaaagacggtgtacagtagataaagcaaaattctactctgatctttcagaaacacaaaaggaggagtgtgtctgatagtgggccctgcgttagctggaaacacccaccctattcagaggcttaacaatagaatcgttcatttacattgctgatattttctcctttgggatgcacaagcattgtgatattcaaagcttttatttattttgtgggaaaacactgaatttagctctctcgcttgtctggtagaggaacattaaaatctgtgctgtaaagttgtgtgggcagaggcataataaatcgaggcaaaattgatctttatatttcttagcaatgctcctctttcatgccctcataaatgaccaactgtatacatcttttattataggggaattgaacttaattactgcagatttactggcaatacactaggtacaggctgagtctgtgtgtccttcatagcactgcacccaacactttgccaaataaaggcttgataagtgcacacaaaattaaggatgttgtttaataatcttcaatgattgttaggattgcctttatagtcaggttgtataatagggctctagaccgcaaaaggaaaatgttgttagcacaaagagggctaccaaagtttacattacactaagatgtgcaaatgtctccctaaatgtcactcatgtggagcagagaaagtccaagctatgtgcccaagtatctgtgatccttctctgcttacagggggaagcatgtatcatgggagcaaaaaggatatataagaagcgaaaatcagagcggaagtgtatgcaaggaaaatatgcaggagctatggaatctgaaccctgtgtctgcactgaggctgattttgattggtgagcttgtgcaattatctcctggagccatttggtgtatcaaatccacatgggcctgaatgaaagcttagaattgaaataatagtaacatacatagggctaagtggccagcttcatattcttataaaattacctcatagtttactagctatgtgtatgtgtatgtgggataatcaagagtttctttagactgaaagaggactcggaagatggctggtaattatcttcattaccggcagatttggccgggcatggtggctcatgcctgtaatgccagcactttgggaggctgagtggggcagatcacttgaggtcaggagtttgggaccagcctgggaaacatggtaaaaccccgtccctactaaaaatagaaaaattagctgggcatagtggcggacacctgtaatcccagctgctcgggaggctgaagcaggagaatcgcttgaacccaggaggtagagattgcaatgagccacgatcgcgccactgcactccagcatggcgtcagagtgagactatctcaaaaaaaaaaaaaaaaaatgggcagattctttctgtgctgcttcaaacagcaacactggaaacactaagtggactttttagggagcaaacaaacatctatgctcaagatgaaagctttctagaatctaggatttcctgtagtggaataatagccttttaaggcagaaaattttctgtccctgcaagttttcgattcgtagttagctgaccatagcttatgagattcatggaagatgttgctgaactcagagcaaggatggattcaatggcattgcaaatctgtaactcggtgaacgtagtgataaaggagactttttgctttaccaggattaagctaatttaaactggagaagtactgagacatttagaggttaaactaaactcagagtgccataaagtccttcttgagacatttgctcagcagaaagctagcttgtgggcactgtgaagcccttggcttgttgtcaatgttaattgttcaggtaaggcttacaaagtattgaggacaagtaggtggtaactcccttgatattttccatctcattttccattgttttcttccctcttctttttggttttcatgtattcgtttatttgtttttaatttagaaaacacaatcgctaaatatgtacatatgtgttaaaaaattaatacttgacccgtataagaactaaagtcatttttcaacaatttatttctagctgtatagcaacctcaggttacatattgaatcattaaaatatcagtgactgaactgagatactgtgtacatacacatcacatatcttagaaaagttaagccttctcttatggtagacatctggagatattctctgaataaatagtactaagaaggtctgacaagagtggcagccagccgtcagaccagtaacccacagctgtatccccttgttggtgaggacgccaagccaagagcgaatgaagtatctctttgggctcagccagagggcaacagagcttcagttacattggagctcaaatcttcagggagctcaaatcatcgaaatcttcaggggcctccccagtgtgacttctgttttagtcagtgcaatattattacaatgacaaaaatattttatctctgtactaccctttgggactaacatcctgaaatgcattcacagggaaaactaccatgagattttaagtcattcattgcatccctctttctgaagccactgctgcttcttcgtttactgtattcaaggaagatttgcaaaggaagttagcatcttacattagtggtttagcttttgccttaagaaacagccattctttagcaggaggcaaatttattctctggtagaaaaccaaagagaaaaaaaaaaatgagatgagatgagatgtcccaatgtcctgatttctccttgaaacatttgcttctctgggaatcttttctacaggcttcaaagtaagccagtcttttgttgttgttgttgttgttgttgtttttctttttcaattgtaagctagtccagaatgaaaggaataccagataaggaaggcaattagatttctcctctcccgtgtctctcgtgccccttagtcttggcccaatccctgcattcatttgtgattggaatcggctactcatcccaccagctgaaatgcattctgagaagtgggaaatgaatcatgaaggagttcattgtaaggttttctggtccagtgggatttctgtcactgcatgatttctgaaaatatttgggaaggctcatcacaaccttgttggggttctaccggtagctggagtttcggtgattacacctggctgtagtgtaatgaaaggtgattgtcactgagtgtttctccttggtttggccctctcctggacagtcccccaaatgaccttgcctgtccctctccagcattcgtaaagtaacttcctgaagcaaacactggttgtcctataggcagcaattctgaagtcttcctacccatgctgcattgaaccagcaccaaatcctgctggtatgtgcaaaattctaagtaccagctgcctggtgacaggcccctgagctgagcctatttctcccttactgacccttgtgtgccagcatctcacctccattacacagatgggccagttcatactaatgcttgccgattgctgcctgcaatttgtctgtgcatgtggaggtgcaatttgttgtcattctctgtgcccaggttcatctgccagttgccaagaatatcaggcaactcagaggctcctggaagcatgaatgagaggaggctgagagggaagtctttggctatttccgaagtagagagaggatttaaaacagttagtcccaagtggcagcgctaactgcctagtgtgaaacatttccttaggggaatgctcgagacactcctgaaggacatttcctttttggctgtaactttgaagcatatggagtgtacacagagagacctggctcagttctcttggtagatccagatgtcttggaagagcatcccaaagacatcaccagtaatgaggactgtgccacatgtggccgtgttaaactctgcgatgaatttctcaccaagggttgagttccaccacacccgttttctcattacagctttctctgggcccagccacctgtattgtgtatcgttctaatgagagcacaatctactctctcagcttgagagtgtttaaatggaatgaccagttgtgtaggatattttcctgaataattaattgatagatattctatgaaaaaagttctatttttgagaagtcattgattcagggaatgcttgtgttttttttttttgtttttatttttgtttgttatgactaattgattagtgtggaacttggctgtggactgatgtagaattgttttcagtaattttgccacctagtgaaaggtttttctcggctctttcctaacagcgactatggttatgagcgacacagcaatggccagtgcctgccggcattttggttcaatccatcctctctgtcaaaggattgcagcttgggacagagttacctcaatagtactgggtaagtgtctggagtagtgaccttgagaggccaacctttgctgcctttcagcacgtgttatactgacagaattacttctgatcaaggaccaagcatatttccttacagcacaatgtaattgcttttgttcattttaacaatgaagcacaactttgcactaatagtgcaagtttcatgtgagaataagattccagttgcaaattgaaaaaagagaaatgtttcttgattgaagatcacaatgatgatattaaaagtgtcttcattttctcgacactttgttttcaagctatttaatcctgtgaagttaccttttaccgtcattgtatccatgatgaggaaggccaaatagatatttaatatttgcattttctgttttatagatgtggaacctggaatcacaaaaggaactcactgacttttcaaaagtatactagtgttaatacgaatgtattttgctttctctttatgttcagtcttgacacatttaaacatgcattctgacctttgtaaatccagaatcacattctgaaatttggtatttaatattctgtgtcatggggcttatgcaatattatttaagaaataccataataaggaaaaaaaatcataaatttgtctcaaatgtagtaggtatctataaactttaaaatagtgtgtagaacctatttaaattctgattcaaacaaatgatctgtaaaaaggcacatttgagccattgaggaaaattgaacatatactaattcaggtaatgtattagttagggctttccagagaaacaaaaccaataggatgtatatttatttagaaagagatttattggccaggagcagtggctcacgcctgtagtcccagcactgcactttgggaggctaaggtgggcggatcacttgaggtcaggagtgtgagagcagcctggccaacatggtgaaaccccatctctactaaaaatacaaaaaaaaaaaaaattaactgcacatggtggtgtgcgcctgtagtctcagacactcaggaggctgaggcaggaaaatcacttgaacccaggaggcagaggttgcagtgagccgggattgcaccactgcactccagcctgggtgaccgagtaagactctgtctcaagaaaaaaaaaaaaaaaaagagagagatttattgtaaagaattggctcattcgattatggaggtaggtgggtcccaagatctgcagggtaagtcagcaagctggagacccaggagagctgacagtatagttgtagttcgaatctgaaggcctgaaaccatagaaccaatgttgtagttctagtccaaaggccagcagacctgagacccaggaagagcctatctttcggttcaagaccgaaggcaggaaaagaggccagtgttccaatatgaatgccatcaggcagaaggaattctctcttactttgggaactgtcaacctgctgaattcaggccttcagctgattggatgaggcccaccctcactagagaagtcaatctgctttactcagtctactgacttaaatgttaatctcatttaaaaatacatagaagtggccgggtgcagtggctcacgcctgtaatctcagcatttcgggagggtgaggtgggcggatcacaaggtcaggagatcgagaccatcctggctaacatggtgaaaacctgtctctactaaaaatacaaaaaattagccaggtgtggtggtgggtgcctgtagtcccagctacttgggaggctgaggcaggagaatggcgtgaacccaggggaggcagagcttacagtgagctgaaatcgtgccactgcactccagcctgggcggcagagtgagactctgtctcaaaacaaacaaacaaacaaaaaacccacagaagtgtaacatttgaccaaatatctgggcatactatggcgcagtcaagttcgcatattaagttacccatcataggtgatattaaagaattatatatttaggcatgataaagtcattttggttaggctaagaaaaaaataagtcttattttttagagatacatatttttgtgagttttgttttaatgtgttaaaaagcagataagtattgataatttttggagatgggtaatgagtacatgggaatttattacattacttttcttcatgcatatttgaaagttctgataataaaaagttaaaaagaagctattgtggtagcacatgcctatagtccctgctactcaggaggctgaagtggaaggatcgtttgggtccaggagttcaaggccaccctggacaacatagggaaacccccatctattaaaaaaaaaaaaaaagagagagagaaaaaaaaagggaaggaagaaggagaaaggagaagtaaggagataggaaccttaccaatcagccagttttacttgacaaagccccttctcctttcttgagccagctacagtacagagaatccacttgagggggtgagacttccatttatgtactctgtatttgaaattttaaatgtgtttaatttttataaaagattatcaaaataatagatactattcttttcaaggaaggaaaacacatagaaaaggattgtaatgattcctatttctgatgttagggattcctagaacctttgaataaaggaataagctatgatttttttgaatgataacacgacatccaaggaaatataaataacacttttatagcaatgggtcagtgaggtcttagcatagtaccatggaggaaaaaaatgaaaaggttaataaaataactaaacttaatggggaaggaatgcaaaagacaggagttttattacttgctggtactagcatgtttagatactgtaaagggcattggaaacccctcaagctaatttaagaattgatttttttttttaaccagctcaatcagtcaaggaagttatattagtctgtctttggtattgatgataggaggctgaaacacagagggatcaaattgttccagatgctactcaatcatagaccaaggctgaatgatacctgtgacccctcactcttcagttcattgagatcttttttttcctctttgtttttgagatggagtctcactctgttacccaggctggagtgcagtggcacgatctcggctcactgcaacctccgcctcccaggttcacgccattctcctgcctcagcttcccgagtagctgggactacaggcacccgccaccaagcccagctaatgttttgtatttttactagagatggggtttcaccatagtagccaggatggtcttgatctcctgacctcgtgatccacctgcctcagcctcccaaagtgctgggattacaggcatgagccaccgcgcctggcccatctgagatcttataaattctgactaacatcaaataaaacatcagtgacgattaagtaattttatattcaaaaagaataccatctatgccatataaaattaaaatcataatgtcaattaaaatgtgacttagcaataagcatccaggtatataaatgttggtcaatgcagttgttatgtttagtagtcacgaaattacaacactaccttctaggactccaccttaactctcaggggcctgttcatttctgtgggtattacacgatagcatctgaccccaaatgatttttgttaagttgccacgtccactggtttcgtctgttccgtttaaagattttgcagaaaagcatcagcattggtgagcaagctagtgtaaagagaacatatgataaataccagccatcagcgggtatggtaaatgtcctgctctcataagtaagatgctcacaggtggaggagtgaatacccaaatagggtcttatacactaaagtcacgggagtggttgtcaataataaccccactgatcagcatgttgtctaagctacacattttgcattaggaacacgaagacccttagctgggacaaaggcctgaaatcatctacaaagaaggcctcacaccactgaattcacattagcagtgtctgtagccaactcaagagttggcaagaggtaaaatgttggtgaacttggaaaagatggaaaagaactttctgcctcccttaatgtcacttcagcccctcaccacagatgtcatttggctatgtgttgattcagtggtattttataagcagattcagtatataatcttgtagccactaataatgctgacactatacatttagatttttacttaaaaaatatttagttacaaaataaatgtgtatgttttatatgtttaaaagccaatttacatcatcatcccaatcctggccccctttccccacacaactgtgatctgtttgatatgcatacttctaaatacttgtctttgcatttgctagtaaatacttgtcccaagagaaaatacacaaattaatttgggaggttgtttttatatgtgatttcctactagatacattgttcttctattttcctttttcattcaaaaatatgtcttaaacatctttctaagccagagtatataagggcactttctcatttctttaatttcatagtattaagtattattataatattatcagttatccttcttccatggatgtttgggttattttgttttttctgccactataaataatgctgcagttaatattctcatcccataaaacttgttatacaaataatacaaagataattaagtctcttttggcaattggaggtgtttctgttagctcataatgcaaattccactcagccaactgggtacgtctcagacctgggtatcagacattgccacatctctcccttgtaagggttaaaacactggcttcctgctcatgggctgcctgtgagtcccaaaaattagagattcatttgtattaagtgccgtcctcctttaaaattcaaatgccagtggattctgtaaaggaaagctgaggggaaggagaagtaggatttagccaaattaataaggtgaggaaggtcatttcatgcaaaaagaacaagaaatgatcctggggaagggccacaatagtagttttctcaaggacaagcccagatgccaatgcctgcatgcttatagagttaagcagccactgggaaccctgtgtccagtgccattttaagccatccatggtcacctcatgctcagtcagtgcagaatctgtattagcctcagggctgggatgaagtgcaaaggaatcgcaagtgtagggctggccagagagtgagccccttcataaatgttgctccctgggcacctcatttgtctcacacttttcttacagcatagctcatgatacagacatgcagtgggaaaatgaattaagtggggtgaatgaccaaacctcccagcatcacctttctgagagtttatttggaagcatgcaggaaatcattcctttaaaaaaaaaaagttcttaaataactcactttataaatgtctatggttactttcactgtcagcttattaccctgtgtatatggcagtgttctcaggtttacctgcttctccatgatggggaaatcctggcatcggttattattgtgcccaataaaatgctattttgatgagatgccaaaatatttatcatctttactatgtagaagtgaatggttgcacaatttttgttttagttgctggctaggacttagaaaggatggatggaataaaaagtgaacttggtgcagaatgtccctccaggtggctgtaaccaccagtcctgctccttggtccagtggcgtcagggtttctcatacccacacagtggaacagtagagcctgctgtgttctccacgattggctccctgcctctattcagcctctgtcctcacagcttctacatgtcatttgacatgaaggtggaaagcaaggaggctggtactggggccttagcctgttagggattgagagtgaaatacaattggggatgttttgttcggtgaaaaagtgagtaattggaatgaaacaattaaggatgttcaatctaacctctgccatttactgttatgtttagtaagtgactttgtttccttgaccttagttccttaacctataacattttgctatttgccttcagaatttgattaaatgtcacactgtatgtaaagcatgtagcacaatgcctagcacatagtcatcaccttacaaaatgtgtgtcatcaccaatagttattgtctgaagactcctctagagtaaagaaagaagggaaaaaacttacttttattatgaatccacagtccagacatgtatttgatgtttaattgtcactgcagtaataatatctgagacatatttaatgtaagtctctgttttctcatttgtaaaacaaaaatagtaacctatgcggctcataaagttacataattagaaagtgatgaaagcactgtacaccaaagcacgtctgtccctttatgccactcaggccagataatgtgtttagctgattactgaacgagttccttttgctcaaataaaatgaaagcagtattcatttgtattttatttcatgttagtgccgaaataaccccaaatttattcctctttgtttctctttcggtatctataaatatctcagtatgcacatccacaagcacaagctcattcagtgatacttatatatggttaaatcttgtttatactgttttggaaccggggagcatactgcaaaatttaagttgctaaattaactagcatgttacttgtttcatgccagtggtaaaagattctgtaaatataaaataaagtgggcagtgggttggtttattctaagaaaccaagataatcttctcaagggaaagatttcttcctgctattaagctggagatatttctagaggtgctttataaagtacgtttagaaatttctatctgtagagtttctttataggggccattaattcctcatggaagaaggtacaaagacagttcttactgctcttcagggttagtttctcaatatgcaatggggacttttttttttttttttgagacggagtctcactctattgcccaagatggagtgcagtggcgtgatctcagctcactgcaacctctgcctcctggattcaagagattccaatggggatatttatacaataaagacatttttaaaaagtttaagttaggtatctatttacaaatatacagtgggtccaagaaaaaatacacacataaattctagcaaaatagttatgtttatactatcaagatacatttggaatgttttaaaagatgctttttataaataacttttggtgtttcatttcacagtagagtgactatagttaataatagcatgttgtggatttcaaaatagccagaagagagaagtttgaatattctcaccacaaagaaaggataaatgtttgaggtgatggatatgatggatttaatcattacacaatgtatatatgtatcaaaacatcacactgtaccttataaatatgtataatatgtcaattaaaaataaaaacttgaaaacttcctctctacataagccataaaacacttagattctgctaacctgccacttcctggatttgctatttccagtgtctctggagctttggtcttttccaggtgattctgttttggttgccttgtgggggttttgatgtttggtctgatctcctctcaaggatacttttcagtgtgcgtcaaggagaataattggccctaaaaatggtgcatgtgtttaaagtccacaaaaaggcaatcacttgcattatttacagactcatcactgcaggggcctctgtagctgttttctagccaagaaccatacagcctcactgcacacactcaataattgttggttgctacagagtcaactttctgaagaaaactttcttaagaaaacctttcttaaatgaggttttccatcttttcatgcatgacactggggttgggaaatgaaggaaaaggtgaatatcactgtacatggagacttgctttctcacatggcgattcttgcccacatcaatggccttggcattaacaattcttatcctggtgctatggtacagtggcaagagaacaccagacttagtccagagtcccagacgtgccagtcatcccctgtgtgaggtgcaactctctaaactgtgtttccttttccttatgtgaaaagcaaaaggatagtgttggatgatcttagagaccccttcaagctttaacatttccatgaccaattgaaaggattcaatattagaattccttggactgtaggccctcaaaagatagaaaacaaattcatattaacttagtcgtacaactggtaggctcagatagtggattctgtgagccattctcaatcagtatgattctcgatattaagtgatttagtgaagtgtgtgtggccatatgtcccagttcaccatttcatcaagctcatgttcaaaatgaagtcacattcctattactattcaaattaaatgacgtctgcttccatcctgcttaatgcaagagaagctttcttctttttacctggtcttctgtcttatgcctatccgctaatttctaggtctgtttactccattgaggggaatagtccaaagagctgttgccttgaagagagaaacttggaaagcctgcttagccagccatggaagtctattcctgattgctgatgctatggctgctacataagattattgttgatatgtggacacattgtcactcctgagcatactttgtcacatgggatcccagttaaagaataaatgaccattttggggctgcctgtgtctattgatgaagagtcacaatggttaatatacagccaccaatgaggtctgtcagcctggaagtctggtataatccctattctggtatatataataggagatcaggaaatctaggctgccaccactactgctttttcagaagcagtttctctggatgcaggggtagaagaatctctctctaccctaattgttaagccatgccatcgtagccctgtatcttcatgtgagagatctatagttacatagctcttttaatttacacacatgaacataacacatatagctgttttgtcattgcacacctacattactaaggtggtggatttggaagattttaagtcttagccacatactctatcaagaattagcccccttctccatccccaaggcttccttcatttcctgcttcattaagcctagtgtcattgtaacaaggcagtattttcccttgaaagcaaatgcacatagcacaagccaagaaattaaactatttatgctttttttttattgtgagtgcaaatgaggaccaccgttgctcaatgacagtaacaccccctggggtacaagaagacctagagttccagtttcaccttggttgcatgtgataactaccgtgacaaaagggaagaggaggtttcacaaaaagcatgattttgaagctgatttttttttttttaaggatgagtagaagtttgccagtaggaaagagcatcccgggcagaatgaacagcacaggcaaaagaaggcatttagtatacagaatggcttggttcagggcgcatgtcaggccatggatgatgctagaaaaatgcattgaggtcaggtcgtggatctttactttaaacctgaactttactctttagaataagcccatgggaaattttgaatgattttaagaaaggaattgacataattggatttcatcttaagacgaccttggcaataagaacgtcacttttattttgggggaacttgaaatatcatagcaagttaatatttgatacttaaatacttttttctaactttttatattttaatatttattaacgttctaaatgtgctgaaatctatgctaagcccttttcaatgcattgtctcatttaatcttcccaagaactttaggaaaagattccataattatccctaatttgtaggcaaagaatcaaagatttgagagaggatgggtaaattgcccaaattcatagagtaagagaatgaatttaaactccgacaatttggttctacaacactagttttaaccttcaggtcagtagtgtttatttattttcttgaaaaaaatacacacacacacacacacacacacacacatatagtgttatatatttttgagatatataatatatatttattatatatattatttcaataccttttggagtacaagtggtcttcggttacatggatggattgtgtagtgatgaagcctgagattttagtgcatccgtcatctgagtagcatacattgtatccaatatgtagttttttctctgtcaccctccttcctccctcaccctttctgactctccaaagttcattataccactctctatgcctttgtgtacccatagcttagctcccacttataggtaacaacatgtggtatttgattttccattcctgagttacttcatatagaataatggcctccagctccatccaagttgctgcaaaagacattatttcattctttttttatgactgagtagtattccatggtgtatgtacaccacatttcctttatccactcatcagctgataggcacttaagttggttccatatctttgcaattgtgaattgtgctgtgataagcatacatgtacaggtgtctttttgctataatgacttcttttccttttggtagatgcccagtagtgggattgcgggattgaatggtagatctaattttagttatttaagaaatctccattctgctttccatagacgtggtactaatttgtactaatctacattcctaccccatatataagcgttctcttttcagcacatccacaccaacatctattgtttttgacttcttaaatttgtagtctttaaccttggctgcaaactagcatcaccaggggaacctaaaaacaaaaacaaactgatccccataattctcaattaaatcagcatttctgtttgcagagcctgggtatccatctattttaaaagtacccccagctaattccaaagggtagacggggttgagatctactaagctactaagctactgtcaccttagtatacactgaatactcaaaaacatctgtatcttgccatcaccacctcaaaatgtcaaaaaaaaaaaacctactaaatagaaaagtcacagattacaaagacttttaatgcttccttccagttttactttcacaaagaaaaatattgccttcatcttttttcttttcttttttctttttttgagaaagaatctcgctcgggagtgcagtggtgcaatctcagctcactgcaagctccgcctcccaggttcacaccattctcctgcctcagcctcccgagtagagtagctgggactacaggcgcccgccagcaagcccggctaatttttttgtatttttagtagagacaaggtttcactgtgttagccaggatggtctcgatctcctgacctcatgatctgctcacctcggcctcccaaagtcctgggattgcaggcatgagccatcatgcccagcctattgccttcatcttttttaagacttccaggtagcaaagaagcaaagtcaaagagggtaggggcaaaaaggaaaatgtgacagaagcatatcaaaatagggaggaagagaatagctaaaaattggggttgttggagtagtaagatcctatctactggtgagccatcggtaatatcaaaggcacatttgcagaatgtttccttttcagtaattgtacaaagactcccttgccattacaaagcacttttcttcttggcagattgaagaatgctttaccaactaaatgcatcccagtaatattcagagcgcaggtccaacataatcataagttgccttgttattacggaggtagcagccccatttaataacatattaaatgcattattcatttatgtaactcagacccagggacagctgctgggatgaaaatagaaccattctgtaatgcaaaaagcaggtgtgtgcttacttgagtaaatgaactctgtattacggcacaattttcttctaaatttcagggacaggtctggtagggctaatgtgatgccattttcatacaggaaataaaatggtttcagaatggtttttaatgagcatttaaaaaaattaccaacagccttttctgtggcatagtcccggggggatggattcgtgctttggatttaagcagaactcctgttattgcaggattcaggaaagcctaaggtaatgattgatcagaacagtgacaaacaaaagaatattctctagctgatgatgctagtggtgatggtgaaccagtgtttctatagctgcccaccaagagagaatcacaggtgtgcttggatgttgagtgattaaaaatcataacctgacttcagtttgcacagtgccttgcctctgaaacctgtagacagtctctgatgcatggtgaaactcactgagatgccacaattaacctgggtgacatcactggtcatttttttgctactattgctggtaccaggatgctatcatacaccagtgtctgcattttgtgttttatttccttctctctctcacctgcccttattttctcttttacatatacttaaaagcaactacaaaggatttttaaaaaaataaatatcagatgaggccaggcgtggtggctcatgtctttagtcagcactttgggaggctgaggtgggcagatccctggaagccaggagtttgagaccagcctggccaatatggtgaaatgccatctctactaaaaatacaaaaattagccattcgtggtggcacatgcctgtaatcccagctacttggatggctgaggcgagagaatcgcttgaacccaggaggtggaagctgcagtgagccataataaagccgcagtgagccaagtaaagcctgggcaacagagcgagactgtctcaaacaaaaaaaaaaaatcagatggaatgatgttcaaattgcttaggcataacaatgaccaaccagcatgggcagttatcttatgtctggagcggagttttggtgaccccctcataggctaggtgttaacccataagtttcctaattgtgagaagcaaggactctaaggacagggatcagcatagctgggttggtaagtgagatgcttggagggtttggggatgtggtaataaccaattattatgcagatatttccacatttaaactggtacagttactggtatggacctcctgattaccagctttgaatatctggaacacaaggaggccctcaaggagcttgaatttcacacagtcacaccaggaagaaaatcatacaaggtataaagaattcctatcaagtaaatcgtaaggattcttttaagggtttagaggagggataatcttactccatttaaagtagcagtgcagtagtaaagaggggatgtgtgctagagacaaattgtctaggtcctggctatttgatcttgagaaaactagttgacacctatgaatctcaattcttccatctgtttattgggaataattacatcttccttattatggatacttctgaagataaatgagttaatttatgtaaagaacttagcacaataactaggacatagtaagcactctctaaatatgaaattcctgccattttactcttatattcagggaaattgtcttagagaagacaagaagtaagctgtaccttaaagggtgggcaaattttaggcagctgctagggcatgcaggaggacactgaagcagaaagagagagaggaaaacagaagtactctcaagaagattaaaaagagaatggacatgggcttatgagggagaaagagtccaggaaagcagaataaaattagctagtgcagggcttcatgcccaggcctacagaatttacagctatcctaaggtcatatgaagtccatgaaggttttgaacagagaagaaaaatagtaataatattaaatagaaataattggtaatattttatgagcacttgcagagtattaggatacttttaagtactctgtgtacattaacccatttaattcttacatttaacatatgagataagcattaataattgacattgtagtgatctatagtgttcaaagtacttttccagacagtatctcctttgactttctcacagaggaaaggacattcactagacttaaacgcattggaaaactatgccagttttgtaaataaaggttttctggaatccagctgcatacattcttttatgtgttgtctgtgttcaccttcatacagtaagtgcagagataagtagttgtgacaaagtctacataacctgcaaaactgaaacattcactatctggctgtttatataaaaagtttgctgacctctggtctagaagagtggaaagtaagctttgattgcatcttatttgggctctaccactaactctaggcaaataaacttgggaaatcaaatatatacatacataaagtggttgctgcagacccaacagtataaaacgataatggctagataacgctgaacctcaaaaatcttaaaggtttgtcatcctaaaattgtacattttaattttctatgaatctgataaattatataggttaattctgtagaataattttccctgttaaagctaaaacaagaaataagcaaaagagcatcaatctgcaaaaactgaagtctctttaatgtgaggtttgatcatttagccagtataacctctcatgaaagactgagtagaaatatccagtttagccagtgttttctgtgctacaccattactgtagcagtctctatgagatctgtgaatgttgagtcatatatctatcataatctattttttctctgaattgtaaattcctttgcgatatttattactcattctagtccttaattatatagcctttgaattatctcctagattagccatctatgtctctccaactagcttataaacttagtgagagtaggggctatatcttctatttctgtgcatttcccacaacttcaaaatgaagtgattcattaatttaatagatgaataaaactcagttacaatgctagtaatagatacaatgtgtgaccatgattatctctctgttgggtgctttatatgaattaaccctactcctcatagtagcatgaaagatggttaggtgcttactgatggtcctcagggctaggcactatgtctaattttaaaaagtgggaatgattcacattataatgagctggtttacgacttgagcttttttccatttaggtacaggaaggtggtttccaataattgcactgatggcgtaagggaacagtacactgccaaaccgcagaagtgcccagggaaagccccgcgggggctgcggatagtcacggctgatggaaagctgacagcggaacaaggacacaacgtcactctcatggtgcaattagaagaggtaggactgattcctatctcccccctactttctagggccagtgatttttcttaataaaccatggttttgtttccatatctttttcaactttctccattttagatgctatttaaaaatttttattttacttttagttccttgtttttcttttattatcacttcaccttccctgatctatttctttaattacttacatttcactgcaagttattcttcactcatacttaatctcttactcttggaggatctgttggatttaatcttgccttattggcacttttagcaaaatccattttctcagaatacataaataacattcctgaaataatttaatacgtacatatactaaactaacctaagagatgctaatactttcatcccctctcagcctgcagggttttcttttccaagggcaacacgatggtcatgcatatagcactgaggccaatgtaaacataattgagtgtaatttctttggcagttaagagtttgtattgtgtagcacctcagggatatcattaaaagcatacattattatttgccagattatggttgtctgaaatgtctgaaatttatatggtggataagatgaaatttatcttatatattttagaacatacacaggaattctgtcatcttgtaaatggggaagatggtctccaaaggataagtacttacattaaatcatctcgattattaaaccaaacagtcctgtcctcagtcacgttttctgggtacctaattatggttatcattgtgtaaagctctgtaaatatgaaggaattttaaaggctaacaatgacacccaggattaaaatacataacattgacttccaacttcctctgctgatagtccagggaccctcagtttttaccatgtataagaaaatcacctggagagcatttggaaacacagttttcttggccacatccttaaagattctgattcagtaggttggagtagggcccaagaatatacatttctaacaagttcacaggttgtgcattgtgcattgtgcttcaagaaaaacaaaacagtggcaaggctggggtatagagaagtcggaggctctggagtgtgacaagaaggtggaaagatgaagcaattatgattgctttgtcaggtttgatgaaaatttttagtattttgattctcataggaaaaataactgtgaaataacgagtttgaaatctagctcaaacgatgtgcatatctctggtccaagggccatttacagactgtgtaaccccatactcctttcctgattatctccttgatgtgtgcctctcaattatatccaatcttctaaatactaagatgcccaaaaattcttcagttggaactagaaaaacacaggccaatttaggcaaattggagttgctcatatttcacataaataaactctggaggtttctgcttgagactatgacagattagcctgcagtaaaccaaatatatgcgtatatatttagagcaagagggacagagagagagagaagaagaagaaaaatgaagaggaggaaaaggaggactaggagttaagagaactatcaggaggattgagaagctaaaattcctttcttaagagatgggaaattgactgcagtgagtccaacattttatgctatattttcctttcgagaactttagcaatttatatgccacactatagaggaggttcagatttcagatttccagtaaaaggccgagtagaaagtgttggctaaacaggtgttaataaactcacaaggcttgggagataaaaattggactttgaggatattccaaagctaggactgatgaggtcatgtcccagggagaaggaaagcacagggaagcagcacacatacagggcctttttcctccctgaggtatttcataatacccaagtaacacaggaaacatagaaagcactcaataagaggctgagaagttaaaggttttagaagtatcacccttcggggagataaagatttgaattcaagacctatcaaggaggagggccctggtgaactatctgagacttggttcttggaacttctggaaatctctatcctaggagtgaaggcaaacccaaattagaacaagccctctgtacccagaaatccaatctgaaatcacttcagtctctgaatcgattagagtgactctcttcaactctaaaatgattgttagaaaccaaagtaaaccttctttagtggaaaataacataaaccagagctttacctaatatttttcatataaaatgttgggcatttagaaatatccaagtatatcaagatataggaccaagaggggggaaaaacagaaaagaacaacagttggatgatatatagtgtttatttaagatatcctgtaaaacaacaatgattattatgttcatgaatgtgagaaaaggtggaaaattgaaccccagagtggtaatcaataagaaataccaaatagaaattgtaaaaataaagatataataactgatattaagaacttaggtttacaggaaattgaacccatatgaatagaagttaaatggaagaaaggacagcaggaaatacgccatctagagcataaaagaaagaaatagaatatagagaaaaaacagtaagagacaaatggaaaatgataaaaaggtctaacacagatgcaattgtagcctcagaaggagaggagagagataaggaacctgaatcatttttgaaaagatcagggctgagaattttccaagcctgatgaaagatatcaacatattaacctatagatttaacagaatcagcaaactcaagaagaatatgtgcaaagaaaaatcactgagctattacattcaaactgctgaaatctaaaatcaaacagaggtgtttaaaaagtccagaagaaaatggaatgacacctttgaagagctgcagaaaacacaaatagttttttagataaacaataatagagatattgaaacaagaaatgttcccttgtccccctaacaggcgtgtgatgggggtgttgctcgcttcttcagtgtcccactgctcaaacctctaggggagcatacaggggcaggctgcagggctctgaccccacagcagtgtctaggggtgaatgtttacagctcctgaagccccagtaggcgtttgctaccatgtgctctttctgttttgcggtctgtagacagcttgtcttaaccagctcaattagaccttctaccttgtcgcaaggacagacggctttctgtatcccgggttcttaccttggtgcactggaagaatcggatcacacctgggcttggagagtgagtgcaaggttttattgagcggaggtagctctcagcagatggaggaagccagaaggggatggagtgggaaggttttccactggagtccggccactcagtgccccagctaaactccgtataggatagttctcctggtcggtggcctgctggcatgctggtgcctgtcggtgcattcctctccatgtccatctgcctgtgtgtctgcttgctagggtgtcaggggtttttataggcacaggatgggggcagggcaggctagggtggtcttgggaaacacaacatttgggtgcaaaggcaggagggcctgttctcacctaggtcccagggcaggggcccaggggtggagccctagccagggaccaacgcccttcccccacttctgtatcatttaaagggaccattcccttccctttccagcacttccttccatagcaatatctgtcatgtaaaccaatgtctataaaaagaaatgctaaaaataattcttcacacataaagaaaatgacccagacagagacacacacacaaaataatagaaggaatgaagagcaagaaagggggtaaattgaaattaataataactgtgcagaccaagaatgataatcagctgtgggatttaaaatatatgtagcattaaaatacatcagaataatagcacagtatgtggagcgaattaagtggagttaaagtagtttaaggttcatgatatatctataaagagataaaaatactaatatatattagactccaacgtatccaaaatgtgtgcttcaatatctagagtaacaactgaagaagtagtaagagaatcttatcatcaagctactgacaggggaattacagtaactttaaaagggtttcattaatccaaagtaagacaagtaaaagagaaaaaaaagaatataatacagttgagacaaatagaaaacaaatactaaaatggtagatataggaatggtgcggtggatcccaacattttgggaggccaaggtgggaggatcatttgagtccaggagtttgagaccagcttggacaactaccaaaaaaataaaaataattaaaaaaaatagccaggcgtggtgtcgtgtgtctgtggtcccagctacttgggaggctaaggtgagagaatcacttgagcacaggagttcaaagctacagtcaaccataattgcgccacagcactccagcctggctgacagagcgagaccctgtctcaaacacattaaaattaaaattaaaaaacggtagatatatactcaaatatcagtaattatattttgaaaattagtgatttttgtcacttcagtgctttttgtcaggcttaagaagtctttatctaaaccaacattgtgaaaaaagtcataccacaagatttctctttaggtttcacattaatgtgtatgatttatcttgaataaagctctttcaggtttctatatttcatccacatgcatatccaattgtcccaataccattgaaaaactgttcatttcacgctgaattgctatgagcctttgtcataaatcaattgactatttgtggttccatttctaggcactctattctgttcccttgtgaatttaaaacctatcttaattactaatttcaaacacatgatattttcactagagttagggtgagtcttgatacctggacatataaatcctctacacaagtagaaaattgtgtgtgtgtgtgtgtgtgtgtgtgtaaaatttataatagcatcaaaatacaacaaacatttatactcaaatctaaaaacttattttcaatagcactacccagaaaacaacacaaatttggaaataaattttgaaaaatacctgaatgaatggagggatgcatcctgatcatggattggaagactcagtattataaaaagacatcaattttcttcatattgacttgaattaaaagcaatctgaataaaaatctccagcatgttttgtgtattaaaattgacaagatcacaaaatttacacaaaatttcaagacctgaagaatagcaaagatacttttgaaggtgactcacaaatttggatgactgacattaccatatatatatatatatatatatatatatatatatacacatacaaacacacatatatatacatatatatgtatgtatatcataaacaagctgaacaaggagagtcaagaaacatatatacatgcatatattatatatatatagacacacacccacccactttatgacaaatgagacactgcagtacagtggagaaattataatcttttcaatacatgggtgctacaattttgaatatccatatgggaatacatgaatctttatctcacataatatacaaacataattataactggattgtcaatcaaaatttgaaagctaatactaacatttatgtatttatttattttttttgagtctcactctgtcgcccaggctggagtgcagtggcaagatctcagctcaaccgcaacctctgcctcctggggtcaagcgattctcctgcctcagtctcccgagtagctggaactacaggggcatgccaccacacccagctaatttttgtatttttagtagagacggggtctcaccatgttggtcaggctcgtctcgaactcctaaactcaagtgatcctcccaccttggcctcccaaagtgctgggataacaagcgtgagccaccgtgcccaacaatactaacatttctaaaagaaagcacagaagagtatcttcatgaccttgtgttatgcaaagacttttttaaaacagcaaagaaaacccatttagtataaaggaattataccaacaaatctctttataattatactaattttatttttatttttatttttttgagatggagtctacctttgtcacccagactgaagtgcaagtggcatgatcttggccgcctcccaggtttaagcgattctcctgcctcaccctcctgagtagctgggattacaggtgccagctaccacacccagctaatttttgtatttttagtagagacaaggtttcaccatgttggtcaggctggtcttgaactcgtgacctcaagtgatctgcccacctaagcctctcaaagtgctgggatttacaagcgtgagctaccacgcccagcctaattatactaattttaaataggactacattaaaattaagaatttctgttatttaaggcattatttcaaaaataaaaaattaagtcctagaggggagaaaggtatctataataatacgttttcaataagctattattattaaattaagccctagagggaaaaaagtatttgtaataataccttattgaaaaggtattattacagtaataaaataataaaattattttgttatgttttttattatttttattatgcaaaataaacataattttaatgagggaatcataattagaagagtataaataaattctacaaactaataagggaaacactggtaactcaacagaaaatgcacaaatgactcagaataaccaaatagccaataagcatatgaaaaaattcggaacatccctatgtaatgcaacttaatttataataatatatcactgtgcaccatcagaaggtttacattttaaaagactaataataggctgggtgcagtggcttacacctgtaatcccagcactttgggaggccaaggtgggcagatcacttgaagtcaggagttcaagaccagcctggccaacatggcgaaaccccatctctactaaaaatacaaacaaacaaaaaacagctacaaacaaaatgagctgggcatggtggcacgtgcccgtagtcccagctacttgggaagctgaggcaggagaatcgcctgaacctaggaggtgaaggttgcagtgagctgagattgcactactacactccagcctggttgacaaagtgagactccctctcaaaaaaaaaaaaaaaataataagacaccctctcaaaaaaaaaaaaatgctaataatatcaggtgttattgagtatgtggagcatctggtcattcatataatgctatttggagtgtagatacatactgccatttgggacttgtttgacattaactgctctagctgaacatgtataccacctatgtcccagcgtttccacttttaagtatatactcatcagaaatgcatacacatatgcaccagaatgtatgtaagataatatgcattgcaaaagtattcgtaagagccctcactggaaacaatctaaacattcatgaatagtagaatacataaactacagtatatttacagaatggaatgtcatacagcaatgaaaaagagcaaactaaagctatatgcaaaaaacttggataaatgtcatatccattattgagctaaagaagtcagactaaaaagaatatatgttgcattattccatttaattaaaatgcaaaaatagtcaaagctgttaataattcatggtggccgggtgtggtggctcacacttgtaatcctggcactttgggaggccaaggcgggcagaacacaaggtcaggagtttgagaccagcctagccatcacagtgaaaccccgtctctactaaaaatacagaaattagctgggcgtggtggtgggcacctgtaatcccagctacttgggaggttgaggcaggagaattgcttgaacctgggaggcggaggttgcagtgagctgagatcacactactgcaccccagcctgggtgacaagagctagactccgtctcaataataataataattattattattattcatggtaatagaagggaaaaattattgttaactttggaggcggagtgattggagaactttgagtgtactggcagttttcagttggttcatctgggcagcagctaatggatgcattcactttgtaaaaatcaagttgtatatttagtgatttgtacatttttaatgtatattttactcaacaaaaagcttacttaaaaatcatttcagaaatccatataaaatatagtactttatatctaggtatttgggcaaaaaaaggaaaaataagaaaaacctttctggtatgcttagggccgaccttccaccctgtgtttacctgcaaggtgaatgtgaaagttctcttcccagagacatgagacacctgatcctgatacccagagaactgtcatcttttgaagcagcagatgtttatactatagcagagttcagaaagtttttccgtttctaagaacacaatatagcaagatctgaaacaagaactttcacttctgattagctccaacctttgtgcaaatgatagagaacacacttcagggacagaggcctggttctcatctgttcaactctgctttccatgtaataaagatcatcatcaggcatctcacactgggttgagtgatgtgggaacagattggggaatctggttcgaagatatgtgaattcatgccttctgggcacaagaaggaaaaaagataacaagtcagttcactccacttgagtgggcaaagcttcaacagcagggatgaaatctgctgcctccagctgtcagatctggtttcttgacactctgttctcctggtgcagagcaccaagccaagagcatcttctttatatcaggaggccctgaggacctcacatgtgattgtgagatgctgtgctaatgattcagactcctccttgcagaaaaagaccctcaatttctctatgaccctctggattatatacgtaggcacgggaggtgcacgtgattggcaatgcagaatgaagagacacagagtgtctctgaaaagctgaggagaattgacacttgacacaatgataataatgtgattatccaacatttattgagcaccactgttccagtttgtgagtgcttttcatgaattatctcacgtagatcttacagcaactctatgcaaataggtgttattgtcattttgttgtcattttatatgaggcacagaaaggcaagtaacttacctgagatcacacaaatgctaactattagagcctagggtctaatccaggatctatggtatcttgtctttctgttgcttctctctatggtgaaggaaccattttctaagaagaacttcatgtagctcctaagcctctgtagaaacccacggctgggattataagtagtcacaaagatcaaggagtagaaagaaaaggccaaatcatcaatgaccaaagccagtttggcctgtggctcttatattcttagacactaatcaataaatctaccaaaattttcctcctggcttctctgagaatactaatggcttgggatccatttgtggaaaaacatttcagcaaagagagatgcgaaatcctctctgggttccccctctttggaaaatgatgcctttgttgaatgcctagtgtgcctgacactgtttatctattctaaagaatattgcaaaaacataggatatgaatgcagcacccaaggaatttagaatacgtgtatttcttcagaggcttgggtataaattaagccataatattttttaattaaatccaaaacaaagacaaaaaatccctggcatgtgcccctactagcaatacatggtgtctttattctcctcaaaatccatatgagtgcatttcttatttgaatttgatccttctgaatttactttgaaaatagtgcctgagtcttgccccatttctgatatcaattctttataaaaacagggatcttctgatgtcaaaagatcatgcttctgatgcctgtaaagagcaagtcctctaggtaccaaagaaacctagaggtccctgctaggttcttatatgacatcacagtgtgattaatgcagagagggcaaaagattcacctccccaagttgttaacaatatttttttcatgtgagtaccagagcttgtgcctctatccatgttaactcatggttcaactttctcctacagtcttgtcttccttcgatggagctaggttggcttacggactgatctaagcctcttttctttgtcccagttacttgcatacaaacctctccatgtaatttccatctcctctgcatttcatctaaaccattagagacctgaggaatcaactgtctcagcaaatagttagatgtttgtatttatttatttgttctttgacaaatattttaccaagagccaattttatatcatgtacttttcattcattaatggacttactttagtttgtgggaatatatgttttggtttgactaggacctctgttatattgagttttaagtaaaaatctaatgacatgaagtagaaagtgcctaacaccttatatccattggaaataaaaaagattaataataaattatctaaatataataaattataatgcaataatttattgcattattttgtaataatatttttggcatccgccagtaaactatacatatctttaaggtaagaatcatgtcactcctgattgcagttcccacatctctgtacaatgtgcctaacatattgatagaaactcaataaatgtatgtggatttggatagccttccccaagaagcatagagataaaactgaaacttaaaagactcttaacatttgaaaaacagtcaaaacatggtaaagtcttcatctgaaatctaaatctcttccttaatcctttcctagacatgcattagaatgcatgtcctaattctagcataagaatatcaatgaaaacatggctaaaaccgtagcaaagaggagcacttcttattgacagaaaataataaaaggctaggtacactgatactagtttgcaattttacatacagtagtatgtactcaagccagaaaattacagatttaatatgtgcaagaaatgggattctttcctgcaaatagcatatggggtcaccctcaaaacctagatgacagaaatacctccataacacaattcctccaaaatcccacaacttagctcacctgatatgttactcagagagccacatagctattctgaggttgatgaaaaattccaatgtcatcaataccacctgcctcatttcctgctgcttttagggttctctccaagtgtactctcatgacagaaccttcattagcagcagaaggcaaaggagcagtcgtacttccatcccagactcactgtggcagatgcaagaagaacacacatgcacgcgcacacaagcacacacaatgcatttatgcatcattatggccttaaaaataaagaacaattaatccaagaaccaactggaagaggagtagagaagtccataaagttgagtctaagatgccggacattttcaaaccatgcctgacttttagaaagctgattgaaggtgttttgcactgagacccaagcatgcagtgagaggtggcatctctgtgcttggagactcactcaagatggatgtcctctggaccactaatgagaacctaatgagcctatagactttcaacacaataactcagcttcccagagaaatccaatgcaagaacctgaaggcacaggataaatggcaaaggccccaatcagtctgaagaactcaacaaaactgatttgggaggcattcgtttgagagaactggtaggcagaagtagtatctgcatattaaggaagataattaaatctgttttaagcagctgtaagaataaagagatgcaattctctgcataatttaagacttttaaattaaatctgaggctagggacgaaaattaaaactttgatctgtatctcattgtcttaatacttcaatttacatacaaagactgaaacttaataaggaaaattcatgattatcacttttgtgagatttaactccaaaacatgaggactgtgtcctcattagacaggtttcaatgatccgtaatttcacatacattgaaagacttatgggagcactaaagtacccacagtgtaataacacttcataagtattgcaggatgctgtcagccatcagatggtagagaagatggctgttgataaaaatttcttcaagatactcacttgtctgaattcatgacacaatttgacctgctttttcatctggagaaaaggctatttggagcctttagtggtggcacaaagggttaataaacagtgttatgttgaggcaggcatcagtttctttttctttcttgttttttttttgagacacaccctgttgccaggctggagtgcattggcgtgatcttggctcactgcgacctccacctcctgggttcaagcaattctcctccctcagcctcccgagtagctggggtaacaggcacgtgccaccacacccaggtaatttttgtatatttagtagagacggagtttcaccatgttggccaggatggtctcgatctcctgacctcgtgaggcaggtatcagtttctaagccagcttagttctgacgtagatgcctcaactgttttctccctccatacaaaggagtggaagctgatttcgatgagccttagagatttgaggctttctcctatgttattccttactccattcagcattattctctttgactctagtaaggtaattgagccacttcatttcttcttgctttttgttgttgaaggaaatgaggcaggcaatataggttgtctttagccggaagcctaatgtctgaagttcaagttggattggttagcaactctttctaagtctccacttctcactcccctcaaaactaatccacatatattggaatattgctgttctttagggtctcaaagaaaagatgtttgctaagaactttagtctgacttagatacctggctcattactgacagttccagttcggcaaacatcccagaggctagattcatgaaatagtcttcagtttggattttcaatctcctagtctgcctacttgaggccctaacaatactaatgtcccacttcatccacatgggtggtcactacccctgaatcagggtttcaccacaccatgcaatcctcgcctgagtgagtaacttcctcaggcttctggctttgcactttgccatttattattccatgaccctctgctcagccgctcagtcctcaagctggtctaccattaatgtgcagtggtaagtctctacctatgacagcagcacttgaatcagttctgcatctttacctgagatctgagcttatctcagcagctcaaattgacgttagaatatatatatgtatatgtggatgcacaataatgccaataacaagaataatagaattgtaaaaatcacagattatctgacttggaagtgacaattaggatcatcaggtcctaccatctttaatttacaggtagagaaattgaggtccaaataaacaatgttttttgaaggacacaaaactaggtcttctaattcccaggttgccacctgacttttgtagggcacctctttcacatacagcacctctttaaaataaattacacaacaacctaataatttagaagggggatgaagtgacttccagggcaagaaatcatatatccatttcatagaagaggtcttatgacttggtgaagaccaccaagtgatactaggtataaaagtttaagctatttaaacatattgactgcataatgctaaaaatagtatagtgattccagtgttataggggtggtatctgtgtccatgtgcattctcattgattaaaatgatattcaccaacaaggtaatctgtgggtgatataattatgggtgattttaattttctttgtcattattttatgtatttctgtattttcccaatgaatgtaccgtgcctttttttttctttattctaataaagctaacatatttctgttacatattttactactaggaaacctggttctatagagatttattcctaaaggaaacttcctaccatttttaaagtatatatagttttgttctaattacatagctgaatgtctttactttatgagtgaattccaaaagtcactcaaaaacattttaagatttatgtcatttggcagccccctagttttctagccagagcctgctgatgtaattcctacagccacatcatgcagtggtaacagtatagcaatgtcctttattatctaaaaagtgcttccaaagtgcaatgggtcaaggttctgaacctctctgtaccataatatctagagggagtacagaggccccagctcatagtcattatctgcttacacaagctaagtattcctcctgtcttatgtattctgttgcattttaaaccagacaccaagtacagaagacataaaagggaaatttgggattcagtcaaatacatggtactatcatccatttctaaaggaaggaccaaaccactttgtgatgttcctattggaatgccttgatctgggcattagatccagaagtatttgggtatttagttaggcaagtcccaaggatctgagtcctcttagaagggcctgaaaaaacagccatcttcatttcatctgagagaaagtgaaatgtcataaatctaggcagatgatttgatgtgttcaaagtgtgctgtctctgaaattcatggtcttgacagatctgagttctctagaaaaattgtaaaaccttctgcactatcctcttcactggcgactcttcatcccccaggtcagagcatctaagttcactgtaggttttgcttgcacagaagctcaggaggtctgcacatttggagaaagacgtgtgctttagaaaaccatctttgaataggcaaggggagaagactgacaatactccgtaattatgcatggatttggacattttagagtcatcttccagagctcagttttgaaagtgaagaaacacctatacagcatgattcaaaccagacatcctgggaacactctgtcctagctgctttggtgaggaaattttggctttcagcagtgccagcacctcttggaagagaagccagagaggacaaagaacttgcttgggaacagaagatagggcatgtgcagctgccttttatcctagactggtttttaactgttctagaaaagctcagtttactattataaaatgtcacacaagaaggtccaacacagtttcaacagttgtttcctgattagtcatctcagactttgtcaaacactcacactaccaggaatcctcacaaacccattttgtagcttctggggtattttacagagcctggcatattacactgggatcatcttacatcactttggcattcctctaaagggttgtagttagcgaagcttacaaagttctttggtttcacacatcagtgaattcattctttagcacccatctgggaatgagcaccacagagtagtttgagtgttttctgtgaacgagttgtaagagtgctggactcggagttaagaacagcctgattcaaactagtcttgtgactctaggcaaatttgaacaggtctgagttcttttagggttgaagattgatatggtttggctctgtgtccccacccaaatctcatcttaaaatgtaatccctataatccccagtgtcgagggaaggacctggtgggaggtgattggatcataggggtggtttcccccatgctgttttcataatagtgagtgagttctcagagatctgatggtcttataagtatttgacagttcctcctacaagacgtgcctgctttcccttccactatgattgtaagtttcctgaggccttccctagccatgtggagctgtgagtcaattaaatctcttttctttataaattacccagtctcaggcagttctttatagcagtgtgaaaacagactgatacaaagtttaaataagataatatatagaaagtagttgctatttctgacacagtaaactttcaaaaaatgttctctgtcttctcccttagtgaccacccaggggatcttgtagagcaattgttttccttttctattttttttttctttagtgagagagtggttcactctgttatccaggctggagtgcagtggtgcaatcatggctcactacagccttgacttcccgggctcaagtggtcctctcacttcagcctcgtgaagtgctgagactatagtcatgagccactgcacccaactagatcaatcttacttgcactctcactttgtatacaaagtcgcatgccatgcatttactacactggctgatgaaatctcttctctgcacgccagggtacgttgaactgttatttccttttccactccttgtcgagaccttgctaacctgagtctacctccctagagtagggtatgcaggataatggtgagctacttttatttcataatccctactctgcctaaatatccttagtcatacaaagaaatggctgaaatatctgatttcctttctgtcactcagtgccgcttaatgatgtgtgaaaaatcttactttgtggtcaaaataacacaaaaataacaacaaattcagttggttgtattccatcatcagtcaaaacaaagtctttgttacattgattatttccaatgtacttaacccatatttaaatatttatagtaatagtagaggtatagtgttgtattttgtaatgtttcttgtgttattcagtactctacccccttttaaatttggagaaatatttatttcccctcattcactcctcctttctttgaatccagctgatcccttcctgcccctcacttcactccactcccagggtaatcaatattaacagtctgggttaccttttgcttcacctttctctgtactcgcacaaacacatacagatttatggtatatttactgtgttatttgttgcttatttttttattaaaaatgggttatactagtgatttttctgcaatgtggtttctgctttcttccaagaaaaatgttgatgaagcttgagtgagggccactgtcatgcttgcatggaccaggttctgatatacgagcctggtgtctatctgcaatgggtctctgatgccttaagggacatcttggagtctcacttctggactgaggctgtccgtgaggagtttccatagcatttattgtcccagtgttctctgaatctgtgttacaggaactgataggttcacacacctttcattgctcaggttaatattggcttcctggtggccatttgataaatttgtttttctattctagacgtcagcaatgcccttggagaatagaatcatcacgtggatttcatgtgggttttgtgcctttctcaggcacttcttttgaactagtcttctcaattctgtgtctgtattaggacatgtgactaaagagcattagatctgaagaattttataatagtctagatgtttgccagcctggatttagtttcagaaatgatttcttttgagttattagattgaagtatttttcaattaattatacacaagactttcctgactactgattatgaataccaattgtttctcatattctctatcttctttacggcttaaacatgatactgtcttactagtgggtagacagaagcagagtattgagtaaatgccaacctatcatcgttagagaggaaaagagagtcaaagccaggaatacagtcaagcaagaaaagaaaataatgctttatctttgttaccaccttcctcttggtctgaaagaaatattgcgagtaatttcaattaaagaaactcaaagagaactgaactgaataggtcaagtcaaagcacagatcatcttaaacccttttgcaggtgtctaactagctgcgtgactttatgcatcttaacccctctgtgctccagtttttctgttatatcaaacataaataacatctgtcctttctatctcctagatgtcctaacatccacatgagataatatgtaagaaagcattttgacaaacacacaatagaaatgtgcaactttcaaattatatggaactaaaaaggatcattcgcaggtgttgcattaaggcactgaagatacattaacaagacacttcctagccccgccggagttgacacagtctaccctagtaccacccagcaactcattttcctagcgaagtttgctaatcttggctgcgtgtatcatgacacttttgtttgtgattatgcttcagtccacaatgaatttagtctttccattcccagccttattaatacacccttagtacttacagtcctaaagcttcctggtaaagctttttcatcatattaaaatcagataagaatagcatctgcttgtgctatagtgttcatcttcagatgtatccgaccacaagaagacctaatattcaacaatcagaatgagagggcctcagcctttgctacagcctagcatcggctgcagacctcagactgcagcaggactgggcatcctctcagaggcctcaaaacagtgctgggtcttgggtagtagttggacatccagattaagaaataaaactcctaaaaaagatgttgatatcaaaggcccagaatcactgatttcaaaaccaataaactatgagagttaattttgacagaaaggtgcatataattttctgctggagattttttgtttgtttgtttgtttgtttaatctactatcatctatcctagaatacctccaaattggctttccaacacacttccagttcatctccatatcatagccagagtgatcattttgaattaaaaatatcatcatgccatcttcccttaaacccctacttagaacacttgaatcattaagttgatcttacagaataggagagtagaatggtagctacaagaggctggacagggagagattggttaatgtgtccaaaatcacagttagacaggaggaataaattcgaatattctatagcacagtacagtgttaactttcgttaacaataatttattatatatttcaaaatagctagaggaaaggaatttgaatgtctccaacacaaagaaataaaaaagattcaaggttatagatatcacagttaccctgattttatcactacatattatatatatgtattgaaatatcacatatacccccataaatatgtgtgattattatcaattaaaattttaaaaacatttaaaaagtaaaacactttaatggcttctcattgctcttaggagaaagataaaaatcaggaatttgacccacaagtcccagaaggtatttttctctgctttaacctcatttggtaacatgttcttgttctctctctctttttcctccttcttttttaatttcttcaaccgtactatctccctctaccacagggcctttgcacatctgttccctctgttcccctggcctgcactctctcacttgtgcctcactcattcatctcctccatttggttaatttaccttcttctttcaggtcttctgagctcagatatcacttccttttggaagccttctttgaagttcccaatcagatcggctctccagtcctgcatattacaaaagcttacaactccatgtacctttccttcatgtcaccctgcaataattttttttgcatgattagttaattaaagtgcatgtgtttcactagtggtctgtaagctcatgaaagcccaggccatatttattttgtttgtttggctattgcttgcttaataacattttcccatttggtgactgacatgagatagacagtcaataaatatctgactgttgggtgaatgagtgaatgaccagagcgccggtagggtgagtatgtctactcaatagttattaggacttgggctgccttccctttgctcggtttcttattctctgaaagtggctgacatccttgcttccagtggtcatttgagcccaggaacaccggaatctgatgacagatgagccccagcgtgaagctgttacagtggccgtagccttaccacttacctgagagctcctgaaggaaaaggcatggaatccagtttgttcacctttagtggaaagcgacagcaggaatataatcagctgccttctgctgtcatacatggccccttgacattcttatctcctagtgcagagtccaagccaagaggcctatcccaatatcaggaggtcctggggacttcacatttgattggagtattccatgtctttgtcttcaggggctgtcaggtgcatgttaaacctaatacctgattctatcatgtaaagtatgatctgttatataattatatataaaatacctgacctaacaccctaataacctgactctgaaatggaaaccttactaatgccctagtccaaacattgagtagctccatcctttcacccattatatacacagagagcattccatgaatggacaatgaagaatcctatcatgaaacaaaacccagcaagacagacagtagacatcaagagagatagaaattggagggtttttatgtaactggtcttgatccaggacaacaaaatggaagtgatgaagaccagacagaaagggcaaggcaaggtagactcaagcaatggcagccaaagttgtattcttcccagctgtgtgagtgtctgctgtctctcaatggaggctgaagtagagttgactgaaggtgtgaatctcccctctgtcctttagcaaatgatggcccctgcctgatgctcactctgtcaccacaaagtactttaaacttgtctgtctccctcttccgtcatgtcctcccccctctctagtggaaactgcattccttgttttattccatggataaccccagatacccttgctatttccctcagatacttgcttcaaaagtgggctctttccccttgcccacacctagggctggcttcccagcaactctgttgaaaactaggggtggaaactaactggaaacagaatgagaagttgatcagtccactttggttgtttaaatgaaggacacgtcagcaagaatagttgacatttatatttattagtgaagggaattcaagtaagtgcacaatgtctgggctttggatatttattttgtagttttgaatggaatttctctgtttaccctaggggagaatttgtgcctatgtacttattgagtctgctgctgtgagccccacacacaatgcttggctgggcatagagcagaggagtaggtcacacagattcataggatttgaactgcttttctttttccctgtgaattaatcttttaaatgtcaacattttaaacttggccttttcaaaaaatatgataccatatgaaccttacttaatcgaaaatacatttctagttcaaaggtttttgtttttttctttcctgaaagtgggaaaggctaacaacaacaacaaaatttgttaaaggatggactgtgtgtgaaggaagctggtttttgtcaatggggtctgagcaactttttttccttaagaatctaaactgttgttccaaaggccatttcttttttttttttacaggtctgggattttataatgcagaatgtatcttcttctgcctacccatgggaaatttggaatcctacaatttcaattaagctttaaagggacaattgtaggtcttttatagctacattgatttatagtcatttttatgtagcgttttacagatgactaattaatctgtaattaatttactgcatagtttttacaactctttaagacaggaaggtattattatacccagttcatagatttgtcactgagactgcaggagactgaatgacttgcatgaagtcttccagcttgttaatggcacatgagaattcatgccaggggagccttgattacctacagtgctatattctctctataatgaatgacctggaagtgcagaaaggtgagttagaataccaggaccgccacttactagctgtgttaaccttgaacaagtgatgacatcttttttgacttcatcttcttcctctgtaaagtgggagaagattgcctactcctctctccagactagactaagaatctgtgaagaataacatgagatcattttgatagcttgaaatgctaaagcataaaagaattaaccattattatctcagataataatagggctgcgtacagtgtcctatcagatatcaggcaaagtgtcttccgtccttcctatgatacaattagggaacaagaaataacgaggggtattcaggttgaggggtggtcttgaagacacaggaagtggagtggtccattaccatgtcagtcaggtaggctaaaatttttgggtttttgtttgtttgtttctttgtttctgagacggagtctcactccatcatcaggctggagtgcagtggcatgatcttggcacactgcaacctctgcctgccagattcaagcaattctcccgcctcagcccccccgagtagctgggactataggcgtgcgccaccacgcccagctaatttttgtatttttagtagagacggggtttcaccatgttggccaggatggtcttgatctcttgaccttgtgatctgcctgcctcagcctcccaaagtgctgggattacaggcatgagccactgtgcctgacccaggtaagctaaatttttaaagttgtgtgtgtacaccttttatccttgtggatgctaagactattaccaaagcctttggaggaattgaatatcacattgcagctgataatcaagcactattaattttcaaacccctgaaacttacagtagttggtgtccttcagatttggagtgtatccatcgtagcaaactcttgcctgccagggaatgtcacagggattctgtcaaaggcaggcagatgctcctagctgtaggagtgagccagggctgccatcatgcctgagccagggactaggacaagccgtagtccccagtcccctaggcaggagcagccgaatactaactcatttcctctgatgttgggttgtttttcagggtgatgttcagcggacactcatccaagtggactttggcgatggtatcgcggtgtcttacgtcaatctcagctccatggaagatgggatcaaacacgtctatcagaacgtgggcattttccgtgtgaccgtgcaggtggacaacagtctgggttctgacagcgccgtcctgtacttacatgtaacttgtatgttattactgttgttggtttatgacctatcttaaatattgtgtccttttcaaattgaattcacaattttatatctagaagaagtacactagttatcttttagcagaaggggaatggggaagaaatgattaagagaccaaaataaggaaagagtgagaagaaaatcaaagagtagaatttgattaatcctggactctctggattgcttcaaattctcattgcatttcctctgcttaccccgggtgccttgaagatatgacacttgaatctggaggctgagcctaagtaacttgcagagctatttggttgaaacaaagaaatttggttttgctggggtcagaaattgttgaaaacaatccacatgcaccactcaatctaatgcattgagaattagcccaagtaaagaaatttctccccatctgattatttctgtcttctcataatatgttgctattaataatccttttagggttttgctcctttttcctgggcttctatctgtggatgacttggtgttagagagaaggtggtgtagagagaaagagtataaaaacagtgttaaggaaactgtggtaggaaacagttccaagaaatgctaaagcttttccctcattggggattctaaagatgtgagtaagtatgatgagacaataataacttctaagttatgtgtgcttaaaacatgtgtcattaacatgttaggtgtaaggggtttcccagtcataggacttgtgttggttactaaagaaattgtttcctttaaatgaaagcagctcctttatatgaatggtcttgttcaaatatcaagttttagtccaagagcctcaaggccagccattattactccatgcctctcctctgcaccttgcccatggaacaaaattgaatacagaaagtatcaattagaacattttcttttttagctgctgtggtccagtgagagggcaagactattaggggatgacaaaaaggtgttttggttgttgagtcttcctaacatgtcagtaattctgatctctgtctcctgtactctcatggcagaggtgcttcaaagaaacatgcactcctttatttgggtctgacaaagttacacatgattctcagtatgccaactcaatctgcctatttttggctatagtttacagtgtgttccagactttgtgctaaacaggctcttaatatatgttatctcacttctcaaaacagtcccttgaagtaggcactattagtaaccctatttacaaaaagtgttgaggttcagagagcttaagttacttgtttgaagtggcccacctactacctagcagaaccatgcttcagactcaggtccacctgccgcaaggatcctagctcttgataactaaggtcagtgtcagtgccaagagcggcttgggattggaggagctgtctccattagcttttactatctactccctactctttacagatcatcttgaagaaacataaacattttggttagaagcagtgtgcttgttacacaactacatagttcagtactcatcacgggggctcctgtccatctaactgccatccctaactcgtcctatatagactttcaggactttccacttactaagacataacacctccctatatgttagtatgtagggaaatgatagcaatggtatcatagaaatgatcatactaaaatctttaacaatacgtcacaaacattaatgattagtagcaaaaataacttgcaataaaaatgacagcacatttgccaagaatggctcctacctagaccatattattatctcatagcttattctataaggggtgattttgctagagagctagcttccttacaaattataattgtgttccatataccacaaatttgttatacatctaccgtagtccaatcacatgtaaatactgatttaaaagccagtatcagcttctgatctaaatttttcagggtctcccattaaatcttccatagcttcacctccttgtcactctgtaggtttttttctcattcctgtgtgtgtgatcataccccttgaggtgtctactgctcccctgcaaaactcctccctagttaacgaaatcctggagaggaaaacaacacacacagagattgtctctgcttaagattaagggctgcggaaacccttctaaaagaaaccagtttcttcattcatttgcaattctttcatttcattagcctagttgattggaccaaatatttgaccttaaccttagaggaagataatttgtaatggaatgtttcgtgttctgattttaattttgtagactcatcttgggttaagtggttggataagcatgcctcatataatggaacttctttctaagcctggctttttggtactaactgtgttaaaagcaagttcatgtttgaagctgtttgctaactcacatacatataaactcatataactgtttcagcagattctgacatgtttggttagtgcctccctcctaaagatccagggtgctttgctatgcccacaaactctttttgctcatcttcacatctataccataacagacttctggccttttctttcagatggagaaatcaaggattggagaagcactgtgactctggcatcactttatgctcaaagcaagtcagaacaagaacataaccgagtcacactctcaggcatcttaaagatggagggtgtcatgagtgactgtggatgccaaagtgccatgatatggcagtgagaggtggctttataggggaaagaaaagcactggactgagtcgggcattctgactaggtccagattttggttcaaactcctggggaagtcactccatctctctgagccttgattttctcctctgtcaagtagatgcacatctcgttcccaaaagtcccatcaagcaaaatatatggtaccctggcacctagtaaaacttgatttttctatcatgaggaagaggagaattagcagcaactcttagctcaccaagcctgtcctctgcccctccccagttcctaccctcaggggcaatcttgaaagcccattgcctgtctcacatacacattccgaccactctccagtgcagaaaagtgatttgattccaaaccagagggtttgaaaaaaaaagatgggtttgcaaaggtcatctgaaacaaatggagccgatgttcctgcatagtgtttctgggagtgggccggtcttgctgggcgcctggtaatctcctgtagcctgacagttggtaattccttggggatagtattcactgtgctctgctagtttgcaaactaatgagacacgtgctgcagccagtgttgccttcagtcggatggggcagaggttttagagagcatgcagatttctgctcagaaagctgccttgtcgcagccagtcttgcagaaaaaaaaaaatcactgaagactgcaaacttgcagaacagaaattggggacaaaaaaaagataaggtggatcttgtagtccttcctaaactgcttcccttatctgttcccttatataggagccatgtgcagatgactttctggccccatcttagagtaaaatgatctgtgtagcttgaaaacccacgtagtttttcgaccattcacaccatcattttattgaccagcaaacgtcagactagaattttgtaaagtgtggcttaatgagccacctgcccccaaattaaatgataaaaatgtggtgttctgggtcttatcccagacccactgaattaggattcctggaagtatggcatcataatctgctttgaagagattagtatgattttaacgtacagtgaaatttgagaaactctgttttaggatctcagcttaatagtttgaatcattcttatttcttctagtagcttttttaaacattgcagacaaatagcaatatgatatgtgcacaatatttaggtggccaaaggtctccacatcataaatgctgcaggcaggccagagcagccagtgtacacacacacacacacacacacacacacacacacacacacacacacagaatcacacaatgtgcagcctcacgggcgtcagttgtttcctgcagcacaggagggctataaacaagaaaagagaggggaaacccagttcacacaattccccatttctctcaaccacctttccaggaagattcatatggaatgatgcagcgccacctactgtcccttttgtgcattgcaggcacctgtctgatggagccgcatctgccagttcagcatcctacttaacgcagccagccagctgggggcctccagggtctggagtttcacctctgtggctccatagggcatactgcaccctctgtgattaacagagatggtcaaagaataggcttttggatagcaggaaccaggtattttaaacccgtgaaaagtaaatgaataaaagaggctgtggaaatctgaaagataaatttaatatgtgtatgcatatataatgtatatgcatgtatgcgtgaacttatacaaacacatatgtatttcagggcctacaaggccaacgtactatgtgtcttgaatttctcttagaaaattcatcattggcccggcatggtggctcatgcctgtaatcccagcactttgggaggctgagtcaggcagatcacctgagattggaaattcgagaccagcctggccaacatggtgaaaccctgtctctactaaaaatacagaaattagctgggcatgatagcaggcgcctgtaatcccagctactcatgaggatgaagcaggggtatcacttgaacccaggaggcagaggttgcaacaagccaagatcgtgccactgcactccagtctgggtgacagagcgaaactccgtctcaaaaaaaaaaaaaaaaaaaaaaaaaaaaaaaatcgtcattgaccaaaacgtgattatgtgaaaataaatgaaaaaataataagacaatttctcaaacatggcaggcatccctcttcctcgtggtcttttcacttactctaccctcaccctggagctttcaaaattgatacttggtgctgtctttcactttattcaggttgctgctcaaatgccatttcttctgagaggtcttccatcatcacactttcaaaaatagcactctgtcaccgacttctgctttatgcattcagcaccctccttcctcagaaatacctaagctccaccaaatgccaggtatccccagcacctagaataatacccaacagatcacaggactcaaaaactattgagtgagggttgggcgcagtgactcacgcctgtagtcccagcactttgggggggccgaggtgggtggatcacttgaggtcaggagttcgagaccagcctggccaacatggtgaaagtccgtacctactaaaaatacaaaaattagccggatgtcgaaaattagccagatttggtggcacgcccctgtaatcccaactacttgggatgctggggcaggagaactgcttgaacccgagaggtggaggttgcagtgagctgagatcatgccactgcactccagcctgggcagcagagggagactctgtctcaaaaaataaaaaaataaataaaaataaaaaaactgagtgaatgaattaccatgttttactaacaagattcgaatttttcattgagacaatgacatataggcattgttcttacgctggtttatgacttttaaaaaatgctcagccgggcgtggtggctcacgcctgtaatcccaacactttgggaggccgaggcgggcggatcacaaggtcaggagttcgagaccagcctggccaacatggtgaaaccctgtctctactaaaaatcaaaaattagccaggcatggtggtgtgtgtctgtagtcccagctagctactcgggagactgaggcaggaggattgcttgaacctgggaggcagaggttgcaatgctccgagatcgtgccgctgcactccagcctgagcgacagagtgagactctgtctcaaaaaaaaaaaaaaaaagctcacatatgagagacaaaatgaacctctttagaatggaactagcatttctagcatagtttatctagtcattgtattctaatgtattcatttaacgcagattgagggactcaggaagaatgtcacagaggaggggatgctggaactgagatttgaagactgacaggtgccataagaaaggtgtgtagaagcaaaggccctggggtggaccaggacatggcttgctggaacaaaccatttgatagggaaatggcaagacttgtgcaataaatgaaaccaggtggaaagtgcattttccaatgcctgggacatatttacctgatgaggaggcagcaactcttaatagctattttgtttgactggaaaggttctttcaaacacttccatctgctcagaacaagggctctgaaaccaaactgctttcctagctgtatgacctggggaaagtcacgttactttgttcatctctaaacggggaggatattagtgcctacttcataagattgttttgtgaggataaaataagaaaaacagagtcgttagcagaacatttagttgtagtcatcgctcagtaaatgttacccttttattatttcattgaactgctctggcttataatcaactgcttctcaacatatgctttataggccagaagatcagtttgattctgtatgctgatcaccagacttttcattctctaaagagggagtagcatgcacaaagacggacatgggaagttatatcatttgttttacccagtgaatacttgagcatctataatgtcttagaaactctgctagtctttgtgtatgaagataaatatgaagaattcttaccctcaagaagttttcagcctctgtcttctgtctcacaaattttaaatcaatgtgtgttagctatcattattatcataattggatcatgggaatcttttttttttttttttttttttttcgagatggaatcttgctctgtcaccaggctggagtgcagtggtgtgatcttggctcaccgtaacctctgcttcccggattcaagcaattctcctgcctcagcctcctgagtagctgggactacaggtgcatgccaccatgcccagctaatttttgcatttatagtagagatggggtttcaccatgttggccaggatggtttcgatctcttgacctcatgatccacccaactcggcctccaaaagtgtcgggattacaggcatgagccaccacaccacatcacattcccaatcacgggaatcttaattttgaacaagtatgagtaacatgatcagcttcgctttctagaaaaattactgttgcagccatttggaggatggattcgggtggtgaaaggttacaggcaggaaaatctggaagataagtgagaacgtgcttagagtatgaaccagggcgccagattagggagggtgagctaaatatcttagagagatttatgaaaccaaatcgtcagtttcctaaatggatgtgaataacaaaaaagaaattgaaattgactttctgtttctggagtgggctcctggatgaatatgagtgttaatcaccaaactgtagagaatacaggagagggaaataacagggtccttgagaacatttgattgctggaggcaaagaagtctagacccccccagaaggagtctagagcccagaaaggggtgttagagcccttcacatgcatttgatatttgaaggttaaggtgtggatggtgttgcctagtagaaaagtctgtagagagtgaaaaagtctcaacacaggactctgggaaacacatttacagggcaagcagaagaggaggtaataaaccaggtgaatagacccaaggtattgctctctcctctacctcatgggacaaagatggggatggcaaatgcataggaagctgcattttgcctggaaacagtgactcaaagagaagattgagggttgaaggaaaggtcctagtggttctttatgaagagggcattcatatctttgtgaggttggtacatctaattaaggtttccagtttttataggcctctgtagataaaatcattctatattttaggtgagcatcttctgagaaccacagagctctctatctacttacacacacacctctgtcctgaattaacttaattcaaccccaaacacagtgtgtgtgccatgcttacctaactagacagctttgcagacacatgcacgaacacattcacacatacacagacctttaaaacccaataaataataaagggtaatgacatagagagtggtttgaagatttgtccattcacccttcatcaatatggattctatgaggtcttcatgactctggttcaccaccagggatacaacctcttggaaagactgcattgccttgtgaaatcccaaatgatgcctgttcttaaggacttcataagttacctgtaatttttttttaacttttacacacacctaactcaggtgttagaactggtagaaagattggtaagtgcaaaatgtcaagatgcaattgtgctcaatgtattctttctccaaagtggggaaagcatctgaacacttcttttggggaatatggcagccaggttttgggggcttcaagagtaaatgtgtgatctcttcagagcagggaggacagagcagaggaagctcttccccatccatggcctctctttctcttgtgcctcaggtcccttggagcacgtgcacctgtctcttccctttgtcaccacaaagaacaaagaggtcaatgcgacggcagtgctgtggcccagccaagtgggcaccctcacttacgtgtggtggtacggaaacaacacggaggtgggttcaccttccacatgcgatctagggacagaagctcaattcacgctgcctgaagcaaaggagggaatgaaatggcttatgaaccctagagtgtagaagcagttgtagcttcaaggacaacaagctcccttggtgctcaagtatctcatcattatgttctctctctctctctctctggcccctctccaccttctgcatttcatctctgccttcctctatgtttacgtttttctccagctgtacttgtctttgtagtgactcttagcagccctagcttagcagagaaattaaactctatttcctgaaagttctaacaacagtcctgaaattgagtcttactggccaggccttgatcacagtgctgggggtagagagggaggtgaagaagtcagtctcctcggaaccacgtgaactacagaaggggagaagtgattaccaaaagaaaacgaagcaactggatgcaactggacaggcgcaagcaatagatttccattacaacccacccccaatggccttcttaccctaaatcaaaactcttatttatttaggtcagctttaacttttatatgtttttccaaatattccctatgctcaaaagtcagtggcaattttaaatctagtagagacctaacaccttgtttactctaagtctttcattttgcacatgagaaaagtgagggtggtgcagctggagtggtttgctttgatctcttccagctgcttcataagaggccaaatttaaggccttctgatgcctccactaatgtttctttcctctacaccaggctgcatggtctatttcagttttgaactcattccattctcagaaattaaagtgcttccaaatgtaagttaggcaatagagctgaggccccaaaggacactgggatgaactgctctggactgaaacactccatcttcttccatcagagctgctttcacttggtgactttgctcttcaaatacgatgtctcttattttaataaaaacatttttctgctctggagctgaaacttggctttagctggagatataattttgcacaggcccaggacaaacctaaacagtggaaagaacctctcacctctactgcaaccataactaaactgaaaagagaccctttttaatttcacctgaaactatgtgtgtgaactcagcccatagtgggccctctatccatagcggaagagcaggaatctatgtcatttccctgaaaactagtactaaaaggtgaatgtactgaacaacttccttttgtaccccctattgttttttattttttttatttttccttttaaaagaaaaccagattctcaagagaccccattgaaaaggcttctcatgctgggcgttagtcttctttctgccatacagggaattaaatgaattttgatttttaaattaattaagaaaagatgggaaataaatgtttgtgaggagtgtgtcaagggaggtcagtaggctaatattttttcctctaggaccctagcagtcgattgtattgcaggcaccacgccaaatttttttttcttttttttctgttttgaatcctcaaaccactatccaattagtgcttgtttccacagcagctacttccaggaaactgctgatgaggcttctcaaagcgggccagcacacaaggccactgctgtttaactagtgtatggttttggtgtaccggattcatgttccattgtaattctacagaaatcgtacaccctggagatgaacacatggcagcttatagattttcagtgactgctgcttccatctggattaatatgagcccccgttctcatttgctttgatcatttccttgtattagggatctgcttgatatgagtaggtcatgcataaagagagacatacattccaccagcaagcaagacctatccatctccccagccctgaatcaggatgatatcaggaattcacaatgaataggcagacttgcttggagtcattgctccaatagcctcttttctgctttgggcttgagatgatagggaggcatagagggactcagtgccattgtggtacatcaggaagagcctctgctgggttagacagcctattgttggctcacagttagtggctgtgtcacctgtaactaaagagctttcccttcactctgggcccttgtttattttagcctttgatcaccttggagggaagcatatccttcagatttacttcagaaggaatgaataccatcacagtgcaggtctcagctgggaatgccatcctacaagacacaaagaccatcgcagtatatggtgagtgcccatctcagtggatctactgctgtcttcatgctcagaggaggttctcttgtgccatgatgccagagaccatcccccagctgtgacttttacctggagaacggagggcagtagttgagaaagagctgaggcgagtctcatcttctcctgtagggaaatttgaatcactggtaaaacagcgtcacgggatccagaaagggttttcttagaggtagagtgactattcactcactcatagtgtaaagtggattttaggatgtgtaaggctaactcatttcacttagattgttagtaatatttgaataccagttacaaaataaaatagctaatgttgaatctcttttttttaagttcaactttaaaattcttgactaataagggaaatctgccattgtctaaatactttaaaaacctcttccacaaatctgtatcataaaaaaaattatctgctagattgagagtgatggaagggtcataacaattagatgtcgtacatagccatagacgggatatttgaacaaatggctaattttgtgatcagttggggaaattgaatatggtcacaggattagatggaatgaatgtgtactgaaatgaaaagatggagtcattgattgaaaactggaaataaaaaaaatacttgatggattgatttcattttggtaaatctttttctgcatagaaagatagtcatatggatatgcactaagtgttactagtacatggcaaaaatgtttattattaatatggaaatggtacatatgaatcctgaaaaattagcttttgaaatataagaagtggaaattagataggagaaggaaatgctgtgcagagagaggaggaggcagaaggagggaggaaggaaggaggatgagaaagagagcaagagaggctgggtgcggcggctcacttctgtaatcgcagcactgggaggccgaggcgggtgggtcacctgaggtcaggagttcgagaccagcctgaccaacatggtgaaaccccatctctactaaaaatataaaatttagccaggcatggtggaacatgcctgtaatcccagctactcaggaggctgaggcaggagaatcgcttgaacccaggaggcagaggctgcactgaaccaagatcgcgccattgcactcttgcctgggcaacaagagagaaactccatctcgaaagaaaaaaaaaaaaaagaaagagcaagagagagacagacagcctagctcgtggtccaaataatgtcaattgcccagttcccttatcagttgattttgatgagataatttggggctggattttcctgtgaggagtcaggttctgttaatgctcatcttgccaacttgaccttcaaaatcagaaaataatttgtaagcaactttgaacacatctaaggatcaaaaggccttaaggacactattcctttcatggctgggtgttagattttataatttcttctctctcccttcctcctgaaaggcttgatcagcccagataataagaaataaaccagggctgtgattttcctaccaatgtcccattagcaaggtacgaggtggccaaacagtggctgtgtatagagtgcggcaaagtctgcctctcttcccttctccatctcctttctgggtgctgggaatgcatttattcttcataacaaccctagtgtaaagcaggtgatattatgatccccatttttttcagagtgatgaataacttgccccagctagcaagtggtgcagctgggtttgcaacccaacccatctagactcagggcccatgcactgaaactatcctacttaactgattctcatttattttcactggatttttttttcctttctctccctcttggatgtcacaggttgcactaatgggcactgacctattagcccaacagatgtcctcttggttatgcatgttggtgatgtcattagaatcatgaagaaaaccttaaatcttggccttatctggtccagcccatcattttatagataggaaattatggcccagacatagggaattactggcttaaagtcattctgctgattggtgacaaatatgatcataacgatggtggtggtgatagtaattgacattgatgaagactttgctagccactggcatctgttctaagcatttggtttgatctgctttattaaatctgctcagatttatgagaaatattctataattatgcattttacggatgagaaaacatgagacaagtataataaacgagctaagaattctgaatccagagggtatgtttgtaagcacctcccatgccttgctatgcttgcttcttcctctttctacaatttctttacaggtatcacccaagggtgaatcactctttataaaaataggttatcatatgtctcttcgttaagagatttggcaaggttctcctcctcttctaaccaaattcctgcaccatcggccacccttaatttgtctttggtcagttgagttatccagagattcatatacataatcggaaagttatggggtctccctatgttgcccaggctggtctcagactcctggcctcaagcgatcctccctcctcagcctcccaaagtactgagattacaggcatgagtaaccacacctggttccatgatcagacagttttaatgacaggtgtgactccttaaacaaaagttggagcaggcaaagttaaacaggaaagattgaacccagctgaaagaaaaagcaggaagatttgtaaacgctggggttagctagtgggaaaatactggagaactttaggaagcacgtgggtttccagtgtgattagaccatctgtgtgagttaatcactgcttagggaagtcagtctcctactctcccgcagagactgggagatagggaggggtgctatctttcttgatgattacatttcaaaggaatggctcccaggtccttgagaaagacattcatgagttgtagaagttttacatctcaagggacagagaaggaatttacaattgtaagttttccagaatactctaagaaaagcaagtccaggagcttacagtcaggaagaaacagaaacttgtttgaaatttagtgagattgatgggaacatgaagtcctattgtcatgatgggactgaaaaaagcatcacatttgggaaattgacaggggaaggtttgtctactcaaagccacacaatcaattaaaagaaagaaaatctagtttgcattgtttcttctaatttgctccagggcacaagtttgcttgtaaataaaaatacgcaagtgtatagactttatctctctcaacagctgcaaaaaatattatattattggtgtttacccttttcagtccgcccacacgcatcccctatttcttgaatcaacttaagtacgtttccctgccattctgcctccctgccatgctggttagtatgctaagtaattacggagggagctgcatcattttctcatttgtgtccttttactaagataaacattctcccttgtggatgaagtctctgcagtttggtaagaggtacggagaaagtgagaatgacataaacttaaatcttcatagcaagaagtgaggacttaatgggtgattctttggcactgctgtttaccacactatttagttaacgtgcatttcattgttccccatcaggtaatattcacataggtgaccagtgactcataaaatagtcaagctttgaacaatacctctttggaatatattaactgccacgaaaacataccttataaagtcagagtcttcgaaacatgtgtttgataactccttagcattgttaggaaatgtacaagtgaacttttgtgcttcctgaatgtaaattggcatccccaatgtcgcttggaccctaatgaaacaaaagggcatgcttaacataaaaaatgtttattaaataaataaatgcataaatttcgagaaggctacaccataagttaagcatacatttattcaacaaatgtttattaattataaatgactcatagatagtaactgaaaacctactgtgtgctagacaagggccaggaacacagagccatcatcctgattgaggttatattccagtttgaaggacatatcaatgaaaacaaaataatttaaatagcgctgagtgtgaaaaagagacaaagggtccagtgatgaagggtgcatgggatggtggaagggaggctacctgaggttgggtggttggaaaggcctctcggggtgagactgaatgatgagaggggagtttgctacagtccagtgaagtggagagagctggtatggacagagccagcaggattgaggagcacagggaagtacaggtcctggagcacagagagggcaggaaagccaggtaggacaggacaaaggaagtccccaccaggttatgtagggccaggaaggctgtggtaagaatctaaattttatactaaatgcaatgtggaggcactggcaggttttaggggagccatatgatctgagtctattatgtgccaaacactatgctgggtaaggagtgttgaagccacaagaatgggcttcacagacctccaactccagagagtgtaactgaccaaggccaccagtgctgtgctctgaagcttatcaccaagctagggctagggctccaccttccagggacttaccctgccaatgacagagtatagcagggatactaaggctgaaccattcctggaacgcaggggactcctctgccagcgactttggctccaagactcctgaacaggcttactgaaccttcctcagactgcagagtagtcacccactctttcttcctctctttgactgtcctatatgcatgcacggtggtcgatagttctccatgactcctgtggcttcctgcccactttctcgcacagagaattcccctcatataatccttgcctgtgtaatcaccatcttgcttcctggagaaccaaactaactcaggtgctacagagacaatgaagaaaatccctgaataacataaaattccattaaatgaaacttccatgcaaacaaacgatagcaatagaatgattacagtgataattataaatatctaatcataataattattccataatcctataataataataaaaagtatgtacaaaacagagtagtgccataaaaaagaaaattaaaatgtgatgggggagggtagtgagccgggggagggtagtgagccagggagtgcttcaactagagcttgaatattttgtgcatggacagtggggagaatggggcgttctaggcagaagaacggtgtgtgcaaagaggcccagggtcataaacctaccatgcattcaggttgctccagatcatttactatccaggagcgcagaacctagaactaggaataataggcaaaggctgcaaagataggcatggaacaaagttaggggtttggtttagaaaataaggggctacgggctcttagagcctgctggcaacctttggtatgcaaatgctggccattagaaactgggtccaaccaaacatggcaattccctgccctgttcttgcccttgccctcacatgtgactggcaacatggctgcccccacgtatccctctgtgtgtagaacaacatggcaccctgcatttgcatactaaaaggctagggtgagagggccagttttttccctgtctatatcatgaatgacatgcctggtcaaaccaatccctaagccctatgcaaatcagacactgcctcctcatataactggatggtatcggtcacgctgcgggggtgggggcgggagggggagaaaagggggaaagggggagacagaggaaaggagaaggggggaaggggggccaggggtagtctgggggggtggtctcctctctcagctttgtagccccctccctctgtctctatacaggggagcttcttccttctttcttctaccttctttcttgcctattaaactctccgctccttaaaacaaacaaaaaaagaaaagaaggggctggtgagatattcacagggtagtggcttgccttctaaaaaggtccctatggtaagtgaaggggaaggaccctccattttgtataaaatataaagtctaacaaacctcttgacaggactatttgacttatagtactccatctactgttatatccccagaggaattccggtctcttcgcttgtccttttctccaaacctggatgactacaacccggacatccctgagtggaggagggacatcggtcgagtcatcaaaaaatccctggtggaagtgagtgcacacagtttcttctcttgcccgggtaccttttctctctgtccttgaagaatttcacagaaaggggagctttgtacaaaaacaaacaaactaacccagcaggaagaagctagagcccatgggaagttctggcctgatgtctgcaaagctgagccccacacatgcagagacctcaaaggccctaaaggggatgcaactatggaaccacggacaaacatggggtccttgcctcttgtgactcttgttctgcttagagaaggaggacaagtacatcctaaactcctttgtccacatttctgtagcagagttcacaattaggccattaggaattataaaaccagctactgtacctgccagtgaaggaactcagcatgtaagtgtcctcggctgactacaattagtaagagtggtcccaggttccaacttccgcaactgtgagcataacagtgcagtgagcattcagtatatgatggttagtcatatttctatttcctcatttttttaaagaaatttctgtactgtaacagccccaaaaaggaattattatccacactttgtagatgaggcaactgaagtttagagaggttaagtaacttgcctaaactctcatatctaatagaggatggagctgcaaaattgaaattaagggcctgagtccaatgtctgggcttttgtgtatttgacaaagcttcctaaggtttctcagagaataacaaggtggttgtgttttatccttccctgagcaaatgtcactggcaattagagaagacaccttcttttaggcacatcttcccctccttgttctactttttttttttcttttatgagatatagtctcactctgtcacccaggctggagtgcagtgactcaatctcatctcactgctacctctgccttccgggttcaagcgattctcccaccttagcctcccaagtagctgggattacaggtgcttgccaccacgcccagctatttttttcgtattttaagtagagacgggtgtcaccatgttggccaggctggtctcgaactcctgacctcaagtgattcaactgccccggcctcccaaagtgttgggattacaggcgtgagccactgcgtcggccccttattctactttcatgagtgagcagaggagtgggatagccgctcatggggcagcttgagcttattgtgcaaacgcggaaaatcagaagtgagttatccactcccagggcatattcttagctcagaatgaaaatcagtttaggtttgctgaacattctttcctgcttccaacacatggtgccacaggacacaaaaagatgatgaaataaaggcattcagataactcctgatcagaaaacagatcttacatccagcctcttgcaaggagctggtcttccctgtcttcattacctttgttaatatttggttagcacttaaaatattctagatactcttttgagtgctttgcattattttaacacatttaatcccccaaataagcttacgatgttgaaaccgtgatttcagaactacccattctgtaggtgaagaaatgaaactcagagatattaggttactcatccaaggtcatgcacttaaagatcagattctggagtcaaaccatcaaggtttgaatcttgatttttgtggtttcctaaccactccactctagggccatcctcttccttattccaaggagaaacagggatagatggaatactggggtaaagaaggggtatcttcatgtgcctctgagcaatgccacccacctctgtctctatggctttcagcatctgtgacatgattggtggttacacattatcaccaccaggaggcacgactaccagactacaaccctaaaaggaataggcctttctactctgagccatccgtctctagggtaacaactggtttttgtcctctgctgtccaagaaggatgacttatgctctttaacgaacccactgtccatctcttctcatctgcagcattctagggacctgtgtccccataggtcctctatctgtccaactcccccaggtgatgtatcaaccaagcactagctcagcaatgtccagccttccaggctgatttctcttcacacttattacttagagatcagatgccctgtacctccacctttctaccagctgtccattaggctagaaattactgctcatcaggatttctagcctgctgtgtagcataatcaggaatatgcagaataaacagattgactcattatccctcagggcagggttatagcagtggtggtggtggtattaataccttctagttttcaaggctccctagtcacccaatcccaagaagcagttgatgcagagcttggttcctagcaatttgcactgactttgagatcagtaattgcacttggccacttttttaagtcccaagggaccacattggcaagtgtacactaataaaccctatgagaggtacaactgagagtcagcttatttgcagttttcttgctattcattatgaaacaaaatttagtattaaattgtttgccttttcttcctcaaaatggcttttgctattgacatttcacaatgaaatctttaattgaatgtcattataaacatttttgtgtacaatgaagattattcaggcacaatctctgagtttacagtctagtaagggcataaaacagtgtggggtttgctgtaataggagctgttgtttgtcagtgtctggagaagggaggtacagagcactgggtcccaacacagacttcacagtcagaccaggcttcaaaagcatcagcagtcacttcctagatggccttgagccactgtctaatcttcctacagccaccatctttcctggagtggaaattgagatgcaccacccagatctctgttcagggagacacttattgtcttttctgggagggctatgggcagagtcttcaccagctgggttccaagtcgtgtcacttcttagggtggctcatgtctgatgacaggctggtgcagttatgtaaagtcctggccatctcagcccaatttaagacaactctgaagggccattctgtctcccctcggggtctcttgaagttgtcatgggcctacatggcagctcaagttttcccttgtccatgtttgtttccttccctttgctcccataggtgttgttcccaagagcacttcttagtaaacatcctgcatgctaaactcagagtcagcttcctgaggaccccagcatatgatatgttctcactgcagagtgaggtgtaatcatatttgcttcaaagggttgttgttggaggttgcctaaaataatattataagttacttataatagtaacgttgttggaggtcacatcaaataatataagttacttagcacaatacacccaggaagtacctgggattgtgctaagtaacttataacattaggtgaggacctaatacctggaatttcttgctacttcaaaaaaaaatgcagcacagtggagttcaaaaacaaataatcacctaattgggaaataatgaaataaataagctttaagatgactcatgaaggataaatagcaaaggcagagaaaagacattctggtggagataacatgcacaggaacatttgcaggaaaaagctgaaatattgagaaattgtacatcatcccatttggcaaaagcgtaagagttgtgggtaattagtttggaaaggaagcatgggaccatattgcagaaggccttgaatatgtccttaatcctgttagcattgggaattcttgcaagcattttggacaaggaacatgatcagaattggactgctggagagagaagctgggattatagctattgattctagaagcatctagagagaggattcaggggaaaccctggggtataagctcaagagagagaacagtgagctaggataaacaagaagtccttgagtgatatctgtaattttaacagaagagtcagtgtggccaagtggagggctcagggtgcttcagggaacagggctggtcatcaggtctgatgctgcagaaaagtcaacaggggcctcctgagggttgtgatatggggatgtcctcttaggttaggtggttaggatgtggtgggtctatttgaagagtaactccagtgggctgacgaaggaggaagctaggttagaaagggctaaggcatgaggggcagatgataaagtgaaggtcttctcactggcatggtcaccaccttggagatgctctctagcaaaaagagctaacatttgaatccccaggccctactgtaaatacttcatgtgtaactcatttaatcctcaaaatcagccatgaacaaggcaagtactgcaactgtcctgtcttctatttaaaggaatgtaggcatagagaacacaagcaatgagcttaaggtctcacggtgttgaagctgggattaaatcacagacagcctgactccggagcctggacctaatagcccagtgctgtctctcacatactccctgcctgatatgcccaggcctctgctttcaggccccttgtggtgtcttctgcctacccctgatccccccaccaaatacttggtcccttctcagctttcttctctgcagcactaatgtgagcccctgtgtctgtccctcaggccacaggggttccaggccagcacatcctggtggcggtgctccctggcttacccaccactgctgaactctttgtcctaccctatcaggatccagctggagaaaacaaaaggtcaactgatgacctggagcaggtgagtcccctggaaaaggagacgttttcagcttcaaccgtttgtggagtcttcaactttctaagcctccatttctgacccataaactggtgatcctaactacagcttcaccaaaagcacatgcaagagcattcatggtaggtgtattagtctgttctcacactgctaataaagacatacccaagactgggtaatttataaagggggtttaattgacttacagttcagcatggctagggaggcctcaggaaacttacaatcatggcggaaggggaagcaaacctgtccttcttcacatggtggcagcaaggagaagtgtagagtgaagcagggaaagccccatataaaaccatcagatcttgtgagaactcactatcgtgggaacaacatggaggtaactgcccccatgattcagttacctcccactgggtccttcccatggcaagtggggattatgggaactgcagttcaaaatgagatttgggtgggagcacagccaaaccatatcagcagggaacggctaaattatttacagtgtggaatactctgtggagtttacaatgaattagattaatctatgtataccaacacaaaaaattgtccgtgatatcaagtggaaaaaaaagcaagttgctgaacaatatcatacttgtcacaagaatgccgtgagaagcaaatgacatgacatgcatatcttttttaacaggttcaacttttatacaaatgactaatcctttgatgatctaatttgtgtttgtaatgagtaacattagctcccgagcaactctactgccctgtggggttcacctcctcctcatctccactaccttctggagcatttgagtgtgtgtgtgtgtgtgtgtgtgtgtgtgtgtgtgtgtgtgtgtgtgtatatctgtgtgtgtatttgtgtgattctctttctcttttcccctttagtcttcttttttcttccctttcctccttttaactttaaaagactctcctgtctctgtagtggggataattatgttgttgttatccttctttgtccattcagttaaaatgatcagccttggcctagttgcacttttagaaacgaaatgattttgatttatcagttcttccaggtaaatagattaaaaataagattcctctcggccactaagtaaatattggctgtttcccttccagtacttggagattttctgtttactaaacccataatctagccccatgatctttagtcttccaggatgacttgagaaacttctataatagtcttattaaaaacaaccccaaattatggcatggcccacctcctagcacacaccttcttttcagctgccactttttcacttggcagaaggctcccctgtataattttctctgtgtgcaagtaatgaagagcagagctctcatggaaagccctgttgaaccccatttcctagtgaagtggaggtgaagggtgggcagcaggtaactcctcagatttgcatctaacctcactccccacctcagcttcccatcatactctacaaattattatctgcactgcattttggtgggagaaagaatagattatttcttatcacaacattgtcaagaacccagagggaaagcagatccctatccaaagcctttagataggaacatttgcagttgtacctcctctaaatcttactggtttttcatgaaatccagattttaatcttttcaagtatggaagagggtacagatttagagtcacctttttttcctagttaccacatcatctgtgcacttttatttctcacactttccatgtttttttctaaaagtgttgtattttctacatcattatttgaggggaaatttggaaagaagaggggtccattctgtgaaacttcttatacttatgtatggatgtgtcttgctttgactgtctgctttctctagacttcttgtttcccttcattctctgtctcttctgggtgtttcctgcaaaggcattctcagagagctgagtgtggccctcaaggcagactgtatcagtcattggtgaaccatgtcatcagagatctgaaactaactagcttgcttgaaggctgtgtgacttagaattggcacacatgtagaagagtctgtctattttgttagaacacaggtttacgtaaatatcaaccagtttctagtttcacctctgatatttattatgtccattttaccgatgaggaaagtgaggacaagaaaagttgaataattgagccaaagtcacacttatctcatggggtgtctgggaggattaaagaaatgatatagcaaagtacttggccttgagtaaaatgttcactggagatatagagataatggttacattcatgttcattatatggtaagaagagatgtggaaaatgaaaaaaatgagtttaggcctattaaatagactggtatagtcaagggcatgtattggaagagaggatgatgggaataagggaaaaaacattaatgaatgcagttactcaaaatggagaaaaacaaggacaataaggaaggaatgtatctgaatggcatgagctcatgcgagttatgcagatttatagcatgaaaagaaagtaaggtaccaagctagagactgtaaatttgtttaaggaaaatgccagtgtatcagcctattccaggactcaaagcaaagtagacacagtgactttacaaatgccaaacagagcacatcagaaattagtgtcttagttgtggagaacattattaccctgatggaaaaatgcacctgaaatcaacttattaaaccaaggtgcatgtctagaccctgtgagacaggggagtctcctggagacccatagttttcaatccaggaggggtcctttcattctctgctctgacttaatcacttaactttatgggtaaaaataaagggagtttttgaattaatttaattgagaagtccagaggtacagttgaggcatagatgaattcagaaccactcaaaagtatcaccaaattacttccctctcttcctctctctccgtctgttttcctggctaccatatgggaagttggcctgagaatgaagccaacacataggaaagcaagaatggccacaggcatccccaacttctatttagccagtttatcaacccaatccaaagacggtacctctcacctgattgcaccagcgagagttgcaggttcacagttttcacttgtctgacctgtttaaagtggtcatctcttagctagtccctgcagtcttggggataatgtgctgtcagtgacaactgagacgttttataccctccctgaaccaaatggaccaagactagacaaggacatggattcctcaaagaacaatgtggggaagggagagggaatgctgggaggcaaacgcaactgacttctggtatcataaattatacagaaatttaagacaaatgcaaagcaaacccaaagaacagaaatgaaccccctcctttgaaggctgtactctaaatctcagcggaaacttgagaagggctgtccttatcccctcatttcacgccttggccccctttcttgtaaaggtgcagtacagatccccctgcagtgaaagaactgggatcctagacagaggtgccctaaagaatgggagggcagggccccagcaaaggactctcagtcctccttccttagcttcctctgagagccttcctggggagcagcgatgctggcttggatcgagctatcttgtctgtgaaataaattgaaaattcttcacagtgagaagtacttgaccctgttatcaggatgaggcgggctgggttaatcgagtgacctctgtctgggagggttccaccagcctttatttgggatctctggtgagtgagaaaaggctcttgtgccctgagctggcctcatcaaggggagcgcgtgctgctgtcctgaggccagctgcttagatgtggagcaagccctgcccctcaagcatcccacttccttgctcccctcggagtcctcaggggtgaataaatttgtttctgtctctcctgtagggaggaaagaccgccatgctctatcgtgattgtttgtgatgctgtgctggggagataaggagcctaggtgtgttgtctttcaggatccttaaaggacattagaacatctaaaaagaacaaaaaagatgtgaaaaaaatgtcaaccacaaaaatatatatatttcttccttggctgtttttattactctacacggttggcagatgcagagcctgaaacctaaggaagaaaggaaaggcagatctcgatagggagcagggtgacagttttaagaaaatagaaatttattatgaaatggaattaataatctctattttctgtatatccacacattttgcttatcagtccagatctttttaacttggggagtcaaattacaaaaatactctggagtttacaaggaaggtcactgaagtaggagaactataaccaaaagtggaggaggtaagaggtggaccagagcaaatgtgtcaggaggaggtagagagaagcttaaagtgggtgatgggaaatccaaaggaaacacatatttatgacggatttgtgtcttcatgaaccattatccaggagaccccttaggcactttaatcaggctaaatttgtgtgtgtgtttgtgtgtgtgtgtgtgtgtgtgtgtgtgtgtgtgtgtgttatgaaggaatgaaattgagctactgttaattagaatttagtatttggctccattgcttccctgtcattcaatgcaaaaaatgtatgaattgggaaagatcttcctctgtttaacacaaaaggaatattcctcaactgctacttgaagagactttaatagtgtggcagaatcaagactgaccaactgagccagctcccaggtcatcccaggcaacaccctctttaaacatggcactagaatgctattaagttcagtaagatttgcattcatcctaccaccttcagaataaatattcgtattttagcccagtgtagctttgccattaatacatttgtctaagcccatttgcatctgcatttttaccttgtaccacttatttgggttatgtgttctatgaatttataaactactctactgtccttaaaacttttattttttcatgtttcaagaattgccactttacttctgatcatctgatagtgtttccccctcttgatttcattagaaattgtttggatgttgaatgtgttctttgtgtggtaaccatcactgtgtgactaaatatttccagcccactgctttcagggtacatgataggactgtaccatgagtctattctgctggggcagagcctcaggactgtgggagcagaagtgatatgtgccacttccaagctaaagtattcaaatgcacattgtagaattttgctagctccttttccctcttgtgctgtatgtaatgaatggaaatgcttgtgatggccgctccaccagccagtgtccctgtgtgaccacagggagcccaacaccactgcatagctgccatggatatgacatgtgagcaaaaaattgacctttcttgattgaaggccctgcccacagccatatctagttgattctgagtgctgcattcaatcttcctcttgtgtgaagaagacaatgaggaacattggtgttttccctgtcacaggtccctcccaagacatccttttgatgatagctttcctaaaattcgaattgagcctccactgtccttttaagtgggactttaaatgaaatgtaggttgcacttgaataataggcatattccaccaaataggcagataccaagaataatgtgttgtttctatggcgtgattgtttagctgatgtggaatagaaaatggactgtgctggaaagcagcagaagagggatgactgtatacaggataaatgaaatttgttaagacaacacgcttttcaccagacagaaaaagaaaaagaaataaattcaatttgctttagcaggttcagtctccctcctagaaatcacacagtatttcacttgagtctctatcaggcaagtgtttttcttctcatttaggctgttgccatactttccagtagaatgcagtttattctactcctttctatagccgaagactctcccaaacattacccaattatgcaactggtgaacagaaagtggcccctctgaggatggtgttaggaaatccccactcctgtagcccatattggtcactgggcattggggctgatgttttaacttcgggtgcttcacagatgaatgagagaaggcagcataattaatataagtgctgtattttctcatcttataaacctatcctgccagacgtctctccaactctcttctgctgtctctctctttgtcagcttgttcaaggaaaatatttttaatggagataccctaggattaggagtcaaacaaagccaaagtctagtctcaactcttcaaatattaactgaataaactttggtatttcctttaagctccatgttcctttccatgaagatgccagcactgacacctaagatgtgttctgctagaaaagatagtaagaagcaagcaactttaccaaaatagtgttcacagcatatataatgtcctttagaatatatgtaacaacttgtaatcttttgaaaaaatacaggataaacacttctacaagtggtgtggaaaacatctaaaatattgtcaaaatctgtcaacagtttcatactcatttcagtagaaaagcacatggttctaattgagattattcttatatgcaatgtaaattttatttagttttgttttcttatgcaaattttttctcacaaagcatgtgttcattgttgaatgtcctttgatgcaagttaaatatatgaaacgtactttctgttaccagataatttttaaatttaaatttccttcttaaaattttgtaagtgacacagatagagccaatgaaacaatgttgtaaaccaaaacaaaaccaagtagttaattattttcacaagggtctctcctggagattataaattaaaaatatgttattttgataaactccattttctggtttagctattggtatatctcacttgaagagaaaacattctcagtgataagaaacaaatattgcggccaggcacagtggctcacacctgtaattccagcactttgggaggctgaggcgggtggatcacttgtggtcaggagttcgagaccagcctggccaacatggtgaaacactgtctctgctaaaaatacaaaacaaacaaacaaacaacaaaatagccggatgtggtggcaggcgcctgtaatcccagctactcaggaggttgaggcaggagaatcacttgaatcagggaggcggaggttgcagtgagccgagatcgcgccattgcactccagcctgggcgacaagagcaagactccaactctgtctcaaaaaaaaaaaaagaaagaaagaaagaaagaaatatggcttcacctggttgaaagtggggagtctttctcccacaaatacatgtagttccctttagtccatgtgataaatttggcaaaacaggctaattccctcattacttttgaccaagtctttcatatttgaataaaaaatattttttctgaaattctgtatctgtgtgtgtgcatgtatgtgtgtgtatttcatagctaaaacctttgtgatagacctctaaaaactccactgtctgattcctataaagactctgccaattaaaagataagaacacagaggaaaaccattgtatgcaatctgtgttagaaatccacttctccacttctccttctccttcccctccccttccttctcctcctcctcctcctctttttttttttgaattagagttttactctgtctctgaggctggagtgcagtggcatgatcttggctcactgcaacgtctgccttctgggttcaagtgatttttctggcctcagcctcccaagtaactgggagtacaggtgtgcaccaccatgcctggctaattttttgtagttttagtagagatgggatttcaccatgttggccatgctggtctcgaactcctgaactgaagtgatccacccacctcagcctcccaaagtgagccactgtgcccggccagaaatccacttctgtaaacctgaatcattctggttgattcccagcacccaagaaaagaagtagcctaatacacagaataaagttgtttttgttttcagcatagttttatgacaatcttgtttttctgcattgtttgctaaatgacagcatttgaaaggctgggcttgctctggatcccaggtgctcaacgactgggcagtgatggtcatcctctgttcctgttgttcaggagagaagtttatctgtggggcagttcagttctgtcaccaatcaggggcttctgcaggtgactgtctgtttccaaactaagccatcaggccctgcttaacaaataaagggattaaaggcgttattttggcaactcactgaaggaaataaaactcaacaaatagaaaaggaaaaaaaaattaagaatttaattagcagaatgatggtcagaaagcatctaattagacttaaataacatgttaagtaaaatattaagtgattattagaatattaaaaataaggctagcagaccagataaaagtaataggagtgggccgggcgcagtggctcatgcctgtaatcctagcacttcgggaggctgaggcgggctgatcacaaggtcaagagatcaagaccatcctggccaacatggtgaaatcccatctctactaaaaatacaaaaaatagctgggtgtgttggcttacgcctgtagtcccaactactcaggaggctgaggcaggagaatcgcttgaacccaggaggtggaggttgcggtgagctgagattgtgccactgcactccagcctggcaagagagcaagactccatctcaaataataataataataataataataataataataataataatataataggagtgttgttatccccgtaacttttcagaaattcctcaacattataaaggacacagcaaatggagctaggttttctactctaaacagacgaaccattttacctcatccataaaaccttaccttacactatttctacccaaatgaagttatttgccccgtgcttggggttaaatatttcatagtccagaattccatgggtctgcccggtatccgtgtgtcagcctgaggaacagtttagataatatttataagcatgaaataaaggttagccaatttgttacttacgttgtggctgtactttgtttcaattgcatattttagcagaactatatttaccatacaataaatattcataaagtgttttgtgaaaatcacatggtttgggaaatagaatggaagtaaaatgaatatatattaatcttatcggaatgtgtaaattgtatatacttcttttaagtcctcatgcataacaaatgttctctcaaaagactgggggtaagttttctaagatcatacagaataatttttaaagagtataattattttcattcactaatagtttcttctattttgttgcaattagcacgtaaagacaggtcatgcttaaaaataattgtatctgcatattctggaattaaatcaaaatcatataaaccttatttatataactcacgggtataatattgtgataccttggtgaaaatagtaaatatttctaagcttattggtttataatcagtatgacacttttggtgtcactaactatgcttcttttttcagatatcagaattgctgatccacacgctcaaccaaaactcagtacacttcgagctgaagccaggagtccgagtccttgtccatgctgctcacttaacagcgggtcagtgtccatgtcccggggttctggctggtggctctggcaaagggaatcctagtccgtgcttccttcctcataaaaaggctagatggtaacaatgctaatcagaaatcaaatcagtcatcggatcttggaggttcccttgcttggtgtttctgccttaatggagaaccgttaaacaacagaaaaaggtgacactttcagctgggttcagtggctcatgcctgtgatcccaccactttgggagactggggtgggtggatcacttgaggtcaggtgtttgagatcagtctgaccaacgtggtgaaaccccatctgtactaaacatacaaaaatcagctgggcagggtggtgcatgcctgtagtcccagctacttgagaggctgaggcaggagaatcgcttgaacccgggaggcagaggttacagtgagccgagatcacgccaccgcactccaacctgggtgacccagtgagaaggtaatattttatacttagtctctggcaaaaactgtcagcaaaccgcttatatacgtctcacatggaagcatgctttatttatctcatcagaaatcctgaaaataacattaacaaatacatttgtgggggtctttctgcaaagtcttattttcaacatattcatattacaaagaattttctttctttacgtttcaggataatgtaacgcagtagagatagcaggaacttaggagtggtacagggccacacccaggaattgaacctggaattggtcatgatcttacaatttacttaatgtcattgagcttccatctcttcaactgagaaggtggtggtgaggatgggggatcctccttctaagcttatggagagttttcaataataatacaagtaacttagaatagatgataacacaagtagcttaggatagttttcaatgataatacaagcacttagaaacagacattgttgtgatgtattaataataaattaacaatatttattgagtacttatttttgcagagtaccatgctggtgctccatggagtacaaacaccagtgcaaagtggtcttcatcttcacaaaacttataacctggttgtggtgtggggaagttcggtgtagcaatggcagtggtactgtgggatgggaagaattggcagtggagagtagtcagtgagcaaactgcataaatgcttatagagagagagactacgtaacatatttaagcacttggatttttttttccagtcagaacattggtttcaatcttggctttgttactcactatggaatcctgggaaagacatttaacttctgtatgtctcagagatggtaatagcatctctgccagtgggattgtgtgaagattaattcaggtaatgcacttaggatagtgtctgaaacatagctttaatatttatttttactgttattattattagcaactaaagctgtataggaaatttaaagcaggtatgagttatatcctgtcaaaatgatacaggattgtttcatggagtaggtggtttcgaggaagaaccttaaagtatggatagcattaaatgcaagaggtcattctaagcaccaaagcaccaaggaagtaaagcctaaagggctttggggatgctgagtaaatgaggacaaaaagtagctattgcaagcaccattctctggtttcctggagatttcacgaggctctgctaggtctagcggaaggccaagcaggctgaccactgacttcttaccttcttggattttatcttttttctttattggatttcatagaatattttattgctcttgttgttttttcaatcccactatttaaagtcactgttcctcagcatggagtatggaggtgtggagggtggaaacatgccagggtgtgccgtttgtacttactttagtgagtaagccatcaaaggtctgggaagccatcaagacctttgaacagaagtgtgactgattcagagcattccttgaaaaagatgagtgtaaggagcaaggaggattgagtagggcacatctcctattctgcatcttttcaccctaacacatccattgaacagatatttaccgagtgcctgcctacgctgggccaagcaatgttgtcaacataggggacagagtctctgccctcataaactgctattgctggtaaaagccactttctgaatcgtatgctggtgaaaattctctgaagaaaaggctgccactgccaacttatctcagggcatttgatggtcctgactggccttttcctacccaaaatgttgagctttggtgtttggtgaatgggggtagcacatggcagagtcacacatgactagttgtatgggagaatgatcaaattccagaaacaagagttgtagtcatcctaatagccaagccactgacaaatgtcaactgagtagaaagtaaccactgaatatcgttttaaaaagattcactgatttatttcatctaatcagaccatggagcctgtttaggtagcagactgaacttcatcagccactacttgttccctttgagtttagaaattaaaaacaactaagccggatattccatactgaagtctgggtttgaagggatgtggccaacttgtctatccttcatgatgcaaaatttgcttttatagcataagcagcctttgaatgaacactatctttaggtttggtgtatccgaacacagtgccttttttagtccggagaccttgctctgttgaacaggagagcactggaggtcaagctagacctggaactaaccctatttctcccattcttcaattctggaggccattcacatttcactctttttcttccttccatacttctcctccatctgtgtctggtttttatttaactgattattgcattatgctctaatgatggttcagatcattttggaagataatgaatgttcccaccacaaagaaacgataaatgattgaaatgatggatatgttaattacccagatctgatcactatgcttatgtatcacagcatcactatgtaccccatgaatatgtataattgttatgtgtgaatttaaaaaattttaaaagattgatatgttaaccgtatttaactttagggagaagtggtatgtaaaaaaaaggaaaccttattttaaatgttacttaaggaaactttcttcaatgacaaatagtttagagctgggaccaagctgaaatattgagatcaaaaagtgggtaattagctgagactggtttggccagctggcttggccagagaaactgaatacagcaaaggcatccaaaggtccttggatttatagctccatgtgggaagggaagtcaattcctgataaccatgatatgttaatcccactggtaaaaactccagatgacaaaaaataatgcaaagttgggaagaactgaaaaatgtttccaattcatgtttgtagttttttctataactaggagtttcggaagcaggactaagactcctgggaagaagggctggcaaaagggaggtatattttggggacccagatatgcacactgagatttaaagaagaaccccttgcagtataggtatgtgtaacacaaagtcaccaaagaaaaaaatatccatttccaaataaaagcccaatcttagcctggaccaatttggagagagtgagaaaattctttgacttccaaccattgtagaaatctttcctgttagttttgatagtagggtctttcggctatataattccaagcctgatcaactggcattattaagttttctgtcatggctagttcagcaactggagtagatatagatttatatgtggataattagctccagtttgataagtaaacaaagataatgtcatgggctgatggaataactgagttttggaaacttttgctatattgagtttggctatgctggtcataacgcattagagctggcggtgtccacaggagcacagtcactcagggctcgattttcttatgcaaaagacaaacgtgtcaacgggaacagcaattgtgataaggaagtaaaatatgggagggatctgtttcctgttggtgattgctcctacgttacctttagctacctgattaaaagaaaaaaagaaaaaaaatatttgaatagggtggtagaccctacatatacaaaaaacagtggagggaattcccccttcactcatggaaaacttggcactttggtagggtatcggtgggccgagacacacttgccacagttttgtttctttttttttttttttttgagatggggtctcacccagtcacccaagctggagtgaagtggcatgatctcggatcactgcaacctctgccccctgggctcaagccctcagcctcccaagtagctgggaccagattcatgccaccatgcccggctaagtttctttgtgtttttggtagagacagggtttcaccatgttgcccaggctggtctcaaactcctgagctcaagtgatctgtctgcctcagcctcccaaagtgctgggattacaggcatgagccaccacaattgcttttattaggttgaaattaacacattaatatttgggtggctaggaagagaaggagaaggaagcctgaaaaaaaaaaaaaagagaaacagtggggaggagtattagatgtagaacttccacatcaactctatttctctttctctcatcccccctgtaggcaggggaaaataaaaattaaaagaaaaaaaaaagaaccattgttagcaacatttcatgtctcataagcaggattgctaataccttcccagggaccattacaacatgctgttgcatcccattaattgctcagcagatgttcagcagccttcttttaaaaatgtttgagccagagtatgttgttggtgagagaagcaaatgcataatttggtttgtctccaaggaaaaagaactgtctcttttcaagaatttactagccttattttggttttcagattcacttccctgtttgcttttatgggaacacaaggaaagcatttgcagatacctgaatgtcattagagactggatggtgtctgccccccacccaccaacacgttccatttgggaattcattaactgtggtatctaagctgagctaaattttgaatgtagtccttgttttgttcctagccattcctgtggttcttggttttcatgcagtttttcttaagggtctaaccactcctgacaggtatgtttctgaaattctctttgcggaaaggagagacttgaacctgtatgagaataagggagaatgagaaacatgttatccagaaggttgagggagggtcatggcctgagtggctccctttgacttttagtacctgatggcagctggcatccatgtttagcaaacaaaggctatgatgttgcaaaaacaatacaaagagttggaaaagggaatagaatgcagtcaagctagtgttagactggaagcactgctgtcttgaccaaagtgtacgtctactcatgatattccagattggaatatttctccccacttcttcacctatttctccttgtccacctgtactttaaggctcagttcaatgccaacatttgcatgacatctttccagagacatttgcctggacaacatcttccccttgtctgaaatcacatggatttctagatctttatctgtctgatgttgatgatcatgaccatcaccttttgaatcactcctatttaatttcttttggatatagttcatcatgtctttatatcagcttcttcatatatctttatatcatcttcatcattttacctagcagataacttgcacatatcaggtgcttaacaaatattgtttttatgaataattatatgcataatttatagcctgcagagatatattcaaaatcccattcccgcagttaaccttcagatccagtttattcagtttattcatttgtgaacctgtccccatgacatgcttcttcttatcaaataactcatcagtggagacttgcattcatttacacaataagcatctagggaatctttgtatttttttttcttatggcaggtgttctttaaatatgcattgtaattgtttatatacacattgtggggaatgggcagttgaaagaaaactgggcctatccttcctggagttctacgtcccagaaagagagatctgagagagaatgggagaacgactggcaggcgactgttaccaaaagagactgaatcactggtccctattttattgctctggccactggaagacatggtttcagtgtcagagcagcttcacttcatggcatagctcatggtcacgtaccttggactgcacactcctcaccttaacaaaccagccaaaccttcttcacatcttctgtgatgcctcccttgtcctccccatctctcgtgtatgcatttgccctagccttctgtatcgtgtatcttaagagctataatgggctgggtgcactggctcatgcctgtaataccagcactttgggagcatgaggtgggtggatcacctgaggtcaggagttcaagaccagcctgaccaacacggtgaaatcccatctctatcaaaagtacaataattagccaggcatggtggcgtgcacctgtagccccagctactcgggaggctgaggcacaagattcactttaacccagaaggcagaggttgcagtgagctgagatcatgccactgcactccagcctgggcaacagagcaagactccatctcaaaacaaaaacaaaaacataaaacagctatgatgtcattttagggagagtttttctagcaagaatctggaaggccctgaatctaatgcacaccatttgatccatatagttacttgtggaagaacaaacctgagccgttaagaaaatatccctaaagtgccaatagttttctcattgaccctagtaacttgaaatgtactcaagggcaggatccatttttagatttatcatcttattcttcacatgactctatgccttactttgaaattattcctttaaacctatagtttatcagggcatatgagatgagtgagggccctcactcacactgagctggctagacctgaggcacaaatactagttgcatgaaactttactaaattctaaatgaggagaatgaaaaaatgttctatgcagaagattcagtaaagctgagtctttaaggttgaataggaattcaccaaaaaaagagcaaataagcattgcaggttgagaggccaggttgcacaaaggcacagaaaggtggaattatatggtttatgtataaaattatgtgttgtctgacatggattggggcttctagatatataccctcaaatattcataattagtatatttactgagggtaaaataatgagcaaagggagagggataaaattcaggaaaaataatatgctagtatattataaactttgttgtccatcatccattgtgcgctagtgaagaaattttattaatgcaaatttgagatgataaggtataatgaatttggaaaatgaaaaaaaggctgctagaaggattttggggttttttcctttaataataggtttgggcaaaactccattatcatttctatttttaacaaagtatttacacacaagtttacaactcaagtggcaagtggcaagatatggtaatttgtttagtcgagatggagacctgggaggtggagcttgttttttttttttttttttttcgtcgtcaaagacgataaatttggtggttcatgttgggttggatgtcatcaaacatataagtgaaaaaccccatcaggaagctggaaatatggaatggaaactcaggtgagaagaccaggaccagaatatacattcaactatgagctttaatttaccatctcatagcagatcatcaggtgaggggaatctgctgacaggtgataagttaaagccttaattgccgatttaaatctttcaagctctatcaaaccctgtatctttgttctcatgagaacccttggtcatgagtaaatttagtccttatatttggtggggagaaggagggagtgggaaatgacttgaaaacctgttgactcttctaagacagaataggtaaggtttccatgagaatagaaagtaaaaagagggcaagcaaggggcaacactgacttttatttgagaaggcaaaagcctaactagatggatacctcctaaatagcaaataacaaccctttagggattatgtgcccttcgtaagttatgtactgggcaaatgaactgcaatttggatggtgggacttctgctcaaagaactaaaagagctggagctgactagttccctcaaagcatttgagatacatgaaaccctgccccatagttagaaaactctttccaactcagggtgggagatatctgctataaatagcagctgttctcaaacgtgactttacattgcaattaacttaggaagctttataaagatagagattttctaagcctcaccacacacagtgaagaatcccaaggagccaggaataggaatcttcttttttttttttttttttttttttttttttgagatggagtcttgccctgtcacccaggctggagtgcagtggcgtgatctcggctcactgcaagctctgcctcctgggttcacgccattctcctgcctcagcctccggagtagctggaaccgcaggcacctgccaccacgcccggctaattttttgtatttttagtagagatggggtttcaccgtgttggccaggatggtctcgatctcctgacctcgtgatctgcccaccttggcctcccaaagtgctgggattacagccatgagccaccgcgcccggccccaggaatcttcatttttagcaagtttctgctaatgatgcttacgacggtggcctcttcactggtcttaacaaccactgttcaacagcctttcacagacagaaatccatctgcataacaaggaaaggtgaacgactatctccagtaataaatctgatttacaactcaagccatccactaaaacagaagcatgaattaaataaggagagcctgtgatattaagtacaggaggaaattagtaataaatattaaaatctaatttcttggaatatttggagctaacctaattggcagaatgggcaaatgacaatgaggaagggggagaaaatgaaacatgcccctgaatctggggcatattaaatccataatctagatgaatggcaaaggccagccaagagctgtggccatgaagcagttgaaacatgattaaagtgtgaactggaatcttaatggcagatgtaattgaacagccttgagttttatgagagttaaacaaataatattatctagatgctgttcatgtgccagtgtgagcataaaatgatacagctacatttcactatatgtctgtacatatttcagaattcagaggttgccctacgctgggctttccagtttggtcgctgttcgtctggagttctggataaacgcacattataaaaatggtaaagggttaatatttatcaaaggaagagcctcaaacctcaggttaaataaaaaaacatgaccccccccaaaaaaaatacacaggaactttgcttctacctcctcctgtctgtctatcagttgccttatttaaactgctcggttcaggaaaactgtcctttgtcaagggtatgtgtgggttttttaataaaactgttatcttgtgttatcttggcctctatggctgctgctgactggtttaatttcttttgcaggtgtaataaaaagatgttatcacagagatattagagaattaatatttccaggcttcagttgctaccactggatgtgttatgagtaaatttgggagggaataagaaacttcaaatttcgacctaggtcgtgatacatcatgaattctgcactacaatttcacattgagaaaaagactttccacttgaagggagaattaccgttcgtcaagaagttttagaaactacaatataatctcagccacaacattatggatgcagatgccaaataggagttgtggaactctgaactgtaaagtgaagtaaattgttgcaataacattttccatttagggatgaaattagtactggtgaaattcttccacagccagtaagtttatctgtctctttagttttcggtcaccgtattatctacatagtaatcatttacaagtcttttttaagtaaagccttggtaccgatatgttttcttccttttatttttccccaaaataaatatattttttatcttcaagtaattaggtagttgcacagatacatagacccagcggcttttcatagttatttaatcattatggtgttataaacaatagtgggtttatcatgtagatatatatctaaatatatccctccccgcaatatgattaaatgtgatattttcatctacctaccagcgtgcagcaatgaggttgctcgttggcttcgtttagacacagaatctagttctgttttccagtctggagggcaggggcacatcatagctcactacagccttgaacacctgggctcaagcgatctgtctgcctcagcctctcgagtagctaggactacaggcacgcaccaccacatccaattaatatttttattttctgtagagacagggtgttgctatgttgcccaggctgatctcaaactcttggcctcaggagattcacccacttcagcctctcaaagcattgagattgcaggcatgagccaccatgcctggcctagcttctaataaattctttcttcaccatttctttttttctgagattacgggggaccgtaaaaggggctgaaatgattacagggtaactagactgagttagccaggctagaggatatgtctggaaactcttggtcagagaatggtcagcaaggaacagtcagatgaacagaaacaggggcacaaacatgcgtcagaaatgcagtatcccaggggaaggcaaggcagatagtcaagagaaattagcaaaaagaaaaaaaaaaagtaaagcaaaggggaaggataacacatataaaatacagacaagatgccagaacataggacaagctaccctttagacaccaagtttctgatacctagagtgatcaggactgtcctgggttatctatgctatatcagcgtaagctttaatagcgccccctttcattcttaaagtgtcttatctttgaaaataatatgtatggtcttcttacttttaccctgccaccctgagagtggggatagaagactataccaaaaattggctaatgtggagctcaaaggtaataattggtaattgaatgtttaaccagttgaaagagacttttgaggaaagtaaataagctattgctatgtaacaaaccacctagaagttcagtggcttaatagtaagcatttatttttgcttatgcgtctagtcttatctacattcacttgtctgtctgcaatcagctatgggttgttggttggggagctctgctgatcttggctggtctgtctcacatgttacgggtcagctgcctgcaggctgctctagcatgctttggttggaataattaacctggcctctacatggcctttcatcctttgactgttctggtcttgctcacacatggcagtggtaggattccaagagaaaaagcagaggtatgcaaggccgtgaaattcacaattagcacaccattgcttccattgcattccattgccagatgcagattataataatagctcagattcaagacatgaagaaacagattttacctcttgccttttaggtgagacaagcttcaaactcattgcacaaagtttagacacagagaagggtagaggattgagccagcaatgtaatccatatctacatgaggctgactgctcacttaggggagacttgagatgcttttaggtagtttaacaaactttcttctggagccatcaccagattgagctactatcaacagcaaaggggaacatttgtgtgtgtaggggggtatttttgctttgttttagtgatccagaaaatataaaagtcaggcatgccctaaagacaggactggaagttttatgagtgagaatatctggggcctgctatgcggtattctcaaactgttatacataataattacctgggtaccttgtcacatatatggattttggagacctactctcaaagactatacatttttttttttttttgagacagagtctcactctgttgcctaggctggagtacagtggcacgatcttggctcactgcaagctccacctcccgggttcatgccattctcctgcctcaacctcccgagtagctgggactacaggtgcctgccaccatgcctggctaattttttttggactatacatgtttttttttcaagtgaagcctagctaacaatattttcacaagtgctccaagtaattctgattcaggtagtccataagctacactttgaggaatatttcacatagtagccaggaatcatcaccttccaaccttagaaaaccataagtcattcttctcctcttgtctgtttattatgatgatggttggtcttggagttactgatgtttgtcattacttggctaagtgacctcaactccctgtcactggatattactgaagattcaccctcagtttaaattcagaaacaatgcttcacttgtcattagagctactaaaggacaaactgagacacattaaaatgttaaagagtttatttgggcaaacaatgattcattaatcagttagcactagaccacagttgatttagggctccctaaaaggcatgaggcttttatggggtgaaggtgaaagctaggcaaagaaaatatttgatcggttaaaatggaggaatagccttctttggataattctagtagaaagtctctcattagatattagctagtggtttctaattgattaagcttaagttttgttttcctagaatatgactgtttactctttacttgggttttggtttggttacataggaacccaggacgccagagctgcctcagtctaatggcctcccaattggctactttaacaagagacttccctggaaattcccacctagtctagtctgcagtcttgtggctttttcccaataacataggaaactttaagactctgatgattggatttgtttctaaatggagggaaggcccattggacaactgaaagtgctctgtaaatggaagcctttctgcctattctgcattctggataaactttctctgtgctattcccatatcactgtaatttctgaaaaaatatttcagaccacatggattttgtgatattcaaagcatataactcaagcctgaattgagtctactttggggtcaggagaggaaaaaagaatatcaaggtatggtaaattacttctacaacatcctgaaaacactaactcttggattagaattagagttgaaagtttcggggtcatagtgcaagtagcagttctccaggaatgtccttttgatagaatgaaagtgaacactggacaacaataagattgttctgcatggcttcactgggtgatgctaccatgttattgaccttaaaacttggaaagaaaccgagcaaagggcaaaactgcagcaagggggaccgggtgcaatggctcacacctgtaatcccagcactttgggaggtcaaggcgggtggatcactcaaggttagcgttcgagaccagcctggccaacatggtgaaaccccatctctactaaaagtacaaaaaaaaaaattagccatgcgtggtggcaggtgcctgtaatctcagctactcgagaggctgaggcaagagaattgattgaacacaggagaagattgcagtgaatcgagattgtgtcactgtactccagtctgggtgacaaagcaagacttcatctaaaaacaaaacaaaacaaaacgaaaaaactgcagcaacagggaaagcagtgcctggggagaggcatttcctagagtgttatgtggaacctagttctgcaaagggtctgtggtcaaatgagtttatgaaagactatggtaaagttaaatgtgttcttttctgcaagggctgctgtgatcatttaatatactgatgtgcattgtgaatctccatatggggaatgttgtatgtatcattgccccaaattatctcaccagggaactgtcatcatttttcaggattttttttctgtagaagaatacactttcagaaatatgatagcaataatatgacaatgttagaaatattgggcatgtagtctgtcccaaatactatgacagtactttataaattccatctcattttaatctcacaaatttctagactaaacactagtttcgtctccattttgcagatgaggaaactgagatttaatttaagtcacttagtctataagtgacagagccaggtttgattctgaaaagggctcatatcattacttaaccccaaatgtggaattttgaatttgttctcatacatacaactataaccatttatttagcacttactacgtggcaatcacttttcacaagaagattgttgttattattgtaagtgttcccattattatcgttccaggtcctcatgaataaaatataaaaattcaatgcatttccaaattcctcagaggattttagaaatgatatgtgcaagtacgcaggcttaaaaatgttgagtcacttggagtactgctggtatccatgttttactttgtgcatgaataatggcaaaaaactgctcagcactttcccctacacgtctaccttgtttaagctgcaactggaaagggattaaagtatgctaattccacacaacaagctaaagcccatttatcacaagtttccatccctcagcaaaacacacacaaatgcacctaagtgctgggcaaactaagaaatgcagctgctgttgtatggagcaataataggtccctttatactcaggcaccaatcagcaagcagacaccacccacggaacagagggcagtggtagtcagtctctggccactgctgctggctgcttcctgcttcctgcttcctgcctctgagaaatgactgactgatgcagagatggggagggtgaatggataacacacattttagaactgggatacagaagttcattttcccagaataatatgctaattacttaacagtgttaatgctgcttgttgaagaatgatgatttaagtgtaaatgatttagaatcgaaagacaacctggggatggggagagataggaggaaggaaagagaagggaaaaggttcatgtgtgtgtgtgtgtgtgtgtatgtgtttgtgtgtgtgcatgcatgcatatgcgagtttgctgtgttgctgacagcttggacaaagtaattttctctcagttttccatttatttcaaatgccaaccttttcaagcaagctcagtattcttagttgcttcatatcactggtattctggttatgctgaaagagcatttagttaggagtgaaaagtttagctttatttcaacctctaaccatcccaatcatctgtggccccttccgagcctccattgttccctgacaaattaagggtttgcattagaatattgcctttaaaacatcttcctaatataatttccttgatgtgatgatggtattgtggtaatgatgagagagagagagatcttatcttttagagttataggtggttaaattataagttttccaagatttatttcaaaataatccagtggttggaggttgtggggactggataaaataagactggctgttggttgatggttgttgaagctgagtggtaggtacatgaggcttcatttctgtattctgtgtgtgtgtgtttgcatgcacacatacatatccatacatatatatacacatatgcatatatgtatacacatacctgtcttccaaacgtaagcgtacatgatttattattcctactgctccttttaaaacttagtattttaacttgtgctccttgttaatttgctttttgtgctatagtcttagtcctaatccccatcctcagaaatatgtcttttactgaaattagcccaggattgagtatatagaaagtgtgtgtgtgtgtgtgtgtgtgtgtgtgtgtgtgtgtatgtatgacgattcaggttcaagtcttggttcttccatttactagtaagtactaagtccttttaaaacaacactaaccaatgagaacttcattgttatctgtttaatggggatcatagtcactgccttccatttgtgaaaatcaattgtgataatgtctatgacaaatggaaggtgttctcttcccctgatgacatcctaccagttgcagggtgagttctgaagaatttctgaacctctctgccgatggcattgagagctttgttttctaattttgaaccaaaagaaaatttgccttgggcgttccacggcagtgggaccccacccatcttttacacacaaacctacatattcccatttcaaaactgaggtgaagtttgacttacaggggagagaaaatagcgggggggttccttatattcagtgcctcctgaaagccaactctcctgaaatgactattttctgagaaggaaggggtggctttcatttttcaccaaaactatgtggttagatggaatatgcttcccagtatcaatacagagtggccgagatgtaatcctgaaaagagtagacagagcagaagcaactgagagtcttgtctgagaccatcagtattatagtcacttattcttgaacttttttacctgggtgattagaatgttgccctctcggctcacaccagagaaaaccacagaaaatggtgattaaaggtcacctgtatttctgggtatcaggctttgcttaagttgatggaaggtaaaggtcagcaccaaggcttccctggagtacatgtggcttgtcttttatgcacgagctgcactacatttgcaaaatgtcaacttttaagagggtagaaattaattgcaaagtctacaggtacaacaggtttgactgtgagatgggggaaggtggagaggtggcgagaagtgttttccagactgcacctcaaggggaaactcagggagggagactctttcatggaggcagaggcttctgttttgtctgagagaaaaactcactgtgtttgagaggctggagcatcttggggagggctgtcagagcttttgggagattgtggagacagccaggtggcatatccctccttcagcatctccgcggctaccctcgtgaaatactcacttggccatcagtttcctgtgtacaaaaatacaagcatgctccatcactttgctgttctttctctcacgtatgacaactttccaattatttttctcacatgacaactactggagtaggggtgacggggtggttgaattcacaaatgtattcctgcaggtggttttattggcaatctgttttgctttgtggaaaaagcttacactcagagtataataaaatataattattatattataaatattgattaataatactaatactagcagcagtagaaatgaaatctaataggtacatgacttactatgtgcctggcacttttctcaatgcgtaacatacattagctcacttaatcctcataagaacccaatgaagtatataccattatttttattttaccacataaggtacattaaggtgaagcaaattgcccaagaccacatagctagttagagtgggacctgaatccagacagcctggccctggggtctgtgcttttcattgctctgctgcagagcaggaacatttggggtgggagtaggggtgggctcagatgcatcccatgtcagccatgtgacatgcatcttgtgtgtatatcccacatggttttccaggacttacctctgcttgtgtgtgaaacatttgagcctctcatagagtctcacctgcccagttctctgctcatttttctctgctctgtttcccccacaagcccccctggtggacctcactccaacccacagtggatctgccatgctgatgctgctctcagtggtgtttgtggggctggcagtgttcgtcatctacaagtttaaaaggtgcgtgtccctctatccacgttcccccacccctgacctcttccttctccctgacaggttcagaagcatgtgttacagtgatgtgcatagcagtgatggtttctattaatattttaggaagatcccggggattaatgtttatgcccagatgcagaatgagaaagaacaagagatgatcagtccagtcagtcactctgaaagcaggcccaatgtccctcagactgaactaaggaggcctggccagcttatagatgagaaggtggaatcccagctcataggtaaatgattcccagtagccaccagctgttcggctgagtaggcaatggctgactctctctctaacccctttctggcttgacataaccactttcttttgctctaacacccctgagagaaacagctaagatggctttttccctgcttcctctgattgggatgggggaaaaacaaacaaacctcttgcttctatctagtttttttctctcattagtttattcctccttttgcaaaaccctccctaaaatattgggcttaaaatgttaaaatgttatatgtttatgggcaaagagcaaagcatttgctttaatagtatataagaaggagaggcctcagaggctaaggctggtggaccagagggctgggcagggtttgcaggacatggtatgtattgactagaatgaaacatggtagcctcaactggatacagctcttaaggagggcaaactgctctggaacaccagtagagaagtgacataatgagagtggccagcctgatcctccagggaattttttttttttttacatctattggtagtctaggaactttccctcaggagatttggaacctaagattgaggacaagaggcataatgtttgcagacatccaggcagtagagcatcctgagagagaccactggtgggtgagactattacagagcagattagcaaatttcttcctctttttagactgtcccttaccagaagttgtaaaatggactttctcatatttcaatggctctctctctgcctgtgaagtaggcatgggaatccaacaacgaggtatagagaatctgacgttcacttgctagattctgctatttattgcagcagaaattttccaggaagctagacaaacctatgaagccactattgctgatccatttctctgtctggttcctcctgtctgttggcattaggagttgaagccttatatgtttacatctagatcctgcattgctgacaacagtgaataaattattatataaccattcatgctccactctaatgtgataatgccaaaccacctagaaggcctttacataaaatttttaatcttacttggaaaacaatgagtatgtaaacggaaacataaccctctttaaatgaatatgggaaaggtctgtggctgtgttaaggggaaatgtaaatgcagtgactggctcctatcatagataatgataacaactgcagtcacatctggtgtccgattttcacagtgcactttcttttatttggagaggcaaggtaataaatgtgtgattgcttggggctaaaaagaaaaaagtcttttctgccttcaagtccagagaagcattcaccctgtctactcattcctaaagcttctaagtgcatttttggggatcgtttggttctcagtcgcatttccgtagggtatgaagcacagcctctgtttgctttattaaagtagtaattcctccttctccaggaagatatcgcagcacattgcaaagtctctgacacctttccctttccagtgtcattaaatgagtaagtgttacacgttttctcttaggagagtagctttaccctcccctccctccccttctactcaacctggtgactcatctctccgattgcaaagagcaagacacgccactccgccttcaacgccaaagcggggatctgctggggcacagtatgcaatttaaggaaaacccccaaaggctacaggcgacctgctgatcaggaaagaatttcgctcttgtcaagtacatcatccttcatgaccactaactttgtgttttttttctttcctttgttgttctgtttcctattttgccaggaagtatttccatagttgctgagaatcaaagcacaaaagaaatccctacctatgtaaatgtttgaatggaggacgccagtaaaaaaacaaaaacaaaaacaaaacaaaacataaaatataaacaatcaaaatccaaacaaacaaacaaacactcactgcatcgggactttttaattcttcagacacagacaacaagggtttttagctttaagcctgtgcatgtggacaatactctgagaacatgtctggaggggcagtgtacaggtgctctattttaatggaaaacactcccctctccctctttcttcttctctctcttttttctgatcggtcgtgtttgtagaaaattcataacatatataggccaaggaaatctgcatgtatttttggaaatattcttggctctagatttatcagctattttagcattaaaggctgatgggtggattagctaccccagctcctttcataagacacaaagacgtgcacaggagtttgaaaccctgagctgtttctctgttccactttccatactgtcatttcccttctaagttagctttggtagctctgttggtcagcagtggccacaaggctgctttctgcactctctgtggccacaggaacaaagatgcgagttgaagatccctttgtgccggtagaataaggaaggaagggaggcagggaggcaaagcatgtcagaaacggaccttggtttcctgttcacctctttccaccatgattgcctccccttgcagctttccctactcctgccccaactgcagtaggaaatggaatcccattagttacccattgtcctgtcttcacatttgtttgtcatccatgtgtgaccatgatctgttgatatctttgaatctcttccctccaaaccccaagtaagttgtccttcaactgttctcagtttttcttcccaaacatattgctagattctggacattaaccctgacgtttcctaaatactggcctggcctgtgccgcccctgcccccactactcacaagtttctgagccctttgtcagttttgtacattcccaagcatgccagcttctgtgcccatggaccttgctgcatcctgcacagcagggttcagtttcatgtatctttgtcttttcctctagaacctgcctttttcaaatatccctgccttttcccacctggaaacatatactgtatgcgaaagagttgatatatgcaaagtaattcaaacctggccatgtactttggaaaagaaagcatagagatgaattgtggtgttctcacaccttaacgaaaatctcgtgcgatctgattccagaagattcttgtgagaaatgttttgaatgtgtgacaatttcgcagggcaatttcctcctgtgacggttgctgttacctggtatttccactctcacagtagaatagaaatgtttgtgaaataaaactgattttaactggaaggagaaacaggttaatggactttgtgtttaagagtgtcaaacagtctgagagaataaatgggggtcttgtcttacattagggtgagagtttgattatttaggatgatcccagtgatttcatgtgtgctctctgacctctgagtatcatagtatcattaaagtaaagatttaagtctgtataaaggaggagagttactgattggcaaaaaagattggcacaaagcatgaagaaaccccatttttcccagggtaatcatgaaagaaggctcagagaaagagggaaacaaaagcctgttcagcagaggcccctttagtattatggactgggcaaagcccactataaactataggagaaagaagttctgataaacctcttagtatgctcagcctccttctttgctatgtccctaagccaacagggtataacacaggccctggtgataatgagggtgtcctaaagatcctgatgtccatgacttcatgtagttcaggcacagaaagaatagcaaagctgctgtcagaagtttgtcaggcagagatgtttatggttgaggataccccatatgaatctgggaaatgggctaggcctgaggcagtcacctatttgtagaactcaattgatccccaacctgccaggcttcctatctcataggaaacatcctcattgatcctcttcagttggagtctcccaaatttaatgtggaagacaaagtgttggaaaatcaaaagaggctcactcaaaccagcacagggagtcctcagagttgcagttcaattcattttaattagaaaagtatgaaagaggtataacactcttattctagcacagtgccttgcctagagtagtagtatgaaaactatttgttgaagaaataaatgaatggaaagacatagggaagaatgggctgtaaatcctaattaaaaatagaggtcgacatgagatacctggcattttgggaagtgaccaaagatggccagctagagattcagcatctccaggatcctcatgtgcctctcctcaaagctccctcccatctgtaggagattagtgaggcaaggtgctgctcagagaggaggacctcattgttcttaggaccttggccagttgttctcaaagtgtggtacctggatcagcagtatcactatcacttgggctagttagagatccagattctggatccataccccatacctactgaattagaaactctaggggatgaatagtggtgttctctgttgctaagtgacagtgggcccagccacctattttaacaagccctcccagtgattgtgatacatactaaagtttgagaaccattgtactaggccattccagctgaatctcaaacagaaggcagtaatgagagcctacaaatgggagggacctaagtgcctacctactcgctaatcgcaggtgcaaacacacaaggagtttggtgggcttaaggtcagaggagtgtgtagggagggatgtatgtggaaggtaagattcagggcaagctaaaaatccgatactgcaacgttttccaaaatcccagaaggcaaactgtgcatgttctaccctgaaccacccaagcaacactttctaccttgccttatttttaattggattcactgtccaaaatgcagaggtttgctttgcttttttttcagaagttccaaacagcaactttgagagcagtggggtgcttggcagctgttctgtgttttccaggaatccaactgagcattgaaatctctcatttgccgacttatttttataggaagccaattaaaaaaaaaaaaagttttcttatagtattggaactacttctaattttaaaatgacttttttgatgtattttttgttaaatactatgtagtgtaatgtataattgctcttgtttattgcttttacaatcatatttattaaacagataatgtctctaaagtctttgcctcaggtatttttttttttaatcctaaacccttggtgttcattctaaatatagaagtgttgcatgtataggatttcataaaggctaattgcataagaaagagtaaacaccacaggcttgaggtttttggctgttttttactaacaaggcagaatgtatgtactacctgaattctacctgcatttcaattaactatacaatgtctgtttattaaattactttgatttaaaaatta

SEQ ID NO: 74 - DNA, 128772 bp, Homo sapiens
agaggcaaacaaggtgggaaaaaaataagtgtcgagctcaacccttaggaccctggccatgtctgcagtcagctcaggcaaggctgttgtccttctgtaatggactgtccctggtgcgctctcagacgcagcaggacacgatgcggcaggacccagtgttccacgcaaggacctgcagtcctggttcaaatccagacactgccataggaagcttagctctacgtgaggagattagcgactgttccatgcgggaaacaaaccaaccaagccaaagcctgcaagtctctcccaagctgccagcaagtgagccaggtggacctccagggcgtaggatgcagctgggaaaacaaccgacccgctgcttttccgggtccctgcgcttgctgcgtctcctctggctgcagagactcagcccggctcagagctggggaactcggttattcttttgaagcgtcaagggcacttgtcagctttgaaataatacatttgctggcttgaatttcaaatagcttaacgccccctgtgctacctagctgtgatctgaaggactgactgttcaggccttcaagtaccaaataaatgaaccatgagactccagcaatggagaagaaatgtccttattcaaaccaaactttgcaaatggaaagaattgttaagttttgctctgttgtggcagggaagcagctgggaagtagaccaccccttgcatgctctgggggccagagctggctgtacttgcacctttaggcagtaggaaatgcaccccagctctgtggtgtgagccacttctccgtgatgaaggtcatcttcatattctgaggtcaaagggcaaatggcagagtgggcatccgtggggagactgctggacacagggcactgcccacagagaggtgatgggtgataggagtggggcaggacagcatagcaaggtgcagcatctggagtcagaacagacaggttcaaatcccagctctgctgcttacctactaagctgtttgatttgggcaagtgatttaatcctgctaagcctcaattttcttctctgcaaaatgggagtaatattcaacccaggttataggtattaagtgagattgtatatgaaatacactcagtcaggcacatattaagtgctcatttagtaacagcgttggctaggccaggtgcagtggtcacgcctgtaatcccagcactttgggaggctgaggctggcagatcacctgaggtcaggagttcaaggccagcctggccaacatggtgaaacccagtctctactaaaaatacaaaaattaggccaggtgcggtggctcatgcctgtaatcccagcattctgggaggccgaggcgagtggatcacctgaggtcaggagttcgagaccagcctgaccaatatggtgaaaccccgtctctaccaaaattacaaaaattagccgagtgtggcggtatgcgcctgtagtcccagctacttgggaggctgaggcaggagaattgcttgaacccgggaaaaggtggaggttgcagtgagctgagattgtgccactgcactccagcctgggtgacagagtgagactctgtctcaaaaaaaaaaaaaaaaaagcaaaaattatctgggcatggtggtgggcacctgtattcccagctactctggaggctgacgcaggagaattacctgaacccaggaggtgaaggttgcagtgagccaagatcgcaccactgcactctagcctgggcaacagaatgagactctgtctcaaaaataaataaatgaataaggtaatagtgtaggctatactggtaattatgagtaatactaaataggctacacttagtgtaggataataatataataatggtggtggtaatgatgatgatgatttctgaccctctaggctgctatgttaggcttagctaggaaactgaagctgggctggggttggggttgggacagaggctagtggagcagtgggcagcaatgaactgaggccacgaagcacagaatgtcatcatcctggtgacgaactccatcagtgcctattctgtcagcagctccattccagcaaccttcaacataattgtgtatgtgtgtgtctaggtaggtgcaaacataatttttgatgactatgtatcattctattatatagatgaactatgttttactttaagcaaactataatttttaacagctgcagaatattttaatgactggatggacttttttttttttttgagacagggtcactcactgtgttgcccaatctggcatgcagtggcatgatcacaacacactgcagcctcgacctcccacactcaagtgatcctcccatctcagtttcccaagcagctgggactacaggtgcacagcaccacgtctagctgatttttgtattttttgtaaaggaagggtttcaccaagtcacccaggctggcatattttgacaggaaagcaaagtgttgtattagatttggaacaggctgtgaagctagagatctttaattatttagtcaacatttttgaccaccaactttaagccgggctctgtgttacatgctggccatacgaaggtgaatatagagataagcctggcttcacagagcttatggtctagaaggagagacaggcatataactagacctgagtttaacccaagctatgtgatcttaaacaagtcacttatcggtcagggtggtggctcacacctgtaatcccagcactttgggaggccgaggccggcggatcacttgaggtcagaagttcaagaccagcttggcctacatagtgaaaacctgtctctactaaaaatacaaaaaaattatccgggcatggtggtgggcgcctgtaatctcagctactcaggaggctgaggcaggagaatcacttgaacccaggaggcagaggttacggtgagccgagatggcaccactgcactccagcctgggcaacaaaagcgagactctgtctcaaaaaaaaaaaaaagaaaaaagaaagtcacttatcttccccaagccatagtttcctcatatgtagaagctcagcatagagtgttacaagcacagtataatgtaaacccagcaaacattacttctccttttttttttttactcttgagacggagtttcactcttattgctcaggctggagtgcaatggtgtgatcttggctcaccgcaacctccccctcttgggttcaagcgattctcttgcctcagcctcctgagtagctgggattacaggtatgtgccaccacgcccggctaattttgtatttttagtagagatgggtttcaccatgttggccaggctggtctcgaacacctgacctcaggtgatctgcccaccttggcctctcaaagtgctgggattacaggcgtgagccactgtgcccagccttcttctttaaaaaaaaaaaaattttgagacagagtcttgctatgttgcctaggctggtcttgaactcctagactcaagtggtcctcccaccttggcctcctctgtagctgggactacaggtgtgagccaccacacccagcctggttctaccttctaatgattggtagttttaaatattgcttttctttcttttttttttttttttttttgagatagagtctcgctctgtcacccaggctggagtgcagtgatgcgatctcggctcactgcaacctccgcctcctgggatcaagcaattgtcctgcttcagtctcccgcgtagctgggactacaggtgcgtgccaccacacgtggctaatttttgcatttttaatagagacgaggtttcaccatgttggccaggctggtcttgaactcctgacctcaggtgatccatccacctcggcctcccaaagtagtgggattacaggcatgagccactgtgtctggcctgcttttcttattcttttgtttttatagatattatagccatggatatcctcctaaatgctatctttttctttgggggattgggttatttattcatcacggggtgatctgggttatccagttaaataagtttttcgtttggttgttttattttgtttatttgtttgtttttttttttgagacagagtcttgctctgttgcccaggctggagtgcagtggcatgatctcgcctcactgcaacctccacctcccagattcaagtgattctcctgcctcagcctcccaagtatctgggattacaggtgcacgccaccacacctggctaatttttgtatttttagtagagatggggtttcgtcatgttggcttggctggtctcaaactcctggcctcaagtgatccacctgccttggcctcccaaagtgctgggattccaggtataagccactatgccagcctgttttttgagagaggttctctgtcactcaggctggagtgcagtgacacagccacggctcactgcagtcttgactttctaggctcgagtgatcctcccaccacagtctcccaattatctggcactacaggtgtgcaccaccatacccagctaatttttattttattttattttatttatttttattttttttgaggcagggtctcactctgtcacccaggcaggagtgcagtggcatgatcacagctcactgcagcctcaacctcctgaactcaagtgattctcccacctcagcctgctgagtagctaggactacaggcatgcaccaccacacctaatttttgtattttttgtagagatggggttttgccatgttacccggactggtctcaaactcctgggctcaagtgatccacctgccttggcctcccaaagtgttgggattgcaggcgtgagccactacatccagccctaatattttattagtatttgtagagacggatcgttatgttgctgggactggtctcgatgtcctggactcaagcaatcctcctgcctcaaaccccctaaatgctgggattacaggcttaagccaccacatctggcctccagctgcataagtttttttaaccctctgctattcttcagggttcactaggcagagtggtggacaaaagccactgtattggtggcaggaggtctgagcaaacaagtcacccaaactctctggaccttgatctctcatctgcatctttaccgttcccccaacataccaaggaaattcctgcctcaatgccttcggccttgctgttccctttgccagcaaagagaactgtgcgtccagatattatccccacggccttctggtctttactcaaatgtcatcttatcagagagactgttcctcctccctgtccccgtgtccttccccagcccctcattctgctttactcctctttatagctcttataatctcctgattagacatacttgcccgggtatttgtttattgtctgccttcccaaatagaatgtaatcttcatgagagccaagatgctgtctgtcctgggcctggaagcgtgcccagcacacacagtaggttctcgctgaaaatgtgcagcctgagtggacgaagagatcaaatgagactctgctgacaatacttagcatatttgttagtgtctgcagacagcacaaagctgtcctaatgagagggagagtaatagtaattggaaactctagacagtgtcttatgtgggtggtagagctctggaagatcttggccagggtggatgtgggtgggggttggggtgggggaggaagtatttcctctctgccaagctgcagcaagaggctaatggcctccacagggatccaatccaattaagggcctggcttcaagtcaactcgggttcccttcctggctggagcagcttccaagtgacaaaatgaaacctgtaatgtccccaggatgagatagtctccaggcgagcagggcagaaaggggctgatagtcaggtttctgctcccaggggaacagatctgcattgggcccgaatagttttaatacagagagagagagaaagagagagagagtgtgtgtgtgtgtgtgcacgcgcgcgtgtgcatgtgtgcgcacgtgtggtgggaagagccaggaacagcagctggattcagtccctcatggggaagcaacggaaagggttcaaatgccaaatgaggagtcctgggttctaatcttagttctgtttccacccaactatgggacagggaagaaaaccaagtgagccagggaacacaagccctgcctgaggctccagttccctacacacagaactggaaactgaacatgcattcaggcttaattgcactcagaagtctatttcaactgtatttatttatttatttatttatgagagggagtttcactctgttgtccaggctggagtgcactggtgtaatcttggctcactgcaacctccgcctccctgggttcaagcaattctcctgcctcagcctcccgagtagctgggattacatgtgcccacaagcacgcccacctaatttttgtatttttagtagagatggggtttcaccatattggccaggttggtctcaaactcttgacctcaagtgatccgcctgcctcggcccccccaaagtgttaggattacaggcgtcagccaccatgcctggccctgttttcccctttttttttttttttttggacagagtttcgctcttgttgcccaggccggagtacaatggtgcaatctcagcttactgcaacctccgcctcccgggttcaagtgaccctcctgcttcagcctcactagtagctgggattacaggcgcccgccaccacacttagctgactttttgtatttttagtagagatggggtctcactacgttggccaggctggtttcgaactcctgacctcaggcgatccacctgcctcagcctcccaaagtgctggaattacaggcccggctcctgttttcccttgtttaaaccaatttgttgatagataacacatacccctaggacaaaagttacaaaatgggaaccaaaacagtatataagtcagcagtgactcagttccccagttctcctccctggaagtaaacacttaaaaattttttgtgtattcttccagaaataaatgcatataatagtaaaataataacatttattgaacatctactctatgccaagcactgttatgtgctttacatttattaactcatttactttccataacaacaccatgaagtataattagcatcactttacatgtggaaatgaagtgtagagagcataacttgctcaaacatcacacagaaaggaagtgaaatattttactcaagtaaagacgtatatggcagggttccttgcctccaagaatctcacagtataccaaggaagaggacattgatatgactagtgatacaggttgagtatcccttatctatctttttttcttaaatttttttttttaatttaacaaagactggggtctcgctgtgttccccaggctggtctcaaactcctgggctcgagcaatcatcctgccttggcgtcccaaagtgctaggattataagggcgagccaccctgcctggccctatttttatttatttattttttttgagacagggtgtcactcaatcacccagaactggagtgcagtggtgtgatcacggctcactgcagccttgacctcctgggctcaagtgatcctcccacctcagtctcctgaatagctggaaccataggtgtgcaccaccatgcctggctaattttgggggttttttagagagatgaggtcccactatgttgcccagttgttgcccactatgttggtctcaaactcaagaccaagccagggcaaaatagtaggacctcatctccacaaaaaaaggctcaagtgatccttctgccacagccttccaaagtgctgggattataggtgtgagtcaccataaccaggcaagtatcctttatttaaatgcttgggacctccataaatatatatatatatatacccactgtgtccccacaaaaattaaaacttaaaaattaaaaaaataaatgcttgggaccaaaagtgtttcagatatcaaattttggattattttgaattttggagtatttgagtatacataatgagatatcttagggatgggacccaagtctaaacacgaaatttattaatgtttcatatataccttattcacatagcctgaaggtaattttatacatttcaaataattttgtacatgaaacaaagtttgtattcagtaccttttttttttttttgagacggagtctcactctgttgcccaggctggagtgcagtggcgccatctcggctcactgcaagcttcgcctcccaggttcacgccgttctcctgcctcagcctcctgagtagctgggactacaggcacccgccaccacacccggctacttttttgtattttagtagagacagggttccaccgtgttagccaggatggtctcgatctcctgacctcgtgatccgcccgccttggcctcccaaagtgcttgtattcagcacttttttgtggaattttccacttgtagtgtcatgttggcactcaaaaagtttcagattgtgaagcattttggatttggggtttttggagtagggatgctcagcctgtaatagctagcacttattaaatgctgattattaaatgttttaaatggattacctcatataatcctcacaatgagttcctgaagtaggttctgttatacagtagtatcctctatattcacagttttgatttctgcagtttcagttacccacaatccaaagatattaaatggaaaattctagaaataaaccatttattagctttttaaaaattaattaattaattaatttttatttatttatttattttgagacagagtcttgctctgtcacccacattggagtgcagtggcacaatctcagctcgctgcaacctccacctcccaggttcaagcaattcctgcctcagcctcctgagtagctgggattataggcgtacatcaccacacttgactgattttttgtatttttttttttttttttagtaatgatgggtttcaccatgttggccaggctggtcttaaattcctgacctcaagtgattcgcgcatctcggcctcccaaagttctgggattacaggcgtgagccaccgcacccggccccatttattagatttaagtggcatgtcagggtcttcattctgaaggcttctgtgtatatatattaaataaatttgtatgccttttctcctattaaccaatctgcctcatgtcagtaacttttcagtgaacttttaggggaccgggagcctacggcctccacagtatggtgcagtgatcagggtgatcaaagctactgttctgttctggaagccgtagtgaagagaacccaggaaactcacctgcctgcaaaggggacacaattggaaacaccagttattttatcaaggttttgaccagaatgggatattttaaaatatgagcaaactgctttgaggaattgaaatagactttatagaactgataaacgtcccttagaaagactggccttgtgccttgtttatgcaggtcctttagagggttcctgacctgtggccctgcaagctaaaacttacatcttgtgatatagaaaagaagactaagacgtgaccacacttgaacaggtctttttatgaggataatgactgtctccaaggatcatttaaattctaaagaaaactatttacaagttaatccctgctcccccatccagtcattctccttcccaaccccttattgcccctaaacagaattcttctcccccttcacatagcctgttttaccaggatgcaagctcccattctttctgtaacctcaagatgatatataagtttccgtaattcatgggggaggtgggtcttcattctgaaggctcctgtgtatgtatgtgaaatcaatttgtatgacttttctcctattaaaaaaataaataaaaaataagttgcatgccattctggggagcatgaggaaatcttttttttttttgagacagagtttcgctgttgtcacccaggctggagtacactggcacgatctcggctcactgcaacctctgcctcctgggttcaagcgattctcctgcctcagcctcccgagcagctggaattacaggtgcctgccaccaagcccagctactttttgtatttttagtagaaatggggtttcaccatgttggccagtctggtctcgagctcctggcctcaagtgatccacctgcctcggcctccctaagtgctgggattacaggcttgagccaccgtgcctggccctcagtttccttatttgtaaaatggggacaatgaaaattatgccttgcaatgctggggatggtggctcatgcctgtaatcccagcactttgggaggccgaggcgggtggatcacttaattaaggtcaggagtttgagaccagtctggccaacatggcaaaaccccgtctctactaaaagtacaaaaattagccaggtgtggtggcacatgcctgtaatcccagctacttgagaggctgggacatgagaatcacttgaacctgggaggtggaggttgcagtgagatgagattgtgccactacacttcaacctgggcgacagagtgagactccgtctcaaaaaaaataaaaataaatataaataaataaataaataaatcaagccttgcaagaccatgatgaataaatatgattggatatgaaagcacccagctaggtgtctggcatgcagtgtgagagctcagtgaccggtcaagaatatggacagatgggaataataccaacagctagtgtctacagagcacttacaatccaagctcttaacatagactaatttatcaatgatcctattaaatattaataggtactaattttagatccatgtttacagacgagaaaatggtactaatttagatccatttttactgatgagaaaatgaagcacagagaggttaagtaagtatcctgagttagtaaataacagaagcaggattggaacccaggcagtctggccccagagtccatgtgcatagcagctcattctgctgctgaaattgcagaactttgggctgagacagtcagcgagcagcaccacagagttagaagtgggaggaggaaagtgtcatcaagggaggcttactggaggaaaacctgaccccctgtgtaggggcagtcataaacacaaaccacctggcttcccagactggaagagcgtgacaatccaaatgtcatgtcaggggtacatgaaaccataggataaacatggtacagtcactcactccataagctatttttttttttttttgagacagagtttcgctcttgttgtccaggctggagtgcaatggcgcaatctcggcttactgcaacctctgcctcccaggttcaagcgattctcctgcctcagcctcccaagtagctgggattgcaggcatgcaccaccatgcctggctaattttttgtatttttagtggagacggggtttctccatgttggtcaggctggtctcgaactcccgacctcaggtgatccatccgccttggcctcccaaaatcctgggattataggcgtgagccactgcgcccggcccactccataaatttttattgtgtaccatgagctgtcctctgagccaggaatatagccataaacaaaaccaaacaaaaaatccctgcccttatggcatttatgttctagtgggagaagacagacaataagcagataaataggtagatatgtatcagagggttgtaagtgttatgaagagagataaagtggagggtggagtgaaagatagcaacttgcaacgttgcatagggtggtatttggggagagcgctctgagaagatgacatttgagcaaagagccaaaggaagtaagggagtgggagttgcagaaattctgggggaagaatgttccagagagggggaagagcaaatgcaaaggccctgaggccacagtgtgcttcgcatatccaaggactagaaaggaggccagtgaagctggggtggagagcacaggggagaatggtaggagatgaggtcagaggggtgtgtgtgggaggagacaacatgtctccacccatcttaaagatttctgtgtgctataaaaacaagcctgagtaaagaatgtaaagcaggcatgcaattcaaaattcgaagaggagacttgactgctatgtggttagggggcctcccctgcataaacatcctctttccctttcacccactcccaggactgactgcccatccatgggagccatatgagggcggaacttgggaaactgtaggtgtgactgagactacgtctaagcacaggctctgggtctgagcctcttcctggggggcttcctgttgggtaggaggagcccaggagatcatcaccacctcagggctctgtggagaatgcccctggcttcctcctagctaagatctctgtttagtcaatgaagcctaaagggccctggtctgttcctccttccataccctggtgctgtgaggccagttggagcctgtgaagggcaagtcaccaccgggaatatttgctgcctctaactcaaattctttttttttgagatggatttcgctctgtcgcccaggctggagtacagtggcgtgatctcggctcacagccacctttgcctccccggttcaagcgattctcctgcctcagcctcccgagtagctaggattacaggcatgtgccaccacacccggctaatttttgtatttttagtaaagatggggtttcgccatgctggccaggctggtctcgaactcctgacctcaggtgatccactcgcctcggtctcccaacgtgttgggattacaggcatgagccactgtgcccggcctcaatttgatcaattctcaggtacattgagtttctgctgaattgttttttggcttagatctgctttgaactgattcaccatttggttcctttttggtagggcagagagggtggattctggaaggaaactttgcttcagttcatgattctatgaaaaattaacacggttcagtccagagtctagtcagtcacttcaggattttcatggttcaagcccccatctaaggggagcctcctggaatttatttatttattttcaacgaactagccgggcatagagagagtagaatatgatgccacattctagcctgcaggggtggtagggacagaataagtctcaatgcagttaacagccatactgacggagcagcacatatggtaaggcaagaatcagtaattagccccacccacttctagataatgaaactgaggcttaggggttttaaggacactgccttgtcagatttgaacttaaacagtcagactacagagcacgtgttcctgaccactgggatacactggctctttcacagagcctctgtgagaaaatttgagcaacttactttgggctggcagaggaagaaattgcaagtttcactgtattttcatgcctacgtacaatttgttcaaacattctggtatgtgctaggcaccgaggatatggagacaaacctcccatgtctgggcctcctggaactcactatttatcccaacctgggaagttgggaggagtagctgtgagtcaagtattatggaaagtcagaaaagggcacaagtaattgtttccagaggaggtgaaacttgccccaggcactcaacagcagcaaactaggaccaggtgcctacaatctcaaggcaagcacagctcttgccctcgggggcttaaatcccagggcagtttaactggtttgcggaccacctacttcagaattgtcctggtgcttgctaagatgtggatttctctttttcccagaggatctgggaaacacaaaaagcggggctgcgtgtagcacctaggtgattctgatgcacactcaaatttgacaggtgagccggggggaagaaatgggtgtgggcagtggggaacaagatggacaacgacttggaagtccttagtggcctgcaggcactgagattgcagttcaagatcttgagctttgggagttgttactctccaagggctagctcagagcctgaaacacagtaaggtttcataaatatttgtgaatatgcgcccggcgcggtggctcacgcctgtaatcccagcactttgggaggccgaggcgggcggatcacgaggtcaggagatcgagaccatcctgactaacacggtgaaaccccgtctctactaaaaatacaaaaattagccgggcgcggtggcgggtgcctgtagtcccagctacttgggaggctgaggcaggagaatggcgtgaacccggggcagagtttgcagtgagccgagatcgcgccactgcactccagcctaggcgatagagccagactccgtctcaaaaaaaaaaaaaaaaaaaatatatatatatatatatatatttgtgaatatgctggctgccaagatcgaaacgatcaggagcgtcaaagggaaaaacgaagtcagaggcagaagaaaaaggtgttccccaggcgatgaaaactttccagtaagttgtcttggaaaaggcaactccgcgtaatagagggacttggggaggtagccgctgcgggaaagggcgatgagtcctggggtgctgcagcgggggagtgggtaggaggcgcctcctagcttccccagggcggccgaggcatgaggtcacctggcacagcaacagcagcagctgcggaggacgcgcaggcgctgcggcgggaggcagtgtcaggctcgggcccctggggaattcctcccctcctttcccccccgcaccagtcccctagagaggcgtacccgggtcccgcccgccagagcctgagctttgtaccgcccaccaaggccacgccccctaccagctgtggggcgccgcagaggtcctttcttcggctccggagcggtccctccgccttccccgctcgaggccacgcccccgtgctcctgccgccttattttccccggagagtcccgaggcgccgcgccttggccctgcctacagcccgaggccccgcccccggcgcccctcccagccgtttgaagcggctcgggctgcggctggctcagagtggcgcggggggcgtggggcggtgctgaggagctgaagccgtggccagctcgacgccggacagtccagcgagcagcacggcgggaaccggcagccggagcagtcccggagcagaagcagcagcagcagcagcagccctcgccgttcgcggagcgcagccgagccggccatggcgttgtcgatgccgctgaatgggctgaaggaggaggacaaagagcccctcatcgagctcttcgtcaaggtgagcgctcgcctcgcggtcccgcccggcagatcccccggctccctcccggctgcggggagcggcgtcccggggctctcctgaggcgcccccgctcggcgccagcacccgtcccgctgcgggcacccgcgcccccggcccattgtctgggggccgcccgcgccttcccgcctccgagggcccgtcgaggggtccgggttggggacccgggcggcggccaccgtctccagcgcgtaggcatcggcggacgccagaccagcgtcccgcgcccgggtgggtcgggaagagcccacgggcgggacttgcctgccccggggccccagcgccgggcgcgcgcgggtcctgtcaccaccccccgcccgggcgccggggcccggccccacccgctccccagcgctccggtccgccgcccggagcccgaactgcggcccgccgcccgatgagctttcaaacgaacttctttgaacgcgtttttgaaaaagcatttgctccccactggtctgaaacggaaactttaattttcgatgcaatcttaaacaaatttaccaaagagcaggtgctcttggaccttcggaaaagaccgagattcccaacttgtgtttttctgtcttgggcatttactggctttctcgtttctcaagcgcggagtgttctgtatgatgcaacattttggcttctccccccggcgttgctgcttcgggaaggattgtgtgtgcccttttgttttgaaagaaattgagggagagaattcttaacttgcttgggctttaaagggttggttttcccttgtgtcttcagctttcatgtgtggaatttatttgcttacacatactacccctcttcctttgcttttctctttaatactttttattttagcaaaggagagagtcgaagttataaacatctggatccagctccttccctcaaaacttaaaaaaaacactttgagcttcttccagccacttaaaaagccaggctcattcagagctaggcaacataccggaaagtaaatggtcatctagaactattgggttcttttttttccccgagtttttactttaaagaaaggacatttcaggatgtgtttaagagatagagaagggctgggcgcggtggctcatgcctgtaatcgcagcactttcggaggccgaggtgggaggattacttgagtccagcctgaacaagatggcgaaaccctgtctctacaaaaaaattcaaaaattagctgggagcgatgttacgcgcctgtactactctggaggctgcggtgggagaactgcttgagcccgggaggtcgaggctgcagtgagccacgtcgcaccactgcattccagcctgggcgacagagcaagaccctgtctcaaacaaaagagatggagagaagaaataatctgcatttacctctgcagtcttcagtaatgactggaacagtgtttgccttaggattttctttcaattgtcaattttcgattttttttttttttttttttttggtccagggaactgaaacagcagacaggtatagaacccccaaaatatcaaagcgtttcggttactttgagtggcagatatagtactttgagatgcgtagaatgtaggaaggaacctgaaatacaagaaaggaaggaggccgggcgcggtggctcacgcctgtaatcccagcactttgggaggctgaggtgggcagatcacgaggtcaggagatcgagaccatcctggccaacatggtgaaaccccatctctactaaaaatacaaaaattagctgggcgtggtggcgcgtgcctgtagtcccagctactcgggaggctgaggcaggagaattgcttgaacccgggaggcagaggttgtggtgtgcggagattgcgccactgtactccagcctgggcaacagagtaagactccatctcaaaaaaaaaaaaaaaaaagaaagaaaggaagggtggtgggtggaaaacagcatggagaagggaaacaagtgggccagagatgagttaaaaaaaatttttactgagtgaggaataggaaggaatttccataaactcaaaaaaagtgcatccatgaataatctgtaaaacatgatacttaacggtgaaactttagaacagtattaaacttagaataagctactatcgggccgggtgaggtgactcacacctgtagcattttgggatgccgagatggggagatcacttgaggccaggagttcgagaccagcctggccaacatggtgaaaccctgtctctactaaaaatagaaaaattagccaggcatggtggtgggcccagctattcgggaggctgaggcatgagaatcgcttgaaccggggaggcaaaggttggagtgagccaagatcaagtcactgcactccagcctgggcgacagagtgagacttcgtctcaaaaaaaaaaaaaaaaagataaagctattatcagttatggctctattcagtattctattattctattggaggagctaatcaaagaagacaagaaaaattaagtatctgaattaggaagagatcagtgattaatgccctgcttactattaatttcatctttcagttagaatagcagaggggcgtgtgcagttttccaaacttgagtcacttgcatcccctttctgtttttcatatttgtgttgagaaccactgaaaatcatccttcctaccactagttgtaagcctttctcattgggcttggtggcagagaatcagggttcaagtcacagttctttactccttggttgggtgaccctaggcagtttgttttcactctttaagccttgtttgtctcatttgtgaaataagaaatgttttctgctacccagtgattcaacataggcaaactttgcactgatacagatcaggttttttgtttttttttttttttttttttttaatgagatggtgtctcgctctgtcaccctggctgctggagtgcagtggcgcgatctcggctcactgcaccctctgcctcccaggttgaagtgattcttctgcctttgccttccgaggagcgcatgcaccactacgcctggctgatttttgtattttagaagagactgggttttaccatgttggccaggctggtctcaaactcctgaccttaagtgatctgcctgccttggcctcccaaagtgctgggattacaggcttgagcctctgtgcttggcccctagaccagtttgtttgaaaggggaaaaaaggacaggtaaaatgtggtaaagggcattcttgatctcttctcaaaacctacgtgtgggaaatgcaaatgggggaaatacccttgtaaatatagttattttgaaagcagtggaccaggtgtggtggcacactcctgtaatcccagccttttgggaggcggaggggggtggatcacttgatgttgagaccagcctgggcaacatggcgaaaccgcatttctactaaaaatacaaaaattagccacgcatagtggtgcatggctgtaatcccagctactcgggagactgaggcaggagaattgcttgaacctgggaggcggtggttgcagtgagccgagatagtgccactgcaccccagcctgggtgacagagcaagactccatctcaaaaaataaaaattaaaaaaaaaaaaaagaaagtagagagggtgcagaggctgtggttgtccagagtggtatgttgaacagtgttaacctgccaagaggtatctgagtttgtaaaagaaaactatttacagttgaagcacatagcatgtatggaaattagaaatttggtggtggcgctaggggaaaggccaagagatgtaatggggctttgagcctacctgtctagctagcactgagcttcacatttaagagagagagatgagcaccttctcaaatagtatgactgaactcacagctgcatttccttccttgtgagtagtttttggagttgtctgcctgtgagcccattaactccctgtcatctatataacagcaggatggtttttttggtttgtttttgttttgttttaccctcaacatctggaggatagataggatgccctctcaaaagtaaaaaaggcagctgggctgtggtggctcacgcctgtaatcctagcactgtaggaggccaaggaggatgaatcttttgagcgcaggagttctagaccagcctgggcaacatggcgagaccctgtctctacaaaaactattaaaaaaattgccaggcacagtggctcacgcctgtaatcccagtactttgggaggctgaggcaggcggatctcttgagcctaggagttcgagaccagcctgggcaacgtagcaaaaccccatctctacaaaaaatataaaaaattagctgggtgtggtgatacatgcctgtggtcccagctgaggtgggaggattcctttagcctgggaggcagaggttggctgtgagccgtgatcgtgccactgcactccagcttgggtgagaccctatctctaaataaataagtaagtaactaagctgggcctggtggcccacgcctgcagccctagccctagaggctgcgggtgggaggattgtttgagcccaggagttcgaggctgcagtgagcttatgatcatgtacctgcactccaatctgggtgacagaacaagaccctgtctcgggaggaaaacaacaaaggcttataatggcaatcatcctcaacagtggagatgctctctaccccactcaggagcctggtaggtgtatatatttccagctgggaaccaccaacagatacggtatatttgagaccttttagcaagggcataaggtcccttgtaatctgggtttctttctttctttctttctttctttttttttttttttttaagacggagtttcgctcttgttacccctcagcctcccgagtggctgggactacaggtgtgcaccaccacacctggctaattttgtatttttagtagagacaaggtttctccatgttggtcaggcttgtctcgaactcctgacctcaggtgatcagcctgccttggcctccaaaagtgctgggattacaggcgtgagccaccgagcctggcctactgcctgagtttctaatccaatatgtccagttactaattgtgtatcccaggatacatcacttaaacctgtctgtgccacatctgcacagttgggatattagtagaacagtcctatgggataaattaatatatgtagtatgcaacaatcttagaacaatgtctagtacacagtaagcaaataaatgctagttgtgtataattttgtatgaatatatatttataggcagatctcccctactagatagacagtaaattccttgaggatagggtgtgcatatggttcagagtgcctgcaacttaagaggatgccaaatgtttgaaatgagattgtgcccttctttcagagaattctgttgttgagcattttgttgtcaatgtatgtctctaccatgctttggaattagaaaccacttactgagatcccgatggttggagcatcaaagcatggttcttcatcctgatttctctagcctccagtctccaaacccagtgtaattttatgtactcacctcttttttttctccatttaatacttccagtcttttttttttttttttttttgagatggagtcttgcactgttacccgggctggagtgcagtggcacgatcttggctcactgcaacctctgtctcccgagttcaagcgattctcctgccgcagactcccgagtagctggggttacaggcacccgccaccatggccagctaattttttgtatttttagtagagatgaggagctaatttgtatttgtagtagagacggggtttcactatgttggccaggctggtcttgaactcctgacctagtgatccacccgctcggcctcccaaagtgctgggattacaggcgtgagccaccgtgccagtcttttatatatttactagtgtttcttcttggctatgtccagaatttggggaaccaagatttttgtttgggtaaaactaaatattaactcttgaaccacaaatgagagtaatagagatggggtttctccatccagcttggccaacatggcgaaaccccgtctctactaaaaatacaaaaattagccggtcgtggtggcgggcgcctgtaatcccggctactcgggagtctgaggcaggagaatcacttgaacccgggaagcggagattgcagtgagccgagattgtgccattgcactccagcctgagggacaagagcaagactctgtctcaaaaacaatcaaatcaaaaaacagaaagtaatccctttgcggagttcagttttatgggctggaatttaaacttgttgttgtgccactgtgaactgggatgatcactgtcagcaagtagtcaccaagctgctgggattggggtggtgtttgtaaaaagttaatctggtgcagggtggcataacacataagagtctgtttcttttgagatatttggcagaggttcctaatgtgcttggactctggagccacactgcttgacttgaatctggcttctagtatgtcaggcaagtttttaagctctcagtgcttcagtttcctaacttctaatatcaggataataataatagcaattttatatggttactgaggggattaaaactgttaatctgtgcatattagttagggtagtttaagttgctgtaataagttatccccccacaaacagtggttcaaatatgatggaagtttatttctcacccctcagtccaggagaatgtcttagatgttagggtggctttcctcctcagagtcattaagggacccgggctctttctagcttatttgtccactaactcccagagcattgtcctcttctgaattgtcaaagttggtgggtgacaagtactgtctgttgccagtggggggtggaaaatatggaggaagcacatcttaagggccccagctcagaagttctacctgttacttccggtcacattctattggagagaacttaatcacatagcttcatctgcaagagaggctggcaagtgtggtctaaccgtataccatcctatgtaaagctttaggaagagtgcttgacacatagtaaacacctgcttttgtcatcgataatagtttattattattatttttttttgagacggagtctcgctctgtcgccagactggaatgcagtggtgcaatcttggctcactgcaacctctgcttcccgggttcaagcgattcttctgcctcagcctctggagtagctgggactacaggcgcgtgccaccatgctcagctaatttttgtatttttagtagagatggggtttcaccgtgttggtcaggatggtctcgatctcctgaccccatgatctgcccgccttggcctcccgaagtgctgggattacaggcgtgagccaccgcgcccagcctaatagtatattatttttaaatgtgggctctattagtaggatcagggagttctgtaaatccttgaaattacagtaaaaaattctaatgtgaggctttttttctggaaattcctaaaccaaggctaagaaccactgttctaaaagaagtaaatagtggaattcttagagtcaagaatactttatataagcaaggtataaaagaagggcttgggctagatgatcacaaaggtctcttctagttattattaactatgacttaaagaatgtaccggcatgaactaagtgctaatactgagttaagtactatggaagatataagaaattattaaacagttaatttctttaggtttacaaattttattggaaagaaaacaatacaagatggtccatgcttaaagagtcaagtggggctcacattaagtagggctaggagacatggggaaagatggaaggaggcttaaacttgaccttgaaaaaggaggtgaataggtgggttcggaatagccaagaatgggaatgtgagttttgacattatgtggaaactccttatgcaggaaacaattggtagattgatacctaagaaggaaccaggagtgattcagatctatagtgccagggagacaagttatttaaaagttgaggatgagacttttaaaacctaacttgggtttttgttaatgtatacattttcctaacttttttcattctccccacactttcctgtgtttttggattgctgtctgtttaataacttttcagtggcacttgggaaggtgcaaatggattgtacagatggactgttttgacagtttaaagtgggaattctttatattgtttcaaggacaggcttcaaacttccccccgtctttgttttttctaacagaaaaaaatgaaataaattttctataggaaatgatgctgaaaactgttctggtaattaacaaaagctaactcaatattcagacaatattaccttgaatctaattgatttgccattcatttgaggtttccggggggaaaattcaggagacagaaatgaatgtaaagtatgaagttaatgaaaacctattattttaactttttgcctgagctgttcctgaagacctaataatgctacttttggcaaaggccaaatttgatgattttggtttaatgtaaaaacctgtgagaaaggagcctagaatggggaagaggcaggaggctttgagcctaggagactgagcacacgaaaagcttaacagagtatgaataatgataggaaagaggcaattgggagaagaacctggctgtcaggaaatgtcacagttggtttgggaagatgcctgcagaggtgcctagaagccagtaagtaaggatggtgagccatccttttccgcttcctgtttcgttagagctgtggagcctccgtgttctgatgtcccctgagtagggaattgtgagtccataaaaggaaaatgtgttaggcaggatgggaagtgtgattaaggcatgagttaagattttggtcaagtagaggagtaagctaggatgggtttgcctgttttagacgcttgcatagagaatggaaagggactttctgaaggaaaatgacattaggtcatggttacctattgtccaaggatgatttaagacatgtaaatgtaatttagggcatcagctagtgaattttctcatggcttttaattatattgtctatttcgagacttgcctcttatctctcagtggtcagttccagatattggtataagaaataagaaataacaatgataggcccactgccatggctcacacctgtaatcccagcactttgggagaccgaggtgggtggatcgcctgaggtcaggagttcaaggccagcctggccaacatggtgaatccctgtctctactaaaaatacaaaaattagctgggcgtggtggtgggcgcctgtaatcccagctactcgggaggctgaggcaggagaattgctttaacctgggaggcggaggttgcagtgagctgagattgtgttactacactccagcctggacgacagagtaagactccgtctcaaaaaaaaaaaaaaaattataggctgggcaaaatagtgagtcctcatctctataaaaactaaatttttgtatttttagtagagatggggtttcaccatgttggtcaggcttgtcttgaactcctgacctcatgatctgcccgcctcggcctcccaaagtactgggattacaggcgtgagctaccactcctggccccatctctactaaaaatacaaaaattagctaggcatgatggtgcacgcctgtaatcccagctactcaggaggctgaggcaggagaatctcttgaacccgggaggcggaggttgcagtgagctaagatcacaccactgcactccagcctgggcgacagtgagactctgtctcaaaaaaaaaaaaaaaaaaattagtctggtgtggtggtggtggtgagtgcctctagacctagctttggcaggctgaggccggaggatcacttgagcctagaagttcaaggctgcaatgagctatgattgtgccactgcactctggcctgggtgaccgacggagatcctatctcttaaaaaaaaaaaagaaaagaattatccatataattagccttatatggtttctgttttttcctttatttaaaataaaaccaaaaaacaaaattaaaaaaaaaataataaaaccaggataatatgttagtctaatttatgaaagtgacaacttagtgcagataaataagactgtatttgaaaactgtatcaaatgtagactaggagtatcttaaattttaactttttttttgagatggagttttgctcttgttgcccaggctggagtgcagtggtgcgatctcggctcactgcaacctccgcctcctggtttcaagcgattctcctgcctcaacctcctgagtagctgggactacaggcacgcaccaccatgcccagctaattttttgatttttttttttttttttttttgagacggagtcttgctctgtcgcccaggctggagtgcagtgacgcgatctctgctcactgcaagctccgcctcctgggttcacgccattctcctgcctcagcctcccgagtagctgggactacaggcgcccgccaccacgcctggctgattttttctatttctagtagagacggggtttcaccgtgttagctaggatggtcttgatctcctgacctcgtgatccgcccgcctcggcctcccaaagtgctgggattacaggcgtgagccaccgcgccctgctaacattagtgttttgaaaaagtaactattagaaccagggccaggaacggacctgagttcaacatgcatatattttgtacctttaagcatcctttcataggtttctttgcttttcttgaagttgaaatacaagctgtttcttgaagctgaaataaactaggagtatgacaggttttctttctctttttttggtaacaaaattattacttccaacttacatgtgaataactcattcttatgaaaagatttagttctcattataatatagttgtaaaaatgtcaatcacttgtaataacttaagtattgaattttaccactgtgcagcatagctatttatttgtgtatgtgggagaagaaaaaagagaatctgaacaaatattgaagaatacaaaaccaaacaatcagatgaaagctgaggtaattaagaactttttttttttgaaatggagtctcactctgtcgcctaggctggagtgcagtggcgtgatcttggctcactgcaacctccgcctcccgggttcaagcgattcttctgcctcagcctcctgagtagctgggattacagacacccaccaccatgcctggctagttttttttttaatgtttttttttttgagacggagtttcgctcttgttgccgaggctggagtgcaatggcacgatctctgctcaccgcaacctccgcctcctaggttcaagcaattctcctgcctcagcctcccaagtagctgagattacaggcatgcaccaccacacccagctaattttgtatttttagtagagatggggtttctccatgttggtcaagctagtctgtacctctagacctcaggtgatccgcctgcctcggcctcccaaagttctgggattacagatgtgagccaccacgcctggcctagtttttgtctttttagtagagacggggtttcaccatgttgggtaggctgatcttgaactcttgaccttaggtggtctgcctgccttgacctcgcaaagtgttgggattacaggcatgagccactgcacgtggtcttaagaacttttaaggatttgtgaattctctgcatgttttcttctgctaacaaccagttactttattttggaagtagagaacaggtggtggattacgagagtgaatattcattaaaaactaaagatggaccaggcgtggtggcacatgcctgtaaccccagcactttgggaggctggggcaggaggatcatttgagcccaggagttcgagaccagcctgagcaacatagtgagaccctgtctctacaaaaaaactaaaggtgaaccaaactagattattgtgctacctaggaaaacagaaaaagtggtagctgtgaaaacagactaattaggaaaaaaaagaaggtgattacacttaagaaattaaatttaagccttgaccataacacacacccaagactgaaatgaatttttttctttttcttcccttcttttttcttttctttctttttttttgagacacagtcttcctctgtggcccaggctggagtgcgctggtgcaatcacggctcactgcaaccccaacctcctgggctcaagtgatcctctcacctcagccttccaagtagctgggaccacaggcgcatgccaccatgcttggctgctttttatagagatggggtttctcagtgttgcccaggctggtctcaaactccagggctcaagcaattctcccacctcagcctctcaaagtgctgtgattacaggtgtgagccaccgtgcccagccctatttagcctttctctgttttagtttaaatattggtcctaagtttgaaaaggtaatgtcatttccttctgctttctagtatattcattgtgtgtattatgctctttttaaaaaagtgtcttttttccagttataaaagctatatgtatttactctagacaacttagaaaacaatagaaaagcataaataaaataaaaattacttataaccccttgactagagatagttgttgctattgtatgtcctagtcttttttttttttttcctcgttctttctccctggctggatgcagtggttcaatctcagctcactgcaacctctgcctcctgggtttgagcgattctcctacctcagcctcccaagtagctgggattataggcgcctgccaccacacccagataatttttttttttttgaggcagagtctcactctgtcacccaggctggggtgcactggtgcgatctcggctcactgcaacctccacctcctggttcaagtgattctcttgcctcagcctcccgactggctgggactagagacacgtaccaccatgcctggcttatttttgtatttttagtagagacagggtttcgccgttgttcgccaggctgatctcgaactcctgacctctggtgatctgcccgccttggccttccaaaagttctgggattacaggcatgagccatcatgcccggcccttagtctttttcttaataagtttgcatgaattattatttatttatttttatttttatttttttatttttgcttgcatgaattattgagaatttatatataatattttaatgctgttcatgacagaagacttgaatgagtgaaggatgagcactgatctgatatgtaacatgtattgaattaagtgagttggtttaaagaaaatttatttaggttttataaaagaaactcagattttgcctatatcttctttagaacatttgatctttggtggaagaaagcaggtcatgaaagtatgacatgaaatgtgccatcacctagaatggatattgattaaatggtttgaaggtagatcctcctcttgtgctctttaggagaaatctattctaaaaatgaaagttatttttcagtattaatttcttccttcaatatctatgtaataggtaagatatgtccattttatagttcaagtataataagaaaccagtctttgcctaggaacagttgagcacagtataggggatcataatagaagcaaacatcaattgaatactttccatgcactaagtgctggagaggtaaaggagtaagaatgagccccttgtgttcaaggagctctattataaccaagtagacagtcagatggtgagtaaatgagccatggttgttggtggtaggttcttagcaccatctttttcctatacaatacgtgacttttttttttttgtctcatgcacttttttattctagctgaaatagaagcttaagaaatgatttaagtgggaaattaaatgagataattgatttagagatgagttaaatgtttgtgttgtattctaacagtttaagggttgctagtattactgactctattacactgcttattatcagttgtttaaagaaacttttgaccaggcatggtgactcacgcctgtactcccagcattttgagaggccaaggtgggtggatcgcttgagtccaggagttcaagaccagcctctgcaacgtggggaaaccccatcgttttgtgttttgcaaaaacacaaaaatctgggtgtggtggcacgtgcctgtattcccagttgcttgggggctgaggcaggaggatcacctgaaccttgggaggttgaggccacagtgagtagtaatccataatcgtgtcactgccctccagcctgggccacagagtgagaccgtgtctcaaaaaaaaaccaaaccaaaacaaacttttatcttttccctcaataattagttgcatgttatatctgctaattttgatctatctaaaataaaatggatacttcttgcctcaaattttaaataggggccagatgtggtggttcatgcctgtaatcccagcactttgggaggctgaggcaggtggatcagttgaggtcaggagtttgagacagcctggccaacatggggaaaccccgtctctactaagactacaaaaaattagccaggcgtggtggcgggtgcctgtaatttcagctacttgggaggctgaggcaggagaattgcttgaacctgggaggcggaggttgcagtgagcctagattgcaccactgcactccagtgacagagggggactccatctcaaaaaaaaagaaaaaagaaaaagaaaagaaaatcttaaatagatcctgctttccctagttgtttattgaattagatacaaagtctttgatctggcattgatctaacttgtatttccactcttaacccccaccgcagctgcagatatgcctcatattgtatctagattggtcttaaacatgctctgcacttctctgccttcatggaagacttttgctgatatttccttcacttgatacacttttggcttttccaccctctccctgcccccaatttctgcttgccagaataatatctgttcttctttcattcatttatttaacaactattgagacactgttgtaggtgcttggatacacctagtgaacaaagttcttgtcattatggcagtcatattcagttgagggaggcaaacgataaatgctggtgattaaatgctgtgaagaaaatgaagtaggttaaggaaattttttgaagtaggttaaggagtattgacaatgatagggggtgctattttcagtttaacggggcattccattatccctgtggagaatgacaattaggaaggcaaggtcagaagcagggagactaattagaggtgacttttccagtaatccaggcatgagatgatggtggcttggaataaggtgggaagttgctggattctggatatattctaagatggagacaacagaatttcctgagggactggatgtggaatgtgagagaaagaggagttaaagatgattctgagatttttgttctgaacagccagaatgatggagttgtcattaactgaggtggaaaaggctgtgggaagggctagttctgatggggaggagatcaggagtttagttttttgacgtgttaaattcaaatttattaatacctcatagaacctatcatctacttggagaggcatatgttaaagaaacatataaataaggacagtaggttattatatcaaagaaaagaacagggcaacttgagaaagaatggcaggaaacccaatttagatggaggctcagtgagagcttttctgagaaaatgacatgtaggatgagtagtaattagaatgaggggaaaagcgttctaggttgaaggaatcagcatgtgtaaaggctggaaataatcagttaagggtgtgactggaaaacagagaacaaaagtgagcagtagagtgagggattgacaggggccacatcatggagggccttgtatgtcatgtgaattttgtccttagtagaaatggcagttctcagatgggtttaagtgagggagcttcaggattagagttgcatcttaatatgagtagcctggctctgtggaaaatgaatttaagggaggcaagagtggcaataaggacaactatttggaggccattgccatcaagaaaggtgatggtggcttggattaataaggtgatggagagaagagaatggatttgaggtagattttggaagtggtgtcaataggaggatgttaaggaggtatgtgagagagaaaagtgtgagaaatgacttgggtttgtaattagagccactggtcaagagttgccgttcatggagagggaggaggagcagacagagttcaagttttgacttgttgagtataagatggctgagatgtcaagtggagatgttggtagaaagttggacctacagatctgttcagaaagaagtctaggcagggtagagatatttgggacttgatgacatacatatatgtatatatgacatacacacacacatagaatatttggtatttaaagtgtatgaggctggatgtggtagctcacacctataatcccagcactatggaaggctgaggtggaagatttgcttgaggccaggagtttttgaccagtctgggcaacatagcaagaccccatccctgcaaaaataaaaataaaaaatcagctgggcgtgatgtcacatgcctatagtcctagctacttcaggaggctgaggcaggaaggttcacttgaacccaggagttagaggctacggtgagatatgatcatgccactgcactgcctgatgacggagtgagactctctctaaagaaaaaaacaagtgtatgagatcattgtgtggatgagtaaagagtgaggaaaatgcctagaagcaagttctgaggaactctaaacacttaggggttgggtaatggaggagaagctagacaaggagaacaaagaggaactgtgggggaacagtagtgagtggtgagaggaaaactactagagtgaggtaggaagaagctaggagaggtttgtaaggagggagtgaccagttgtatcaagctgagtgtttgttggatttaacaccctggaagttactggcaaccttcgtagtaacagctttggtggagtagtggtggtgggaagtcataatacagcgggtagaagaatgaaataggaagtaagagactggagtcagtgtgtaaagccaactctaacaagaaacttggctatgtagaagacacaggttgatagctgcaaagggggatacatatgaagggaaggctttaaaaagtatgagctgtaagagctgggttgaatgctgatttattagagaaagaagtggaaaattaaagagagacatggtttaatggatgtccttcaaggaatctcccaaatggccacctattccactaggtccccctcagtggtatgtattgcttcttcgtatgaattttcatacaaccttccctcctacttctttacttgaggccaagtaaactctgtgaggaagaaattttgttcttcatctttgtataagccagactgtccaacactatgtttttttgaagaaccagctaagacaggttcttccttttcctgacccccacactctgcaagtgcaaaaaccattttgttggtctctactaaagaaagaattggctgggcatgctggctcactcctgtaatcccagcactttgggaggctgtggtgggcagatcatctgaagtcgggagttcgagaccagcctgactaatatggagaaaccccgtctctactaaaaatacaaaaattagccgggcgttgtggcgcatgcttgtagtcccagctacttgggaggctgaggcaggagaatcacctgaacctgggaggtggaggttgcagtgaatcgaaatcatgccactgcactccatgacagagtgagactccgtctccaaaaaaaaaaaaaaaaaaaaagaattaagttcaaatctatagtctggcattcaagtctatgaccttcatagtctagctctaattaattggacaaatttatctcctacttctcctgggtcttacagtccagctaaattgaactcttctttgtttccatatgagctatcttgtttccctgaagcaacctttcccatctcttccattcccatttgtttaaactccataatcctgtaaatctccatttaaatgtgtctgcctttgttaatccttcaagattcatatttcatgcctcttatatgactcttcggttatctattttgttgatagttttgcatgtatgtcttatctttgctataataaagtaagctccaggagagtagattccttgtcttattcatctttgcgtccaccacgatatttagtagattgtctgcctcataataggcattcagtaagtcttattgaatgagtaaatgcacttaagtatagttgatagaccttaacctactgctagtaaattatagttggctaaaaatattctttataagtgctgtgctttggaaaaggatcatctgcttagcagcactgtttggtgggtagttgttgcccaggctggagtgcaatggcacaatctctggctcaccgcaacctccgcctcccgggttcaagcgattctcctgcctcagcctctcgagtagctgggattacaggcatgtgccaccacacccggctaattttgtatttttagtagagacggggtttctccatgttggtcagggtggtctcgaactcccaacctcaggtgatccacctgccttggcctcccgaagtgctgggattacaggtgtgagccaccacgtccggccaaggctcacacttataatcccagcactttgggaggcgaggcaggtggattgcatgaccagcctggacaacatggtgaaaccctgtctccacaaaaaatgcaaaaattagctgtgtattgaggcacacgcctatggtcccagctacttgggaggctgaggtgggaggattgcttgagcccaggaggcgaagtttgcagtgagccaagatagtgctactgtactccaccctgggcgacagagcaagaccctatctcaagggaaaaaaaaaaaaattcatactctggtatcttctggcatttcacagaagggcatctggattcctgccaaaattgattcttttgtcttttattaaaaataatctttcaagcaaatttgagattcaccactaaagccctaaatttgtttttatttactttgtgttttaactctctctcactgcaggtttgttgttgttgttgttgttggttttttggtaagtacagagactacaaatttaaaaaatctttcattaaacatgtctttactaagtgcctactaggaactgctctaagctctgggaagcaagaaaatgtaccctcaggtgtcagtaatgaatgagctataaggaaggcgtactatacacaattatcttagatgggataatattttccactagagttattgtaactcactgcctgggaggccttttcacttctaggaagatctggttttcctatatttagaatagatactgttcccattgactgttttctgttggatttcttaaatgcatgagatagaagaagtatatatggaaaagcatttcatatttaattgaaataatatatacatttatggagtgctttctatgtgccaggcactgtgttgactacatctatgaaatattaactcatttgattgttactcaataaaatgtttgctgaaggaatatatagaagcttttatttttttccgtgcacaggcttaatttcagaggaggttgggaggaaaagaagaactaaaagatcacatgattgggaaaaagcaaatgcctaacaagaagccagagaaataggtcgagagggtgatgcaaatgactgggctcagttcatattttagattgaaataaacagatttacttgtttttccttgcaaagtaaaaaagttttaagggagagtctgcaactgtgttttgaccctgagcatgtggcttgatagccattaagattaggagtgttgagagcagctattgtcctgatgactcagcaggaacccctgtgttagattataccgttgcctccgtattgcatgtaaaaagttctttatatcttttgaaatatttgagatcatagatcccaaaatcagagccagggatgattgtttacttgaagtatcatttgtatttttctttccttctttttcttctttctttctttcttttttttttttttgagacagagtctcgctctgtgacctaggctggagagcagtgacgccatcttggcttactgcaacctccaccttgtgggttcaagcaattctcctgcctcagcctcccaactagctgggattacaggcgcccaccatcatgcccggctaatttttaaaatttgtttaaattttaattttagttttttttcttttgagatggagtctcgctctgttgccaggatggagtgcagtggcgcgatctcagctcactgcagcagcctccacctcccgagttccagctattctcctgactcagcttcctgagtagttgggactatagacgtgccaccacgcccagctaatttttgtatttttagtggagacagggttacaccatgttggccaggatggtctcaatctcttgacctcctgttccacccaccttggcctcccaaagtgctgggattacaggtgtgaggcaccacgcccggcctatatttttaatagagacagggtttcaccatgttggcgaggctgattttgaaatcctgacctcaaatgatccacctatcttggcctcccaaagtgctaggaatataggcatgagccactgcaccttttttcttttttttagatatcaggtcttgctatgttgcccagacggttttttttttttttttttttttttttttttttttttttttttttttttgagacggggtctcactctgtcacccaggctggagtgcagtggcacaatctcagctcactgcaacctccgtctcctgggctcaagtgattcttgtgcctcagcttccctagtagctgggactacagacatgtgccactgcaactggctaatttttttgtatttttagtagagacatagtttcgctatgttggccaggctagtcttgaactcctggcgtgaagtgatccgcccaccttgccctcctgaagtgctgggattataggtgtgagccaccacgcctagccagtatttctgtctaggtgctgaaatagtttcttttggaattgaagaccatttgaattaatatttcaagtaggcaattgagtcatcataatggaagactggatctttagtattatgctgttagagtatgcagtgtccagtcttttggcttccctgggccacactggaagaagaattaccttgggccacacaaaaaatacactaacaatagctgatgagctaaaaaaaaaaaaaaaaaaaaaaaagaaaaagaaaagaaaaaccaaaaaaaccttataatgttttaagaaagtttatggatttgtgttgggcttcattcaaagtggtcctgggccacatgtggcccacggacctcaggttggacaagcttgatgtagtggctaagagtgtggactcccgagccatgtggcctgtgtttgaatcctagttctacccttcactagttgccttggtgtccccactggggtaatcttgggcttttgtaaagattataagagttaatataagaaaagcccttagagtctaactcatagtaagccttgtttgcttactattttgcctttaggaatgcagaattaagaccatgttggcttggcctatggttagtttattatattcaatataccatatgtggtttcaaccttcaggattagaagcatctgccagactgccactaccaccaggtgggaacttttcattctttatcaaaagagcagggttagtacaaaaaaagttcaaggttaagcttgagtttgctcttgaattaacttcagtgaaccctgatcctgttgacacttactaggtaactaaaggacagtcagattggactctgccatcttagtccatcggcctcagcagctcttgctggacttgtagctaaagcttgagagtccattagtagtgagaatgtttttctttttttcctctctctcttttttgttaatgtgaaagtgcaaaagtaaagaggaataatctatgacataggatcttattggttctgtacaaatactcttaattaaaaatttttaattaaaattatatatatatatattttttttggcatggagttccgctctgtcgcccaggctggagtgcagtggcatgatctcggctaactacaacctctgcctcccaggttcaagcagttctgcctcagcctcccgggtagctgggattacaggcgcttgccaccacgcttggctaatttttgtatttttagtagagacgggatttctccatgttggtcaggctgatctcggactcctgacatgaggtgatccgccctccttggcctcccaaagtgttgggattacaggtatgagccaccacgcccagccaaaattttcatttttttaagatatggggatcttgccatgttgcccaggctggtcccaaattcctgaactcaagtaatccccttgtggtggcgtcccaaagtgctgggtaaaagtacttttgaattatggattttggcttcctgtgctaccaaatttcactatttcttgatttttgtggtattcacctttacaactgaacaggtcatatattaactagcctttatctaatgctttctttaaaggaaatgtagacgtgcttatatttttaacacatctacatttctcttaaagagaagagattaagctctttttatttaatttgtctggaagaagttgagatagtgtagatctacaggttttatatttagtaatttttaaggagtaaaaatgaagtcttctaatttttctagactctatctaagattattgtttttagactttttcatcttataccacaatgagatgataaagcttaaaacattaacatgtcggccgggtgcggtggctcacgcctgtaatccctgtactttgggaggctgaggcggtcagtcaggagttcgagaccagcctggccaagatggtgaaaccccatctctactcataatacaaaaattaggaggcatggtggcatgtgcctgtagtcccagctactcgggaggctaaggcagaagaatcacttgaacccaggaggtggaggttgcagtgagccgagattgtgccactgcactccagcctgggcgacagagtgagactctgcctcaccaaaaaaaaaaaaaaaaagaaaaagaaagaaaactttagcatgtctgtaattggtagatataatctctatcatttatttaatgataattaaaaatagcggggcatggtggcacatgcctgtggtctcagctactagtggggctgaagcaggagattgaggctgtagtgagccactctgattgcaccactccactccagcctgggtggcagagtgagactctgtctcaaaacaaaagaaaacaaacaaaaaaacataatgtaagaatcatgaagtgactttaaaatctttattttataataatgttataagttttctgaagctacttaatttatcactatacagaataaacagatatataaaaaatgatcagtaagtttttgtttccctactaaagccagaataatggtcatgaggtaatagatagcattgggtgcttactatgggccaggcacagtgtgccagccgtttgcatgtgttagctaatttaatcctcatataaactttgaaataggtgctatcaatactgtttaacacatgagaattagagagatcattgtttgggtatggttgcagggccagtaagtagcagtactgtgatttgtactaacgtctttgggatttcagaacctgaatcaataactttgtttatgttatttttctctatttatttgaaacttgaatgctttcctaacagaatttcttatgttctgttttcagtcaccctgaaaaaaaaattctgagaatatttaaggatatttctaaaacatactaacaactagtgagcctagatggttcattagatgactttggttgctttcagttctcttggtaaaatttgaaaggcaactaaaatttccattacctcacctcgttgcattttgggggcctggttaattagtattttataaagcactttagagggtttatttataaacttgttaaggaacctgacttgaatgtcttttttttttttaaggcagagtttcactgttgcccaggatggagtgcagtggtgtcatcacaggtcactgccaccttgacctcctgggctcaagtgatcctcctcctttagctccctgagtagctgggacttgcagtgccaccatgcccagctaattttttttaaattaatttttttgtggagatgaggtctcactgtgttgcctaagatggtcttgaactcctggactcaagttatcctcccactttggcctcccattacaggcatgagccattgtgcttggcctcacatattttgattttaggattgttttccaattgagaaatgtctaaatggttcaagtttaacaaaaatcatatactaatttgttaattatttttctgtgagttcttttctttctgccctctccctttctcccttcctcccccttcagaggttggtagaaaaaaaaaaaaaaggcaaggaagtttctttttgtggagagaggaaatgactgttggttcaagactttatccatattaggtataaactaaatatagacgtgtaatccaggagtgaagtcacatctataaagtttcttaagcaaagctaatgagatcagccagtgcttttggatctgttttttccccccttgcttttggctcacttaccaaactgattagtcttatagtctgcctgcctttgcttctttaaaaaaagaataaaaaaattataaggaatctttctgtaaaacaagcacacaaatttttaaaaagttgctttgtatatgaagcatagtcacttatgcctccctttgaggggaggttataaataaattagcttctttaatttcttgaccttgtcattttcctcacaccaattcttcttcttttttttttgttttttgagttggttttatccttgagtctttgtcacatatttttactgtgaggctggactcatctttgtaagttgtaagaaacgtgttttacttagtattttcttggtttattccatttttaaccattaaagcagatctcagtatggctaaatggtaataggatttcttctgattggctggttagagagattgtaatagaacggaatgatggaataaatctgcttctggtcacagcacatgtccttctcaaataaggactttgaaaagtcccccaaagcattcttacaataattatttccaactcttgtgttccttcttagagccctttgcaagcattcctaaacactcaagcccttacgaacgtgctatgcttctgaagagaagaactatatacacacatctgtggcgcatcttactataaatactttggaatacaactaattgtgtaaaaagtttagcttaacatatttcggggttttagggatcagttcatgaaactaaatgttctccaagcctaagttggaatctgttctgaatccttctctgaccatgttgttcccttagcagaactactctttcctactgtttggggcagtttgtgcatttttatattctgccactcatctgaatcacctttaattacatttttgttccaggctagaatgtaaattccaggagatcaaggataagggattattttcttttttcttctttttatattttaaatttaaaaaattattatgttcttctaaagactaagggactattttcttcatcttttatatctaccccctaccacaaacctttatatataggagataattcattaattcagtaagcatttattagtgttttttggcaaattggtgtgcatagtataggaatataagcatgtaagagagaatatattaaatattttctgttattgtgttctatattacctcatagtaaaataccagagttaaaagtagtattcagttattgaacttgagacatgtaattggggttttgtaactagctactcactatatagctattggtctaaacctaacagattggtttagagaactagaatattatgtaactggaaggccaggttcaagtcctatgtgtatcctaattgatctgctacctcatctgtcaagtgggtgtatttcttggaggtgatgttcagtccagtttgtattattttatatgccaaggtagccttaggcttggcttaagcttaggcttaggcagaaagttgagccctgagattccaacgtcagatccagagaattaaattctcataattagaagcaatctattagataacaaaaatagagccaatacaaattcttcatgataatggaggcagtttgccaaagaaagaaaaaatatttcaggagtgaattctttgacccgaaagaatatattttatttcccaggtgagctcctgaaagaaagtttaaggaaagattttgtttgttgtatctaaaataaagcagacacagaaccattcttcttcttcttttttttttaaagccagtcaaatttatagaattttccttcatcatatttgagtaacctgtgcattgaaatccgaagtaaaatatttcagtaagaaacatcctgctatgttatactcttcagatatttgaagttttaggccagcaaagaagatagacaagaattctgaatattaactttcacagctgaaatacagtgttgaatatataatttttgcggaaactaattttgtaatgtatatatatagagagagacggagtcttgctctctcgcccaggctagagtgcagtggcacgatctcagctcactgcagtctccgcctcccagattcaagcgattctcctgcctcagcctcctgagtagctggaattacaggtgcccgccaccgtgtccagctaatttttgtattattagtagagacggggtttcaccatcttggccaggctggtcttgaacccctgacctcatgatccacccaccttggcctcccaaagtgctgggattacaggtgtgagccacagcgcccggctgattttgtaatatattttaatgaacatttaaaaatacataatccaaaattaaaacaaatgaggaagattcattaatttattcatgtttgttgagagctaatattttatactattaataaaatattgtatagcattttcatgattgcagtttttcattgtttatggtcatcttcattaatccattgttcttagtcatttagaggtctgaaatttggctttaagcaatattgtgatatatatccttacagccaattttctgtgcatgtcaagcaattgtgttttaaaagtcccccacatatctcatttaccctctgaattctttattttccttttgtttacttaaactgtaatctctcttttttcacacttcacctggaatgtaatctcttaaaaagaaaaaactttctgcagaatttaggttttttacaaagggaaaattggatttttgactctactactgaactcttggtggagtgtctagttaaaattggtctgagaacttgatgaacagaaatagctgccttaagcatagatggggaagaataatattaatttcttgaacatttcattgttttcttgtactcttgggattctttgtgaatctagtttatactacagtataatgtgtatacccttaaggaaagtgggttgctgcattttgacttgcagaagcatttcacctatgtcccaacatagttgtctttagttgataaacaagggaagaccctggcagttagtgaatttatctttggttagcagatattttttaaaaatgagggctagacaatgaaaaagtttgagatgcacctttttttttttttttttttttttttgacagggcctcactttgtcatccaggctagagtgcagtggtaagatcatagctcactacatccttgacctcctgggctcaagtgatcctcctgcttaagccttctgagtagctaggactaaaggtgtgtactaccatatctggctaattttcttatttttcatagagatgggggtctcactgtgttgtccaggctggtctcaaaactcccagcttcaagtgatcctcccaccttggcttcccagagtgttgggattacaggtgtgagccattgcacccagccagagatgcacttttttttgatgtaaccaaagtgagaataattataaaggagcatgtttcttttttattttaattttaattttttttgttgtataaatggagtctccctctgtggccctggctggagtgcagtggtgcgatcttggctcactgcaacctctgcctcttggagtcaaacagttctcctgcctcagcctcccgagtagctgggactacaggtgcacactgcgacacctggctaatttcttttgtatttttagtagagacggggtttcaccgtgttgcccaggctggtcttaaactcctgagctcaggcagtccgcctgccttggcctcccaaagtgttgggattacaggcgtgagccaccacgcccagctaagtaacttcttttttaaataaaataatcatggattaatataataaaaacaaattagtgttctgtgtttctgaaattaagtcatttagtgccaaactttcacattctaaatagttgtatctgaaaatgtcttgacttctcttccattctttaaagatggttttgttggaaatagaattttgagttgatttttattgttgttattgttattctttcagcaatttaaaaaatgttcttgactgggcgtggtggctcatgcctgtaatctcagcactttgggaggctgaagtggaagatctcttgagcccaggagttcgagaccatcttgggcaacctagtgagaccctgtctctacaaaaaattgaaaaaatagctggacatggtggcaggtgcctggtcccagctacttgcgaggctgaggtgggaggatggcttgatccctggagatcgaggctgcagtgagagctgcgcttcagcttaggcgacagagcgggaccttgtctgaaaaaaaaaggaccgagggcagtggctcatgcctataatcacagcactttgagaggccaaggtgggtggatcacctgaggtcaggaattcaagaccagcctggccaacatggtgaaaacctgactctactgaaaatacaaaaattagctggatgtggtggcgcatgcctgtaatcccagctactggggcagctgaggcgggagaatcgcttgaacccaggacgcacaggttgcagtgagccgagatcacaccactgtattccagcctgggtgacagagtgagactccatctgaaaaaaaaaaaaaagaaagtgattccatgttttctggcctccattactccaaatgataattcaacagtcattcaaattattatttccttgtatgcaatgtgttgtttttttctagctaccgtgaagattttctttttcttcctttctttctttcttttttttttttttttttttgcttttcattatttcaattatgatatacttaggtatggcattatttgtattgaatctgcttgatgttcatgaaacttgaatctgtaaatttgtctttttttgggaaaattttggccgttatttcttgaaatatttttttcctcattgtctccttctggaactctaaaatataaatgttttagtattttcccgtaggtctttgaggctcttttttttctgttcttcaaattgaataatttcttggttctgtctttatgttcacagacctctttctttcttctctctctcttttctttctttcttttctctttctttctctttccctctcttttcttttcttttccttctttattctactgttaagccaatctagtaatatgaaaaaataatttagatattgtagtttttagttctagaatttacatttttgtgtgtgatttctttccctactgagatttcctatcttcctttattttgagcatatttttctttcgttatttgaacatagttaccataactgccttaaaatccttgactgcaaactgtagaatctgggtcatcttagggtagtctccttgattacttttttttttttttcttgagaatgggtcaggtttttccatttcttcttatagggagtaattttggattatattctggatattacaaatgataaatgataatttatatatataaattttgttatgcccgtcttaaaagcattgattttcttttctaaagcaggcaattgattaacttacctgaattcaagctgcaaaactgtccccccatagtaggtggcagtgtacatttcagttcagttctcttagctggcctacttggagcctgctctgtgcatgtgtgtttcacggatcagcgagagatttagacagatttatgcagattttagggctcccctgtgctggttctctctctctctctttttaatggtgtcttactttattttctttgcagtggtgatggttgctctagactgttttttggcttttaaagtcagcagaactgtgaattttccattggagttttagctgccctacatggtgcaaggctaaaagataaaacttggggaaacttgtccagtgcagttcctttcctccaagtgccaactcccctccaatatttgcctgcttttgtcactctccagtgccttcaggtgtttttgtctggaagttatagctgttatgataggcagagttgatcctataggaggaactgcctggtcttactagaagactcaaacttatttttttaaaaacagaaacctttaaattttagaatagttttagatttgtagaaaaattgcaaaaataatacagagttctgaaatttattttaaatgaaagtatttctaaaatatattaatgcttccttgacttttgaaaatgctgagtttggccaggtgtcatggctcatgcctgtaatcccagcactttgggaggctgaggcaggtggatcaccagaggtcaggaaaccctgtctctaccaaaaatacaaaaattagctgggcatggtggtaggggcctgtagtcccagctactcgggaggctgaggcaggagaatcccttgaacccaggaggcggaggttgcagtgagcaaagatcatgccattgcactccagcctgggcgacaagagcaaaactctgtctcaaaaaaaaacccgaaaatgctgggtttaactgccaattaatgtcaacattctgaatataaattcagtaatgcaacaatggcctcgggagccgttgaggcatgtaagactatttttgtctttctgctaaatggcctcagctattgtgcttttcgaacctaaatctcctttgtgtgtgtgcatgtgtggatgggtgcatgcgtgcatgtgtgtgtgtattttgtatttcttcctttgccaacttagctctattgatgcagcccatttccgttaattttctattgtaatttgttgtggctcagtacaccagataaactgttaaaatttgtttgaaataggaataaatggtttcaggccaggcacggtggctcacgcctataatgctagcactttgggaggccagggcgggcggatcaagaggtcaggagttcaagaccagcctgaccaacatggtgaaaccctgtctctactaaaaatacaagaattagtcaggcgtggtggcatgtgcctgtaatcccagctactcgggaggctgaggcaggagaatcgcttgaacctgggaggtggaggttgcagtgagccgagatcacgccgctgcactctagcctgggtgatagagcaaaaaaaaagaacaaatagtttctgagagcttgaatgttgagttaatgagtcaggtacatcatctttagtatctggtcttggtgacattggtgcccagaggccttttctctagatgcctgctgtcaatacaattgtcgctacctatacatggctattcagtgtttgaaatatgtctagtttgagttgagatgtactataattatgaaatatacaccagattttaaagatgtagtacaaagaaaagaatgtaataactttttatgttgatcatgtgttgaatgatgttagatatattgggttaaataaaaaaatttaatcacacttgtttcttttacttttaagaaaatgtggaatgcttcacaaatttgtgcgtcattcttgaacaggggccatgctaatctgttttgaattgtcccaattttagtattcatgctgtcaaagtaagtactctttttaagtcttcaatatggctgctagaaaatttaatataacatttgtggcctacattatattggtcgtagctctggcaatttatcttacttgatagtagtgtctatgagtgagatggtggtggttctgtaagaatcttgagatcaagcaggtgagattctagcatctccttctttgctctggtgtaagaaactatcatagtggttggtagatagtatggaccttggagtttaaacctcagttttgacactcctcagttgtatgacctatgacaaattattgagcttctctgaacctcagtttcctcatctgaaactcatatgaaacgaggaaaacaacccctaatttcatatggttattgtgaaatacataaaactagttttatatagtgcatgtcaactgcaaaatacactactcaatacatagtagcttttaacttgtttctggaccattttggtaacattttgatttattgtagttgatacttatagggaatataatcaaggtagatccagactaggaaaaaaggactgtagctttcgtccttttttttctttctttcatttgttgtcattcagtttttttccaccactaaagaatatgtctttgatgaagaatttgtaagaaaaaaggatggaccctctgtaaaaagaagagatattgcctccggacagtcaatattttaaattatatgatttattagttattctgaagagataatagacttgttcctccttttaggcttttgataagtaaatgtgaacaagcagaactcgttttcatcatgggtctattgtgcctagatggaaagtctggtcattgtacatctgacagtttgttttaaaaagtggttctggctgagatatttcagatttgattttcctacagattaaagcctttctttacatcttcagcatatacttcaagcaagtaacaaaagtactcaaaagaaactcacgacattaattccatttgttatttcatctagtagtttttgaatgactactttgcatttagcatttattcaaaagaagttctattatatttaagcagtttaacattttggcactgattagagacagtaatgagattatcatgtataaacattaaaaaaataattttcttaaatctacaaagaatagaaaagaaaaacatgcttgttataaaaagacaaataggacacaagtatataaaattaataccccaggctgggcatggtagcttacgcctgtactcccagcacgttgggaggccaaagtgggcagatcgcttgagcccaggggttcaagaccagcctgggcaacatagtgaaactctgattctacaaaaaatacaaaaattagccaggcatggtggtacgtgcctatagtcccagctacttgggaagctgaggtgggaggatcgcttgaacccaggaggtcaaggctgcagtgagccgtgattgcgccactgtactccagcctgggtggctgagtgagtgtttgtctcaaaaaataaaataaaaataatctcctgtccctacctctccccagatctgtcccgaggtaaacaatgttaattttggtttatagccctccatacttgagaagtatttccaagatgtaaattccagggttacagatctgtggtatctcttaaagggatttatttccctttccatcctctagcaaagtataggctcacccttactcccatcttgaggtttccttgacccagttgctcaaagcagatagtaggaattacttgatttctttctcccgctttccacatccaaaccatccacgcgtctttaggattatgctaccccaattcaatttaatctacacttttctttccatgtccattgcttttacctaatccaaagcacatttcaccacaactaccacaagaggccacccagcttcaattcttcatcatttgatgcctctgatctgttttccatatggcagagtgttatttattgtcttaaatggaaatcagattttgcccttatcttgcacccatcaaaacccttcagtggtatcctgttaccctgttctggcattccttaccccctttcccctcccaccagtggaagctccatgaagtcaggaatatgttctctggcacatactgttttattgagcacttaaccacatgctggacaatattttaagagcttttcatctattaactcatttatattcatgataaccctgtgaagtaggtattcttcccaaccattatgtgtacaaagcaactaaggcccagagaggtttaagtaacttacccaatatcacactcatgcttaagtagaagaatcaatatctcaaaccaggcactttgccttcagtccttgctgttaaatgttgtattaaatgctttttttcgacatagtaggtacttggtaaacatttgttaagttaatgaataaattgttccctctttgcataaaattcaaacacttaatttggtctagaaaatctttcacgatctggcccctgccaacaccactttctcatgtactcatggcaatcttgtcacactggctctttgcatggctgtttccttctcattctttatgtctaagaggtcttccatggtcatctcatctaaagtaggtgcttcttgtcctctctctgagtactttgttttactttaggcaaatcatgattaattgttaaatacatggtataggcttgctattccctgggaatttgtaagagatgcagaatcttggttgtcaccccagatttactgaatcggaatctgtatttttacaagatcgtctaataagttgtgatgacatcagagtttgagaagctgggatagaaactgaaaggacagctgggcacggtgtctcatgcctgtaatcccagtgctttgggaggcagaggcgggtggatcacctgaggtcaagagtttgagaacaacctgaccaacatggagaagccctgtctctactaaaaatacaaaactagctgggcacggtggcgcatgcctgtaatcccagctactcgggaggctaaggcaggaaaatcgcttgaacctgggaagtggaggttgtggtgagctgagatcgcaccattgcactccagcctcggcaacaagagtgaaactccatctcaaaaaaaaaaaaaaaaaagaaagaaattgaaaggacaggtaactgaattttttttttttttttttgagacagagtctcactctgtcacccaggctggagtgcagtggcacaatctcagctcactgcaacctctgtctccctggttcaagcgattatcctgcctcagcctcccgagttgctgggactacaggcacacgccaccatgcccggcaaatttttgtattttttttttttttagtagagatggggtttcaccatattgcccaggctgatcttgaactcctgacctcgtgatccatcctccttggcctcccacaatgctgggattacaggtgtgagccaccgcgtctggcaaggtaactgaattcttatagtgagacttgagcttgacctgaagcacgggtgtggcagtgatcatttcagggaggttaatgtgattgtagtcacataagggtccagatttatgtggccttattgtacaggatgaacgggagtgggggtggagcagtgctgtgggtcctcaaggacatcagtggggaagtcattctaggaaaagaagatggagaactttgtgagacctattttttttttttttttaaagacggagtctcgcactgttgcacaggctggagtgcagtggcgcgatctcggctcaccactttaagggaatctcctgcctcaacttcccaagtagctgggattacaggtgcccgccaccacgcctaactaattttttgtatttttagtagagatggggtttcactatgttgaccaggctggtctcaaactcctgacctcgtgttccgcccgccttggcctcccaaagtgctgggattacaggcgtgagccactgcgccgggccttgtaggacctaatttttaaagactattgtacgctttatggtttttatttttaatgaaactattatgttaggtaattgatcataatttggtcatttactgaaagaaacagcaacagataacctttgaaaactactggaaggtgaatcatctctcccattcaacatttgaatgacttcaattcacagtgacttagactaaagcaagagaacatcaaatgtactgttataagctgaactactaactcagaggaggaaccactggcaagcccataaaactgaaactcacaaaaccatgatttattgggagatgtttatgtcacttttgagaaaatattaaacaggtgcttttttatttgtagtaaggtcatggagtatattttgagtttcattgtattctaaattgaaattttgtacttttagggtattctgaaattcttaagtgattcagattagactttggatgctataggtaatgcaaaggcagaaaccatttcttctcttattcatcaccagatctctggtgtttcgtataggtcctcacatggctggtgaatgaataaaaaaaaaaaagttttaattttaaaagattgatatctatctgctcttgaagataatatataaatgatggacaataaaagtgagctgtaatgtatttagaaactattaggactgaagtggaaactagattaataatttaaaaaacactttatttggaaataatttcatacttacagacaagttacaagcataagaggtaggacacagtggctctgtaatcccaccgctttcggaggctgaggcaggaggattgcttgaggccaggagttcaagactaacctggacaacagagcaaaactgtctctacaaaaaagtaaaaaaattagccaggcatagtgatgtttgcctgtattcctagctactgcagaggctgtggtgggaggatcactacagcctggagagttcaaggctgcagtgagctatgatggcaccactacattccagcctgggcagcagagcaagaccctgtctcaaaaaaaacccaacaaaacaaaaacaaaaaaacagttcaaagaatactgtttacctaggtttacctattgttaacattttactctatttgctttattatttgctctttctctcataagttgcatacattgtggcattttatccccaaatacttcagtgtggattccctaagagtagggatatatcttgtgtatgtaatgttgttacgttacagttataatttcaataaattaatctctctccccacctgccttttccagaaaactaagacccagagaggttaagtgacttgccctgtggttagataggttccaaatggaaaatccagcctactctgctagtcaggtattagccctggtccctaacatcacaacagaatcttttttttttcccctgacacgccaaattatttagtagtataatacagtaataaaaatttgtggccggtcgtggtggctcacgcctgtaatcctagcacttggggagactgaggcagatggatcgcctgaggtcaggatttcgagaccagcctgggcaacatagcaaaacctcgtctctactaaaaatacaagaaattagccgggtgtggtggtgcatgcctgtagtcccagctacttgggaggctgaggcaggagactcacttgaacccagtgggtggaggttgcagtgagttgagattgtgccactgcactctagcctgggcgacagagcaagagtctgtctcaaaaaaataaaaaagaaaaatttgtaattgtcttctgaaccagatataaccatctaatagcacttgatctgtaaaggactttggatcaccaaaattgtccttgacattctatttggcttagtttaagtatgagtttgtccaaatttaagacatgatagcgtgaagggaatagactgttatttaccaaatttgaccctaacaaacagtgaccagttactggcctacagatagctgagtccaaaaggcatcatgaggaattcaaagtttaaccatggggcaaacttcttcattccagttttgattttttttttttttttttgagatggagtcttgctctgtcacccagattttgtttatcttcagagtttttccacattcattctttaacttgtgtttcactctattttcatatgtttttgatgggagggtttttgtttgcttggttttttaaaatgaaagattcatgtccatattacaaatatcaaaaagtgtgaaaggtacacaacaaacaactcccctaaccccgtcccttgagtgttgtgctgttctaagtcctttatatgtatgaactcattcagttctcccaactatccaatgaggttattattcccattttatagaaaaggaaaacaggcccagtttttcagtcacttaggtaggaagtagtggagttgtctgagagtctggctctaaattagtggtcttaaccaccattctctgctgagcaagaggatatcaggattaactagattaatacatgtgaagagcttgttttggacgagcagagagatttgtcttcaataaggtaaatgtgagtgaagtcttaatagtctgtcctggagtttcttctagccctggtaattgggcatcctgatgtaatttcaagctaatcatttcctctctaaatggcaaaagcttttatctgaagagcagatttcatgaattggtgatgctgagtaaggaaatggtagcaaccgaagtctttgcagtatcctctgcttagctgttttatttatacagacagagctggacacatagtaattctgtaatcccagcactttgggaggccgaggcaggcggatcacgaggtcaggagatcaagaccatcctggctaacctggtgaaaccccatctctattaaaaatacaaaaagtagccgggcatggtggcgtgcatctgtagtcccagctactcaggaggctgaggctggagaatggcgtgaacccgggaggcggagcttgcagtgagccaagatcgcgccactgcactccagcctgggcgacagcgcgagactctgtctcaaaaaaaaaaaaaaagaaaaaagaaaaagaatatctttgcttttttctatttagtgaacatttaaactttatgtagaccttttttttttttttttaaagcatcgggtcgtaatctatgtcagttggaataatttaatgtggaagatatttagatttttttcccttctctccttgttttccaaaagaataaagcaatctagggattctaaccactaagtgctggaactgaagaatctgttgttaggccttgagttctttgcatggaacgtctttaagtcaagtaacattttaaaaactcttaccatgtgccaggaactgtgtgtatcctaacttatttgatccccacaataacatggtacatagtaagtcaagtttcacagatgttaagtaacttactgaagattacacagctaatgaactagggaagtcaggattcaaacctaggtatgtgtgattctaaactgtggtttctcacatgctctgcagaccctgtagaagaacagcttataaaacagctagactccaaacttggttccagcatgtgtttagcaaaaattctgaagaaataggctgggcgcggcggctcacgcctgtagtcccagcactttgggaggccaaggtgggcggatcatgaggtcaggagtttgagaccagcctggccaatatggtgaaaccccgtctctactaaaaatacaaaaattagccagacatggtggcaggtgcctataatcccagctacttgggaggctgaggcaggagaattgcttgaacccaggagtcagaggttgcactgagctgctgagatcgtgccatttcactccagcctgggtgacagagcgagactacaactcaaaaaaaaaaaaaaaaaaaaaagaaaagaaaaaaagaaaaactgaagaaataggtaatagaagccagatgactttgcccatttgtcacattgtttttggacttttaagttagtctaaatcaaagcaaccattttgtgtattttgacagctaatttagatgaattcatactaaaggtaaatgaggtattaaagttttaaagttcattctttaacaacacattactctatacgctccccagaaaatatgtcgaggaaaataatttaatggtcaggagcctgtccttactttcagatcctaacttctctcttcccctagtcatcaccaccccttaccctcagttccataaacataaataaagagaagaatgaagttaaagcttttcttcttaggtgtttaaaaatctgactattctaaagactgattaaactaggttttctaagtgagcagttccttaatcttgacttagtaaaacattaaaatatttggcatctgccattgacccctattctgcaatattggagttaatccagcagtttctgattaaataccagtattatgcaattcaagaattaccacaggggtgtgaagggaagagggtgaggctagtgaggaacacccagacagcaaagtaaagaaaatactccttttataagaataaaacccaaatgaatgctaagactctatctagagattcattgttatttctgtcagtgggattatttaagttttctctttaatcattcgagtttaaaaaaattatttttatttttttttatttttcagacggagtcttgctctgtcgcccaggctggagtgcagtggtgctatctctgctcactgcaagctctgcctcccaggttcacgccattctcctgcctcagcctcccgagtagctgggactacaggcacccaccaccacacccggctaatttttttgtatttttagtagagacgaggtttcaccatgttagccaggatggtctcgatctcctgacctcgtgatccgcccgccttggcctcccaaagtgctgggattacaggtgtgagccaccgtgccaggccaatttttatttttattttctggagatggggtctcactctgtcacccaggctagagtgcagtggtgtgatcatggttcactgcagccttgacctgccaggctcaagtgatcctcctgcttcagcatcctgagtagcctgggaccacaggcatgagccaccacacctggctaattttttaaaattttttgtggtgatgggatctcactatgtgtttctcagactggttttctaatttttaagaaaacagtagacatgtatgtttttgtaacatgaaatcataactttatgtaatccaggccgggtatagtggctcacacctgtaatcccagcactttgggaggctgaggcgggtggatcacaaggtcaggagtttgagaccaacctggccaacatggtgaaaccctgtctctactaaagataccaaaacaaaacaaacctatgtaatccaaattaaaatcttcttcagcatgtatatatttatatttataatctatatgtatatatttaaaaaacaagttattggatgtaattcatatacagtataattcacccatttaaaatatacagttcagtggtttttagtatattcacagagttgtgcaaccattaccagggtctaatttttttctttttttttgatacggagtctcactttgtcacccaggctggagtgcagtggcgcgatctctgctcactgcaagctccgcctcccgtgttcacgcattctcctgcctcagcctcccaagtagctgggactacaggcgtctgccaccacgccaggctaattttttttttttttttgtatatttagtacagatggggtttcaccgtgttagccaggatggtcttgatctcctgacctcgtgatccaccttcttcggcctcccaaagtgcggggattacaggcgtgagtcaccgtgcccggccattttttttttttttttttttttttgggagagacagagtcttgctctgttgcccaggctggagtgcagtggcatgatcttggctcactgcaacctccgcctcccaagttcaagtgattctcctccctcagcttcccaagtagctgggattacaggcacgtaccagcacgcccagctaatttttgtatttttagtagagacggtttcaccatgttggtcaggctggtctcaaactcctgacctcgtgatctgcctgcctcggcctcccaaagtgctgggattacaggcatgagccactgcgcctggccaatttttgtattttttagtagaaatggggtttcgctatatgttggccaggctgatctcgaactcctgacctcaagtgatccacctgctttggcctcccaaagtgctgggattatagatgttagccaccacgcctggccaccaggttctaattttaaaacattttcatcacctcaaaaagaaaccatgtacccattagcagtcactcctcttccccatcctcagttcttggcaacagatagtctactatctgtatgaatttgcctattttggacatttcatataaatggtatcatattcagttgtcccctggaatccacgggggattggttccaggactcctctgtggatgtagaagtccgttatagttgtccctgtatctgcgggttctgcatctgtggatacggaaggccagctgtgatatgtggtgttttgttcctttcacttattcaagttacagcatgtatccatacttcattgcttttaattgtcaaataatattccactgtatggatatgtcacatattatgcatttttaattttgcttttaaatctaatacttctgagagacttctccttctgggaatatagaatttcctgcttttttgcctcctatattcctgacttggagctaaagaagccagcaacctggacacactagcaggcactgagaagaaaaactccaaccaaatcctgctgcctcttgcctgagaaccagggaaggggcagcctaaacaagaccacaaacttttagataattactgctctactataaacaccacagaaaaagctgtggctccatcctcaccatgccagcaaaggctgaattgggtggcctagacttccatcctctgttggtggtctataaatttaaccaatcttttactgatgggcttcggtggtctctagtgttttgctgttacaaacaataaggcctcagtattcctctctcttgtatctttggacatctgtatgactgtttctatagaataaatttctagatataaaattattgggacaatagatggcatccagtgaagccttcaggaatggcagttagatggatgatctcaaaatatagaaacaggctgggcgaggaggctcacgcctgtaatcccagcactttgggagaccgaggtgggcgaatcacttgaggtcaggagttcaagaccagcctgaccaacatggtgaaaccctgtctctactaaaaatacaaaaattagctgggtatggtgatgtgtgcctataatcccagctattcgggaggttgagacaggagaatctcttgaactcaggaggcagaggttgcagtgagccgtgatcgcgccattgcattccagcctgagtgacagagcaagactctgtctcaaaacaaataaacaaacaaaaaaacctggaaatatataagaagtattacattttcagtgtagtttttctctgttgtttagactaggtaatttttatgccttcattttactgattcttctgtccccttcgtttggcttttgaacccatctactgagtttttaaatttcagttactgtatttttcagttctaaaatttccatctgggacttctttatatcttttttttttaactttaattatcgtgtttatcttctgacatacatcttctattttttttgctgaggctttctgttttttcatttgcttcaagcagatcattccatttgatatgattcttggtatgacacgttcagttgaaacatggacattttcatactatgttaagagactctggatcttgtttaatccttctctttaaacttctgacactcaagtaagactcctttgacatttctgtggagggaaaaggagaagggagatggcactgctttgttataaccaggtagagacagaagtccaagtgccgcactgggttatctcatttttatttttttatttttatttttatttgttttgagacagtctgctctgtcgcccaggctggagcgcagtggcgcgatctcagctcactacaacctctgcctgccaggttcaagcaattctcctgccccagcctcccgagtggctgggattataggcgtgcgccaccacactcggctgatttttgtatttttggtagagacggggtttcaccatgttggccaggctggtcttaaacgcctgacctcaggtgatctgcctgccttggcctcccaaagtgctgggattacaggtgtgagccaccatgcctagccccactttttagatttaatacttcttgcttccagaatgtgattttaaggaaaagaaaaataaataaataaatttaatacttctgagagacttctgcttctggaaaaaccgaattagatggtagtgagtttcttagttttttgccttatacatctcagacttggaactaaacaagccagcaaccatggtgaagaggctccttattactgctggggtgggggaatgggagttgcagctccctgtgtgacctccctggtacactagtggaggtggcctcattaccactggttaatgttcaaagtcctgactctgttaggcctcctctgaccccatcccaggggcaggggcttggcagggtttggaggccctggtttcctccctggccatctctgacagtattctggcagagacattacagcctccagaggattggttacattaagttggaaataaaatatataaactaaaaaaaagttatatatatgtgatcatatttttcaaggaataaagtagtatgggccgggcgtggtggctcacacctgtaatcccagcactttgggaggccaaggtgggaggataacttgaggccaggagtttgaaaccagcctgggcaacatagttagaaccccatctctattaaaagaaaaatagtagtatgtagatagaaaataaaaatgtagaagaataagtagcaaattaatggttcaagggtaagggaacgctgactttctctagtgtttcagtttttatttattttaaaaataatgaatataactgttagaagcagtgaagagtattttttaaaggcatacttttctcagatgctattgttagataactatatgttaatttttatggttactaatacaaaactgggtatagaataaacgtatcctggctcccagtgtaggatgctttccattgtatcacaatgccctcagtcagctgtagcaatagactgtattcagtgtagttcatactaaacagggtaattttgattctataattttgttgaaattgaattttatatttaacttggattaaaggagaaggtttttgacttgtgaattctagaaatttgaattttttgccaggcccagtggctcacacctgtaatgccaggactttgggaggctgaggtgggtggatcacttgagttcaggagtttgagatcagcctggccaacatggtgaaaccctgtctctaataaaaatacaaaaattgggccgggcggcgtggctcatgcctgtaatctgggcattttgggaggccgaggcgggtggatcacctgaggtcaggagttcgagaccagcctgaccgacatggtgaaacactgtctctaataaaaatacaaaaatcagctgggcatggttgtgggcacctgtaatccgagttactcgggaggttgaggcaggagaatcacttgaacctcggaggtggaggttgcagtgagccgagatcacaccattgcactccagcctgggtgacaagagtgaaactccatctcaaaaaaataaataaataaataaataagccagccatggtggtgggcgcctgtactcccagctgctcgggaggctgaggcaggagaatggcctgaacctgggaggtagaggttgcaatgagccgagatgacaccactgtactccagcctgggcaacagagcgagactccacctaattaaaaaaaaaaaaaaaaaaagaaatttgaatttttccacagttttactgtatatacataaattatacatatatatgtgcatgtgtgtatatatatgtatttatatgtatgtgtatatgtgtatgtgtgtgtatatatataatatatatattttaaatagtgacagagtcttgctctgttacccaggctggaatgtagtgctataatcatggctcgctgcagtcttgaactcctgggctccagtgatcctcctacctcagtctcctgaataactgggactataggagagtgccaccacactggctaattttctaatttttttagtagagatggggtattgctcggttgcccaggctgatctcaaactcctggtgtcaagtgatgctcctgctttggacttccaaagtgttgggattacgggcatgaactattgtgcgtggccttttctatactttaaaaattttcaaaaataaaaataaatatttcatctgactagtagctcccaattttctgatgctattaagactttggaaaaagttgttcatggtgacgatgacttttcttatttgacttgtcattagtggttagtaaaaaagggacttttttcaggtccgtcttgaagaatatgcatccttttatttatgtgtgcatgaaggaaagtgcttattaggcgtatgagatgtgtaacgagcttctgatatacctgaaacaaaagtaaattgagaaaatttgctagaaaattttagagaaaggaggcagtcacctgtgaaaggaaagaggcatttctgtcctgaccaggtcttcatgaactgttccgtattctgagattcttttgcccatgctcaaggactggctctgcagaccactgtaggagattatgtatggtgactgatctgtagccagtccccattcatctttagcctgcttttagtttaacgtgtttctaagttcctacatgtaatatctttattatgtctcgtttaccaacttaatgattttaacactgctttgacaggcagcttgggaaattttagttaattttatagattaagtggaggaggataaaggccttgagtcagactagttctttgtgtaccaaattactgttgtttttttttttttttcagtaaatctcaaatttggattatcaggctaattggaaaggtagtgtattaacattttcttgtctgtagtaaatccacttgtgtgttatcagtgttccatgctattaatggtcagtatcttcaaaaaggcaactttgggcaccagtttgttatatagtaggatgagttagtgctgtaaattgacttgggttctgagaatcaaatatcatcctaaccttcccacaccagtgtttcttaatgtatccagcaggcaggtgccttacttcagaatctccttgagtgcctataacaaaataaggattcctgggccccaacccgggagttctgctgaatcagaatctctagatatgaggccctggggtcttcattttaaatgttttccttaggttatttgtaatcacagtaaaatttaagaactaggccttttttaggaagtacatttttgtacaagttatatgtagtattaggaattaatatgattcattctgccctcaaattctgtgtatattttgttactgataaagaatgatcggattttttttttttcttaaaccaagctctgttgtaactgttccatgctgtctgattagggttctagaatcttcactataagcccactttttttgtttttgttttttaaactccctttacctctccattagtttaggaattaatgactttttactgatgtggcattttactgaaatgcttctgaattttttgagagttactttaggataatgaacagtacttttaccagcatctttgaatgacttattggagagttatttctggcactttccatggacgtcatagtcaacaggctgtgttgatctctagcaatgtcagaacgttctcttccagcattccagctctctttccttcccatctctccttttccttcagtccatctttcctttttaaacttggggctgattccatgtctttgctatcatgaatagtgctgcagtgaacatacatatgcatgtgtctttatggtagaatgatttatattcctttgggtatatacccagtaatgggattgctgagtcgaatggtagttctgtttttagctctttgaggaattgccacactgctttccacaatagtttaactaatttacactcccaccagcagcgtatagtgttcccttttctctacaactttgccagcatctgttttttttttttttttactttttgaaaatagccattctggtgtgaaatggtatctcactgtgcttttgatttgtttttctctaatgatcagtgatattgaactttttttcatatgcttgttgggccacatgtatgtcttcttttgaaaagtgtcttcatgtcggttgcccacattttaatggggttgttttatatttgtaattttgtttaagttccttatggatgctggatattagacctttgtcagatgcatattttgcaaatattttctcccattcaacctgcattctgtaggttgtctgtttactctgttgatagtttcttctgctgtgcggaaactcttaagtttaattagatcctgtttgtcaactttcgttgcaattgtttttggcatcttcgtcatgaaatctttgccagttcctatgtccagaatggcactgactaggttgtcttccagggtttttatagttttgggttttacatttaagtctttaatccatcttgagttgatttttgtgtatggtataaggaaggaatccaattttaatcttctgcatatggttagccagttatcccagcaccattgattgaatatggagtctttgacgttgcttgtttttgtcagctttgtcgaaaatcagatggttataggtgtgtggccttatttctgggctgtacttgagggtggaggatggaaggagggagaggatcagaaataactattgggctctaggctttgtacctgggtgatgaaataatctgtacaacaaactcctgtgacatgagtttacctgtataacaaacctgcacataatacccctgaacctaaaataaaagttaaaaacaatagcaacaaccaccttggggcatacatgatgggactataaaagatttgtaccactctgattttaggaaaatctacctcatcattgccattcattaagtaggattagaaataggttattataaatatatcttttgctattttcttgctctctgaaggaatgtgtacaacaggatatgggccgggtatggtggtgcatgcctgtagtttcagctactggggaggctgaggcgggagtatttcttaagtccacgaatttgaaactgcagtatgctgtgattgtgcctgtgagtaaccactgcacaccagcctgggaaacatagtaagatcctatctctaattgaaaaaaaaaataaaaaaaaaacaggatataggatatttatttttatttttgaaatggagtctcactttgtcgcccaggctggagtgcagtggcacgatctcggctcaccgcaacctccacctcccgggttcaagcaattctcctgtctcagccccccgggtagctgggatataggcatgcgccacaacgcctggctaatttttgtatttttcgtagagacggagtttcactatgttggtcaggctggtctcaaactcccgaccttgtgatctgcccgccttggcctcccaaagtgctgggattacaggagtcagccactgcgcccagccaggatatgggatgtttataatgaattttttttggaggcgggtacacctacaagtttccctttttactttgccttacgaagaatactgtctgatagaatgaaaaatgatttttacatttcagaaaacccataacagactttgcctttgccctgaggcaagggtttatgtaccccctaggaattactgttctgtccaacatagtagccattagtcatatgtggctatttaaattatgaaaacatattgtttatgttttaaattataaattgtagtcatgtgctgcatatgccaggggtctcaaaagattgtaatttgcttttattttttatttttattttttgagatggagtcttgctccttcgctaggctggagtgcagtggcacgatgtcggctcagtaaaatctctgcctcccgggttcaagcgattctcctgcctcagcctcgcaagtagctgggactgcaggcgcgtaccaccacgtccagctaattttttgtattttagtagaggtggggtttcaccatgttggccaggctggtctcaaactcctgacctcgtgatctgccctcctcggcctcccaaagtgctgggattacaggcgtgagccactgcacccagcttataattcgtatttttattctactttttctatgtttagatatgtcttgatgtacagatacttaccattatattccacttgcctacagtattcagtacagtaacatgctgtacaggtttgtagcctaggagcaataggctataccatgtagactaggtgtgtagtaggctatctcatctaggtttgtgtcagcataccctgtgatgcttgtaaaatgctagaatcgcctaacagcacatttttttcagaatgtgtccctgtcagtaagtgattcatgactgtaatttaaaataaatgaaacaaaaaaattcagttcacttgaactagccccattacatactccctagccacatattgctagtggctaccatattggacattggcaatatggatcatcgccatcatgcattaaattctcttgggcagtgctatactagactggtcatttttattttttattttatttatttatttattttttttttttgagacagagtctcgctctgtcgcccaggctggagtgcatggcacgatctcagcacactgcaacctctgtgtcccgggttcaagtgattctcctgcctcagccttttgagtagctgggactacaggcacccaccaccacacctggctaatttttttatttttagtagagatggggtttcaccatattggccaggctggtctcaaactcctgaccgtgtgatccacctgcctcagcctcccaaagtgctgggattacaggtgtgtgccaccacgcctggccctagactgatcatttttaagaaaagaaagaggctagcgctagctgggtgcagtggctcatgcctgtaatcccagcactttaggaggctgaggcaggtggatcacttgagcccaggagttcaagaccaacctggataacatggtgaaaccctgtctctactaaaactattaaaaattagccgggatggtggtacgtgcctgtagctccagctgcttgggaggctaagatgggaggtgaaggttgcagtgagctgagatcgcaccactgcactccagcctgggtgacagaaggagaccctgtctcaaaaaaagaaaaaaaaaaaaaaaggctaatgaaagaacaaaataataaagacccaaatttctactcttccttccacaatgtaacttttcctggcttcttgtactcttgattaaaattcagaaaaagttatgtcatgttgagtatcatcactttgaccttgtttttaatgtttaattctgttttccaggctggcagtgatggtgaaagcataggaaactgccccttttcccagaggctcttcatgattctttggctcaaaggagttgtatttagtgtgacgactgttgacctgaaaaggtaagacatggtcgcagtttgcaatcaacttaagctgaactatcttttcagtttgatcctattttcaccttgatggcacatattctctaaaggaaatatattgtattaaagttctgctggtttatggacaaacaacttgtatataactattttggacaagtcacgctgtcagtatactgcgtggctactcagtcttttttaggaacttttgtatgtttaccttaaatttcatgagtagcactaggagctaagtgttagtgtggatgcagtgaaatccttgacttcttttttccagtgtaaacatggagtcatgaagagctttctaagcagacatcatcttggccccaaatgtgttaagcatgtgatctttataatctggatcttcaaagacaaggatttttaggaggttgaataccgttgttgtcaatttcatttaatttatttttcagagaataacagtaattttctatagcattttagctataatgcaagtattttaatcatatttgtttaaatgtattgtaaaataagagcaattatctgtggcccggtgtctgttcttgctaagtgaagagttgtttgtaggtttctctcctggatgactttatggcttattttccatagtggagagggctgagaagagccgtgatgagtagaaagctctgttttattcaggaatgtctattcacctttagcaaacaggtctgaggtgaagaacattcatacatccccttccccaaaagatttaaatcaagggttaagaatagttgtattgctcttcctctccctctccccacggtgtccctctctttccacggtctccctctctttccacggtctccctctcatgcggagccgaagctggactgtactgccgccatctcggctcactgcaacctccctgcctgattctcctgcctcagcctgccgagtgcctgcgattgcaggcacgcgccgccacgcctgactggttttggtggagacggggtttcgctgtgttggccgggcaggtctccagcccctaaccgcgagtgatccgccagcctcggcctcccgaggtgccgggattgcagacggagtctggttcactcagtgctcaatggtgcccaggctggagtgcagtggcgtgatctcggctcgctgcaacctccacctcccagccgtctgccttggcctcccaaagtgccgagattgcagcctctgcccggccgccaccccatctgggaagtgaggagtgtctctgcctggccgcgcatcgtctgggatgtgaggagcccctctgcctggctgcctagtctggaaagtgaggagcgtctccgcctggccgccatcccatctaggaagtgaggagcggcgcctcttcccggctgccatcacatctaggaagtgaggagcgtctctgcccggccgcccatcgtctgagatgtggggagcgcctctgccccgcctccccatctgggatgtgaggagcgcctctgcccggccgcaaccccgtctgggaggtgaggagcgtctctgtccggccgccccgtctgagaagtgaggagaccctctgcctggcaaccaccccgtctgagaagtgaggaagcccctccgcccggcagctgccccgtctgagaagtgaggagcctctccacccggcagccaccccatctgggaagtgaggagcgtctccgcccggcagcccccccatctgggaagtgaggagcgtctccgcccggccagccgccccgtcggggagggaggtgggggggtcagccccccgcccggccagccgccccgtcggggagggaggtggggggggtcagcccccccgcccggccagccgccccgtccgggagggaggtgggggggtcagccccccgcccggccagccgccccgtccgggagggaggtgggggggtcagccccctgcccggccagctgccccgtctgggaggtgaggggcgcctctgcccggccgcccctactgggaagtgaggagcccctctgcccggccagccgccccgtccgggagggaggtggggggggtcagccccccgcccggccagccaccccgtccgggggggggggtcagcccccccacctggccagccgccccgtctgggaggtgaggggcgcctctgcccggccgcccctactgggaagtgaggagcccctctgcccggccagccgccccgtccgggagggaggtgggggggtcagccccctgcccggccagctgccccgtctgggaggtgaggggcgcctctgcccggccgcccctactgggaagtgaggagcccctctgcccggccagccgccccgtccgggagggaggtggggggggtcagccccccgcccggccagccaccccgtccgggggggggggtcagcccccccacctggccagccgccccgtctgggaggtgaggggcgcctctgcccggccgcccctactgggaagtgaggagcccctctgcccggccagccgccccgtccgggagggaggtgggggggtcagccccccacccggccagccgccccgtccgggagggaggtgggggggtcagcccccagcctggccagctgccccgtctgggagggaggtggaggggtcagccccctgcccggccagccgccccgtccgggaggtgaggggcgcctctgcccggccgcccctactgggaagtgaggagcccctctgcctggccaccaccccgtctgggaggtgtgcccaacagttcattgagaatgggccaggatgacaatggcggctttgtggaatagaaaggcgggaaaggtggggagaagattgagaaatcggatggttgccgtgtctgtgtagaaagaagtagacatgggagacttttcattttgttctgcactaagaaaaattcttctgccttgggatcttgttggtctgtgaccttacccccaaccctgtgctctctgaaacgtgtgctgtgtccactcagggttaaatggattaagggtggtgcaagatgtgctttgctaaacagatgcttgaaggcagcatgctcgttaagagtcatcaccactccctaatctcaagtaatcagggacaaacactgcggaaggccgcagggtcctctgcctaggaaaaccagagacctttgttcacttgtttatctgctgaccttccctccactattgtcccatgaccctgccaaatccccctctgtgagaaacacccaagaattatcaataaaaaaataaattaaaaaaaaaaaaaagaatagttgtattaatgggaaaaactagggtttggcagtggattcctcttgatgcaagtgtcacaacatgatttgctattatactgatttttaaaactattagtctgttctcacattgctataaagaactacctgagactgggtaattcataaagaaaagaggtttaattgactggcagttctgcaggttgtacaggaaacttgtctggggaggcctcaggagacttacaagtatgatagaagtcaaaggggaagcagacatgtctttcatggccggagaaggaagaagagagaagggggaggtgttacatatttttaaacaaccagatcttgtgagaactcactctctgtcacaggaacagcaagggaagtctgcccttgtgatccagtcacctcccacaaggcccctcttccaccattgaaaattacaatttgatatgagatttgggcaaggacagaaatttaaaccatattatatatcaagtcatgaacagtgtccaggaaaagatattgacagcctatcacttgataaagtggcagaattaatctatgttatccctctgagcatcacatgctgatagttacctgagagctataattccattccaagttctaggttagtgtactcagatttctgtcattcccttaaaatacatttttacttactgctagtgcatatatttgaaattttacagactttaaaatttattgaacataagccataaagtcatcaaggaacccctttagttatgtatataaatgtagaaataagcctttgggaatagtgagttaaaactacaagctcttgggaagacattaccttattcatgttgggcagagatgtaagaatgaaataagtcatgtagttacccttctattactgttttttttttatacatgtgtacacaaagcaagtttcccaatataactcctaaaaatagagtgtgccaccaggcacacacccttactgtgtcctaaaatacatgaatttctcctattccatttttggcttggagcaagtgagttgactgccattctttgaaaaagctgtcattgaatagtttaatacagtgctttaattgtgatacataccagtaatagtgccataaacatgggaatctgggtcagaaaaggaagtaaacccattatagctatttcagagttgtctgtttcttttcatttgcagattttttaaaggcattattcctataggttgattgatatttgcagatttgtatatatatgttaaagtgtgtatgtggaaatatgtgtaagtgtatatgttaagtgtttatatatataaaaagtggcgcatgggaggtaggcattcagggccttataattagaaaatatcaaagaagatatatgtttattacctagggctttatgtaaaatcaatggtagagagcacttaaaattgaagcttatattttttggtctttaacaatcataggtctccagtaaatataaaaaatgcttcttagggcaactaaaactaagcaagtagtacgtgataatgagtctgtaccatccctaccccctagtcatcaacttccccttcagagagataatttattttaggtttggtctttattcttccaaatcttttccttttttctttttcttttttttttttttttgagacacggtctgcctctgtcaccgaggctggagtgcagtggcacgatcacagcttactctgtagccttgagctcctgggctcaagtaatcctccagcctcagcctcccaagtagctaggactacaggcatttactgccatacctggctaattttttatttttaagagacagggtctccctgtgttgcccaggctggtcttgaactcctgggctcaagcagtcctctggccttggtctcccaaagtgctgggattacagactttagccactgtgcctggcctcgtccaaatcttttctatgagtttacacacttgcagtcttgaacaaaattttaaagagaaagtacctcaagaaagtgagcattggttcaaaaaacaaaaacaaacaacccaccagtatatatgaaagttatcacagaggaataaaacatccctgtagtacttttcataatatattcttaatcttaaaacattaaatgtgactctttttagaaatcttgggggagaaaatatgcctacagtgcttattttcctgcttttcctggtaattgcctaatatcttggtgagaagtactgactccagaacaaaccagtggagaacaatagaactcctctgagagttacttagcagctcactctatgatttgaaaaaaatgattgttacatgacatttcatccataagaacaagcccatttctagttctggcactgtatgacatgttctctttgaatctcagttggcattaatgactatgctggtagtattcatgtgtcccttgtgaggctgtgaacaatctcccattacttgcctgccagagcagccttcgtgctttggtgggagtcatttccaaatctaattttctgttcatattgcaatttaaagaacgtttagatagaaaaaaaagggcccaggcttcacaaagaatttcaatttacatcaacgatttgaacaaaagcttcagataatataagtgaaaatactaaaattggggcagagttaaagatgttctggcatgtcatcagttgggaaacaaccatggcatagtatagaaaatttcaggagtgagacctagctgtgtatggagagagctctatcactgatttcactgggacctggggcgagctgcctcatcttccttggagttagttaccttatatttaaaatcaggagaaaagggaaaaaaacttcacttttgtaatagtttaaaatgttacaatggaactatgaaactgatagttctgcatatcttaaaaggcagttagaaactcagaaaaaaatctgattcccaaatagactcttcagatagttttatcttcatgatcatgtctctgtggttccacctttctgaaaacagtcttcagtaacttaagaaatcatttcaacttccatgatcttcagtagcagcagcatgaatgacacatgccaagagactaaatggaatgagataagcctgtctttcagagacatcatctatttcctgctgctgtccagacaggaaagtcagactccatttttcccctttgtaaagttgacttgagctacatgaagcacttgttagaacagtccaattcaagataattgtgctttatgactgcattcagaatcacatgtgtacccactgtgtgtgtggggggtgtgtgtatgtgtgtgcatgtgtgtgggtgggtgggtggagggggtgtgtgtgggtaggtgggtggtgggggtgtgtgtgtatgtgtgggtgggtgggtggtggggtgtgtgtaggtgggttggagtgtgtgggttgagggtgtgtgtgtatgtgggtgggtggggggatgtgtgtatgtgggtgggtggggggatgtgtgtacgtgggtgggtggggatgtgtgtgtgtgtgtgattgagaggggagggagatatagacacacagagagggagtattttgttgctatgtctttatgttcttttttaagacgatttcaaagatgatacatcctgttgaggctgctaagagctgaattaatagaattattagtgaatgtttttctaaacctgttatcagtatacactttactcctaaactgttatcaagatggtaaaaattatagactctatatttgggccaggcaaagtggctcactcttgtaatcccagcgctttgagaggccggggcaggtgatcacttgaggtcaggagttcaagaccaccctggccaacatggtgaaatcctgtctctactaaaaatacaaaaattagtcgggcatggtggtgagtgccttagtcccagctactcaggaggctgaggcaggagaattgcttgaatccgggaggtggaggcaaatcacgccactgcactctagcctgggcaacagagtgagactccatgtcaaaaaaaaaaaaaaaaaaacacaaaaacaaagacaaacgaattatggaatccatatttgaaatcttttcatgggtactattttttttgaagtattcctccacagattgacaataaaattgacattaaaagtagacagattaacaatatttaatccaaatcagtaaaattctttaactggttgaactgggacaaagacaaattcttagtgacaaggggtcttggtgtgtgtgttttgttgagtccatgattaatttgttcaattagtgacttgactatcagtcaaaccagaatatagcaaatctagtaaagaataattaatagtagtaaagcgttctgaaacaaataattctggttctctggtgttaacttttgtgaggttttttgttgttgttgttatatgtttatatagtgtccagtagtgtctttgatatgtgtgaattaattttatgccctgaaaatcagcaccttcaaaaaggaactcgatttttttttgttattgttctctttctggagaaaaaaggagctccatttaaaagataaggcctacatacctagtacttttttcttcgttgggcaagtcaacttgttacagatgggtcatcttcaagagccagctccggtgttctctagctatgctgcactcatttcataccaagcagctggaactgagtcaccagcccagcttcctccaattgttgcaattgtactgaactacattttaatagaaattaagccactcaagtctcttaaaatattagctcctataggattcctccttttcattcgtttcttttccttttggtttttgtttttatttccttttcttcatctagaaaaaaaatgggaaacaacagaataatttatttcatctgaaagactaccatgatacatgagggtaaaaataatacaccccaaaacactggagaatatttgcaccctgttgcaaggcatgagttctgtgcactttgctcttgatgtcacgtaagggaaatatttgaatgagttttaatcaagtgttgagtatttactgaaggcctttttggaagtaaaccaaagatgtcttgaaattttttgccattgcctattggctcagtttcatttatctcaaactgcaattcttacagtgttacatttctgtgaaacatctgtaaaatgagcctttgtgggtcaaacagaacacctgaggcctgagagggcaggtgagaactgcaagttgaagaatcttagattctgttttgttgatacatagcttgtgagtgaatcagattactgtttagaacttgtccatttatttgaagtctactaatacgtttgaaggcactaaagtttcttctcagattcttcatttggaatcaggacctgccatggttgtctgtcatctcaacagttaatccttggaaacagttttatcgctttatttatttaaaaaaatatatatatagcctttcaaccaaaacaagatagactattcactaatcacaaatattaatggaaaattggtaatcatatgtcctttaaactttccttggttgtatatatgactctaaattaatcagattttgtttattaccaatcagttaatgctaggtaaccatttatgaaccatcagctctattaaagttaaaactgccaatctgatttcctgcataatgctttgttaatatgatactaaaagtggtaatggctttcatttgcatacttttagttcactttcacgtgccttatttgatttaatctttacagacaaagcagatcttataaagaggaaatccagacccaaagaggttgtaatttacttagtcatgtagctggtaaatggtagagcttttccatttgggacttcaagccagtcccttttcttcagccttggttcttttttctctgatacgctagttttctccctctcccaataaatatttttatttgggagccgggtgcagtggcgtgctctctagtcccagctacttgcagctgaggatcatttgagaccaggagtttgaggacagcctgggcaacatagcaagagagagagacccccatctctaaaaaaaaagaaaattgaataaaaatttaaaaaattaagaatctttctgtttagagagcttaaaaactttcataattaattatagaagtaataggtgttatttattttgtcccacatgccctacccgacctacccctttgggtttgttttttttttttaaagcattgagactgttacaaataaatttttggtgctgcaaaagaaataacacttgaatataaaattttctttttaattctcagcaaggcaagttacttctatagaagggtgcgctcttacacatggagcaatggtgagcacacacttggataaggtaggggaaggggtttttatccctgactcacgtggcccctgctgctgtgtctttcccctattggctagggttagaccgcacagactaaagtaattctgattggctaatttaaagagagtcaccgggtgagtggtttggccagaaaaatggttatgacagagcaggtaattggaatgagtcagggtggagcaggtaatcgaaaatggtcactttatgaggaagttaaatttaaaagcagaaggtgaggaattgaacatactgacatattgattatttgaaaagaaatttagaactcatatctaacaagaccttcttcccctttatctaatctaccgtgttcttaaaaaaaactgtttgtgaaaaacagacttatattattaacttacagttaggcatttaattgactgttcattataaaaatgttaatggatatgttttatgaatttggagtgagaaaattgttttccaggtaatcacaatttatatatgacaagattaaaaaacattccttttttttttttttgagatggaattttgctcttgttgcccaggctggaatgcaatggcacaatctcagctcactgcaaccttcacctcccggattcaagcaattctccttcctcagcctcctaactgggattacaggcgtgcgccactatgcctggctaattttgtatttttagtagagatggtgtttcgccatgttggccaggctgggctggaactcctgacctcagctgatccgcccgccttggcctgccaaggtgctgagattatagacatgagccactgtgcccggtctacagtcatctcttggtatccatgggggattggttcaaggacccctggtggataccaaaatccacagatgctcaagtttcttatataaaatggaatagtatttgcatattaacctacaaatagcctcccatatactttaaatcatctctaggttataatacctaatacagtgtaaatgctatgtaagttgtcattacactgtgtttagggaataatgacaagaaaaagtctgtacatgttcagtacaactgcaaccgcccccgcccccgccctgccgcccttttttttgagacagggtctcattctgtcgcccaggctggagtacagtgtgtgatcatggctcgcctcagccttccaagtagtatgtgcaacacgcctggctaatttttgtattttttgtagagatgggagatctatctatctatctataaaattttttttttttttttgagatggagtctcactctgtcacccaggctggagtgcagtggcgcgatctcggctcactgcaacctccgcctctcgggttcaagcgattctcctgccttagcctcccaagtagctaggactacaggcacccaccaccacgcctgactaattttttttatttttagtagagacagggtttcacaatgtcggccaggctggtctcaaactcccgacctcaagtgatctgcatgcctcggcctcccaaagtgttgggattacagacgtgagccactgcacatggccttttaaaaaatatttttgatcctcagttggttgaatccacagatgctgaacccatgaataaggagggctgacttatttcattttgtgaaaaacttgagcttgtcagactaaagaatgttcagtgaaagcatcagagttgaaaatcaaatcaggttttgacttttaaaagtcctcttttggaggttaggttcttacagaagttgataggaaatatgtcttatttttctttgtttaggaagcaagataggctctagaacttggactttgagttaaaaattttaaattaatgagataattaaataaatctttgtttctttggttggaatgtagtcatagaaacctgaggctttctaacctaaattgaaagatggagccagagagagaatatgaataagaccaagggaaattgatagattataaactggttatagatttttgattcccctctatcttgaaaattctgatgacgaagtatttcactttcatgatatatttaaaaatactatttttggagacagagtctcactctgtcgcccaggctgaagtgcagtggtgcaatctcagctcactgtaacctccgccttccagcaattctgcctcagcctcccgagtagctgggactataggcatgcactactacacccagctaatttttatatttttagtagagatggggtttcatcatgttgcccaggttggtctcaaactcctgacctcaggtgatccacccgcttcggcctcacaaagtgctgggattacaagcatgagccaccatgcccagccaatattctttattttattcaaattctgtgcatttatggtcaggaaggaaggaagaaggaaggcaggcaggctaacttaataacaagataaacagctctgggctataataggaggcagaaacattctttgaaactatatgttgttgtattacttttcttgaagtacacatttttatgtttgcttttataattatgaaagttttcaaacatgcataagaatagaataaacttctccgtaaacccaattcagttatcaagatcttgccacatttgctttgccccttttttctgattttctttgctgaaatgttttaaagtaaatgctagacatcatgtcgtttcatccctacttaattcagtgtatgtcttcaaacaatgtggacattttcttccctaaccacaatgctctgatctcctgaagttcctagtatacaatttgggatttccctggttatctctaaaatatctttttatttttggttggtttgttcaaatcagtatccaagtaatttctactttttatgtttgattgttatatctcttaagtttttcttaatctataacagtcccccacctgtgtctggtaaaaataccattcagctgaaaggtagattgtcccaaatccagaatttagcagttgcttccttgtggtagcatttaactttgtcctctcattttccccctccctgcatttcctgtaaataatctcaggacccctttgtactcttaaattattgaaggcctcaaacagctttcagttatgtgggttatatctacctattttactatattagaaattaaagttgagaaattagcctaggcaatatggtgagatcctcatctctacaaaaaattttttaaaaattagctgggcttgatggagtgtgcctctggtcccagctgcttgggaggctgaggtaggagaattgcttgagcctaggaaatcaaggctgcagggaaccatgattgtgacactgcactcctgctttggtgactggtctcaaaaaaaaaaaatcctgagaaattttaaaaatgtttatttatggccgggtacggtggctcacacctgtaatcccagcactttgggaggccgaggtgggcggatcatgaggtcaggagaccatcctgactaacatggtgaaaccctgtctctactaaaaaatacatcaaaaattagctgggcttggtgtgcgcctgtagtcccagctacttgggaggctgaggcaggagaatggcgtgaacttgggagatggagcttgtagtgagccgagatcgcaccactgcacttcagcctgggcgacagagtgagactctgtctcaggaaaaaaaaaaaaaatcatttactaattcattaaatatagaacaataatgaacccactacttattaccataaaacatttttaatgtaaaacaactatatttcccaaaacaaaaaatagtgagaagagtggcattcttttacatttttgcacatcttagaagaggtttctcgtgtctgcttctgcattcattaccttgtgatatcttgtaccaagtagccaagtaaatttggaaaattttactatatgtgcacgagaggagaatgagagtgaaaaaggcaaatgatgccttagtattataagaatagttctgacctaatggatcacctggtgaaagggtctcctggcttacaatttgagaaacagctgccccagaggctgctttgttttggtttgttgttgttgttgttttgagacagggtctcactctgttgcccaggctgaagtgcagtgatatgatcactgttcactgcagcctcgaccgcctgggctcaaccaatcctcccatctcagcctcccaagtagctgggactacaggcacatgccaccacacccagctaattaaaaaaaatttttttatagagatgggatctcactatgttgcccaggctggtctcgcttgaactcctggactcaagcaatcctcctgccttggcctctcaaagtgctaatgttacaggtatgagccactgcacccagcctgccccagaggcttgattagattcagggtcaacttctttggtaagaatacttcatggtgccataggaaacacaccatatctggtcatctcattttttgatcctaaaattcattggtgggtttgggtgagccattttgcttttttaacaagatagtacaaacacttcttgctgttagtagttgtcagcataacagtttcaccatctttatcagtgttttgtggtgttttcaatttttcctaatcaacaggaggaagacatcttattgtttacttttaaattccctttatagttgtgctattttacatttttctgtgtgttcacttgttttatctgtctctcatcaatttcttttgacccatacctatttgatttttttgatgacctttggaatgaatttggacaaaatccttaggtaatgtagattttaagcttttctcactcagtactttgtccattctttgttgctttttacccttcattatgccatcttttatgtattgaagtaattttgatattagatagtctaatctggtgatccttttccttgtcaagcctggacttctagaataatgggaaagaaatagcaccagaatttggaatcttttgaagttgaagatgactgcaggattcagctgcttttctcttttattttgccaaaaagaaaaaaaaaggcctagggaagtcatgacttacccatctttacacaattagttggggccagagttgaaaccagacactaactctccaaaatcttttttccctcctcattctatcactatctctaatgagtgacttagttaatttggaatgagaatgatggattttgtattttggttaaaaaaaaaatcaaagcattttcttaccataaattatgtattttgtggaggcttgcttcttattagaatactattacagctattatatctagtggaaaagtactatttctttcttttttttgagacagagtattgctctgtcaccaggctggagtgcagtggtgcgatcttggctcactgtaacctccgcctcccgggttcaagtggttctccttcctcagcctcccaagtagctggaactacaggtgcatgccaccatgcccagctaatttttatatttttagcagagacggagtttcaccatgttggccaggagggtctcaatctcttgacctcatgatctgcccaccttggcctcccaaaatgctgggattagaggcgtgagccaccacacctggttgaaaaatacctttctttctttctttctttctttttttttttttttaagatggagtcttgctctgtcgcccaggctggagtgctgtggtgagatctctgctgactgcagcctctgcttccgggattcaagcgattctcctgcctcagcctcctgagtagctgggattacaggcacatgccaccacgcccaattaacttttgtatttttagtagagatggggtttcaccatgttggtcaggctggtctcaaacttctgacctcgtgatcctcctgccttggcctcccaaagtgctgggattacagccgtgagccaccgtgcccggctgaaaaataccatttcttattcagttttatatactttaaattttagaaccactttgatctcttttctttttctttttctctttttctttttcttttctgacagggttttactctgtcacctaggctggagtgcagtggtacattctcagctcactgcaacctccgcctcccgggttcaagtgatcctccttcctcagcctcccaagtagctggaactacaggtgcgcaccaccatgcccagctaatttttatatttttagcagagatggggtttcaccatgctggccaagctggtctcaaactcctgacctcaggtgatccacccgcctcggcctcccaaagggctgggattacagacatgagccaccatgcccggacaatttatttattttctttttgagacagggtctctctgtcgcccaggctggagtgcagtggtgcgatcatggctcactccagcctcaacttcccaggctcaagtgatccttccacctcagcctccctggtagctggtactatagacacgcaccaccatgcctggctaattttttatgttttgtggagacaggatcttaccatgttgcccaggctgggtctcaaactcctgggctaagcagtgtcccacctcagcctcctgtagtgctacgactacagacgcaagccaccgtgcctggccaactttgagaatttaaagtattattgttgtttaagagtaaaaaatgatctgattttgaccaatattttgcccaacaggaagccagcagacctgcagaacttggctcccgggacccacccaccatttataactttcaacagtgaagtcaaaacggatgtaaataagattgaggaatttcttgaagaagtcttatgccctcccaagtgagtatcaaggaaaatacgtatgaaaatattgtcacttctttgaagcttgtgttatttgtcagtagagatctttctcgcagcattaatttggaatgactaggactctcttctatgtttcttataattaatgctacacagatataagaattggcttccagctaggccaatcagccatactaagaaaggtggggatttgtctaagctgtagaatatgtggtagaaacagatttgggatgtgtctgataggtcaggaaagactggttatttgtggactgtaggtctcaaactgagagagaagtttaaagaggagaaggggtggggaaagacacattccaactgaacccagtaagaatgtcttagcaggagtgtggcacaggactgcaatgagatttgatttcagttcattttaaaggtaactttctaaagctataatccaaggacattgacttttccgactgtgtccctaggattcagagtttttatttacttacttctttgaggtgttccagatctctaggtcctggatgtactgtaatgatagttacctaaattgcagatatgcagctttgcatcatactgtaatattggcatagattcaaagcattatttgtttcttttaggcttttccagtttcattatcctgaaaattgacatgttttgtttctactgaccaaaacctttcttactggttaacttgactgttgccctccatgtccagatatattttccaggaatgggattattgagatggagggttctaaaataattataggcataccctgaagggtatggttccagaccattgcgagttaggttccagaccacagtgataaaatgaatattggaataaaatgagtcacgtgaaatttttcgtttcccagtgcatgtaaaagttatatttacagtagtatactgtagtgttttaagtgtgcaataatagcattatgtctgaaaatattgcatgtaccttaatttaaaaatacttcattgctaggctgggtgtggtggctcatgcctgtaatcccagcactttgggaggctgaggcggatggatcacctgaggttgggagttcgagaccagtctgaccaacatgaagaaaccccgtctctactaaaaaatacaaaaaaaattagctgggcgtggtggcaggcacctgtaatcccagctactcgggaggctgaggcaggagaattgcttgaaccagggaggcagaggttgtagtgagccaagatcgtgccactgcactccagcctgggtgacaaaagcaaaactccgtctcaaaaaaaaatcattgctaaaaaatgctaatggttatctgagccttcagcgagtcaatctttttgccgatggagggtcttgccttgatgtagctggctactgaccgatcagaatggtgattgctggttggggtggctgtggcaatttcttgaagtaagataacaatgaatttttctacattgatggactcttcctttcatgaaagatttctctgtaacatgcaatagtgtttgatagcatttaaaaattttaaagtaaatattctttgcctgaggctaatctcaagaggtcctgagaacatgcacccctgtttgatagtgtttttacccacagtagaacctttttcaaaattagaatccatcttctgaaaccctcctgctgttttaacaactaagtcgatgtaatattctaaattccttgttgtcatttcaacaatgttcttagcatcttcactaggtatacattctatctcaagaaaccattttctttgctcatcataagaagcaactcctcatccattcaaattttattatgaaggtagaacaatttgattacattttcaggctccagttctaattctagttctcttgctattttcaacacatatgtagttcctccctccactgatgtcttgaacctgtgaatgtcgtccatgagggttagaatccacttcctccaaactcctgttaatgttgctattttgacctcctcccatgaatcatgaatgttcgtgttttttttttttttttttttttggacggagttttcgttcttatcgcccaggctggagtgcagtgatgcgatctcggctcactgcaacctccacctcccaggttcaagcaattctcctgcttcagcctcctgagtagctgggattacaggtgcctgccgccatgaccagctaatttttttgtattttttagtagagttggggttttgccattttggccaggctggtcttgaactcctgacctcagatgatccgcccgtctcggcctcccaaagtgctgggattacaggtgtggtatgagccaccagacctggctgaatgttcttaattgcatctagaaaggtaaatcttttccaggtcactttgctttgctcagatccatcagaggaatcactttctatggccttatgaaatgtgtttattaaataataagacttgaaagtcaaaatttatggactgcagaatggatgttgtgttagcaggcatgaaaacaaccatgatctccctgtatatctctatcagagttctggggggactagtgcattgtcaatgagcagtaatatttagaaaggaatctttttttcctgggcagtgggtctcaacagtgggcttaaaatatttagtaaaccatactgtgaacagatggatgtgccattatccaggctttattgttccatttatagagcatctgtagagtagcttcagtataattcttaagggttcttcaaattttggaatggaagatgagcatgggtttcaacctaatgtcaacagctggattagactcttaacagagtcagcctgtcctttgaagatttgaaaccagacgttgactttttctctgtagctatgaaaatcatagatgacatctttcaatagaaggttttgtctgcattaaaaatctgtttagtgtagccaccttcatcaatgatctatctagaagatcaattctagatagatcattgttgaaggtagatcagattttctagatagatcatcagatgaaggtgatgaaggaagatctagatagatcagctagatcttctagatagatcagctagatcttctagatagatcagctagatcttctagataactggctgcatgcagcttctgcataagcatttgctgcttcatgttttacttttatgttacaaagatggcctctttccttaaacctcacgaaccaacctctgctaccttcaaactttcttctgtagatttgtcacctctctctgccttgatagaactgaagtgagttagggccttgatctggattaggttttggcttaagggaatgctgtggctggtttgattatctggaccactcaaactttctccctattggcaataaagctgtttttctctatcatttgtgtgttcactggaatagcactattaaatttccttcaagaacttttcttctgtatatgctgtttggctgtttggtggaagaagtctagctttcagcctatctcagcttttggcctgtctcagctttcgacatgctttcctcactaagcagaatcatttctagcttttgatttaaagtgagagatatgtgactcttcccttcacctgaacactgagaggtcattgtagggtcatcaactgtgggctaatttcaacattattttgtctcagggagcaggaaggcctgaggagagggaaagacaggggaacagcaatcactggagcagtcagaacacatatgatattaatcagttaagtgtgctgtcttatatgggtgtggtttgtggtgcccccaaaacaattacaagagtaacatcagagatcactaatcacagatcatcataacagatacaataataatgaaaagttttgaaatattgcgaaaaataccacagtgtgacagagacatgaagtgagcacatgctgctgggaaaaatggcgccatcttgcttgactcagggtgccataaaccttcaatttgtaaaaaacgtaatatctgcaaagcacaatgaagcaaagctcaataaagcaaagcacaataagacaagttatacctgaagttactcaatttggtttttttttgtttgttttgttttttttgagacagaggctcactctgtcacccaggctggagtgcagtggcacaatcttggctcactacaacctctgcctcctgggttcaagtgattcttgtgcttcagcctcccaagtagctgggattacaggcacctgccaccatgcctggctaatttttgtatttttagtggagatggggttccaccatgttggccaggcttgtctcgaaatcctgacctcaaggtatccgcccacctcggcctctcaaagtgctgggattacaggtgtgagccactgtacctggcccagttactcagtattcatccattcatttatttattgatttattcattctgcaaagcattaatggactacaaagcactgtgaatatattagtaaataaaacacagttcttgccctcaacaagtacagtcatgtatgggtggagaggtgtttatggtggtgggacggggaagtgaatggaatcaggaaaggctttagagaagagagaacacttgaactgtcttaatttaaaaaaaaaaaaagaaaaaagatgttcagcagttgaacaaaggagtgacaggtattccagagcagaagagtcattttaaatcaatagtataaacatatatgttatacacatactatacagaaatagtatgtaatgtatattattattaatattatatgtatatttgggggagacttggagtggctggaatgtgatgtgcatggttgggatggtaggcaggaaggctgatgagcaacaacacctctgtctataactagcttctcatctgttgtgagcagaattgccctctggttaacaatcttgtgctaagcctaatattttattttcttaattctttttttctactaaaattctacaagcctatcctctactatccttcctgcccttctaagagcctggagcttctttttttctctaccttcccaggagtcctaaccttcctttcatccccagtaaagtatctccagaccaacattaagaaaaccatgtcttgatttttccttcaggccatgcatataattagaatgccaataaatcaaagctaggatatttgtgaatataaattgaagctttatacgtctcagtagggtactattgtgaacatgaattcaacttagtggaaataactttttttttttttttgagacggagtttcacttttgttgcccaggctggagtgcaatggcatgatcttggctcactgcaacctctgcctgtcaggttcaggagattctcctgccttagcctcccaagtagctagaattacaggcgtccaccactatgcccagctaattttttctgtttttagtagagatgggatttcaccatgttggccaggctggtctcgaactctggacctcaggtgatccacccgcctcggcctcccagagtgctgggattacaggcatgagccaccgcgcctgaccataactttttttcttttttttttgacagagtctctctgtcgcccaggctggagtgcagtggcacaatctcgactcactgcaacctccgcctcctgggttcaagcgattctcctgcctcagtctcttgaatagctgggattacaggtgcccgccaccatgccctgctaattttttttgtatttttagtagagacagggttttaccatattggccaagctgctcttgaactcctgaccttgtgacctgcccacctcagcctcccaaagtgctgggattacaggcatgagctaccgcgcccagccatacttcaaaaaaaaaaaaaaagtatgtatatatatatgtatatatatatatatatagacagtatcttgtactgtcgcccaggctggagtgcagtgttgctgtcctggctcactgcaaccttgaactcctagcctcctgcctaggatgatcctcctgcctcagccttccaaataagtgggaccacaggcatgcaccctatgtcccacttctaggtccctttttggtctttttttttttttttttttttttttgagacatggtcttgctctgttgcccaggctggagtgcagtggtgtgattatggctcaccacagcctcgacctcctgggctcaagcaattcccctgaggcactgggagtacaggtgtgtgccaccatgcccagctaagtttaaaaaaatttttgtagagatggggtcttgctatgttgcccaggttggtctcaaactcatggacacaatcagtcctcctgcctcagcctcccaaattgctgggattacacatgtaagctgtcatgactggtccctttttagtcttaaaagtgtcagctcagaggtaggttccatatttgccaacttgctctcagacactaactgaaaatgatcttcctctcatgtcactgtagatcattgtatcaacattaaattataaatggagaagtagtttgaattattattcattctctatgaaggaaactattttgttttaaagtattgtctgaagtgcttattatataaattcttccaagtatatataagtttttaaaattagtgtgctgaaaacatacatatgactttagttaaatggacatttcctcatattctcttacatccttcagcaacaacaacaatgaagacttttgggctgggcgcggtggctcatgcctgtaatcccagcactttgggagactgaggcgggtggatgacttgagctcaggagttcaagaccagcctgggcaacatggtgaaaccctgtctctacaaaaaaatacaaaaattagctggatatggtggcaagtgcctgtagtcccagctactggggagcctgaggtgggaggattgcttgggcctgggaggcagaggttgcagtgagctgagatcatgccactgcattccagcctgcacgatacagcaagaccctgtctcaaaaaagaagaaggaaaaaaaaaaagaattttcattattcttgctcatttctctctgagggaaagtgacattaagagaaatagtaaagttaatatggaatattctggattcttagcatctaatgctctgtaagacatcatagctttaaattggaccttgaaaacaaacattttcatattgcttttttatataaaaattctagccccattatatttgagcatattcatagaaacattgtaaccagagatggtctttttcattcagtttaaatacataggaatctttgtgttataaatgttcatagtgtgccaaatcccctgtaggggtaaaaatttttacttcttctttgttttttctttgttttgttctgtttttgtttagagacagggtctcactccttgctctgtcacccaggctggaatgcggtggtgcaatcttacctcactgcagcctcaacctcccaggctcataatcctcctgcctcagcctcttgagtagctgggagtacaggtgcacaccaccacgcctggctaatttttgtattttttttgttgagagtaagatcactttcaattggagtctgagaacagggtctcgccgtgttacccaagctgtggccttgaactcctgggctcaagccatctgcccacctcagcctcccaaagtgctgggattacaggcgtgagccaccgtgcctggccagggattgtttttgatgctgcttatccctctgctgttattaataacactcaagtactaattatgcaccatgcattgtgctttgtgggttattttgtggattatctctgttaatcctcacaaagactttgtgaagaaactgaagatgtaatccaaataatttgtccaaggtttcacagttaatggtggcagagcagggatacttttgaagccacatcaatatgacttcaaaaatctgtgtttcatctgttctctgctttctgcttcttattttattgggtttggcttttgtaaaagagggaaaatgttaagtctttaattgggattgtgctttaatgagtacaaaattgaaagctagctcaagtttagaggaaaggtaggagagaaatcaaagatagtttacttgactgtgaacaagtgggaccaaaggtggttattaaacttaattcagtgaattctttttttttttttttttttttttttgaggcagagccttgctgtgtcgcccaggctggagtgcagtggcagcatcttggctcattgcaacctccacttgccaggttgaagcaattctcctgcctcagcctcctgagtagctgggattacagatgtgcaccaccacgcctggctaatttttgtatttttagtagagacggggtttcaccatgttggccaggctgggacttcaagtgatccgacctccttggcctcccaaagtgctgggattacaggtgtgagccacagtgcctgcccttacttaattcagtgaatgctttgaaaaagcaggtgaatcttaactcttctgatgaatttttatttatttgtatgcattgaaacagcatgtttgaagtgggaatgtcgccttcttagtgggctctatggacccagaatgtgaaatgctaattaattagcataattttcatcatgcagaattgtttctaggggatgagtgggaggaggaagagtttctgggatcacaagctgcatttattttccttccctctattgtgctatattgttctagggcacccagggaccattctgtctcactgccttttccttccagaacaaggaggtctcaggtctttattgctagtcttcttcaggctctgcttgtaagactgtttctaaataggataaggagaaaaaggagaagaattgtgcaagcttgtagactggaatctagcatttctaataacatgtttttgtcatttgatgtactgagaactgagtggttttttgtgaacacttcctgatttaatcatgacaaatataaatacaggcaattgtctattctagagttgcttaacattgagaggctaatgaaaagctcaaatcagataacttttactggtatgtgtggctataggttttaaagtgaactttttcttcttctctggggaaagtatttttgtgtatgttttatagttcttgcttgaatgaagaaaccactttgctaaaaaactttgagacttggatttttaactgaaacagcctagatatacttagctaacttactgataaaaggataaaatagaaggaagcgagataaatttggaggggcatgctataaaatgttattaaaccttttttaaaaatgagacatacaggccgggtgtggtagctcacgcctgtaatcccagcactttgggaggccaaggcgggtggatcatgaggtcagcagtttgagaccagcctgaccaacatggtgaaaccctgtttctaataaaaacacaaaaaattagctgggcgtggtgacgggcgcctgtaatcccagcgacttgggaggctgaggcaggagaatcgcttgaaaccggaaggcggaggttgcagtgagcggagattgcgccactgtactctagcctggacaataagagcaaaactctgtctcaaaaaaaaaaaaaaaaaagacatacaaaaaaggaatttacaaggctaatcagccttcatttttatatttacaccagaaaggagaaaatgcctgagatctttcctaaaagcatggaaacattcttagctagtctaaaatgttaagagtctgtgatgtaagcagaattaaggacttatctgaaagtctaaataccctgggtgctcatgtctattctgtcattgacacttagccttttattatttgcctcccttttgctaagtgttaaaatgagttctcacaataattgaaaaccattgcttgatcaagctatttgctaaagccaataataatgcataaattacaatgtaatgtttggggaagatgcaaaaaagttgattttgaacctactggtttagaatttgatttatcttttagagataatctaatctgtaatagaaacaaacaaacaaacaaaaacactagacctggggacaggagatttcagttttagtttgtcaatactttttttttttgagacgcagtctcgctctgtcacccgggctgagtgcagtggcatgatctctgctcactgcaacctctgcttcctggtctcaagcaattctcctgcctcagactcctgagaagctgggattacaggcacccgctaccatgcctggctgatttttgtatttttagtggagacagagttttgccatgttggccaggctagtctcgaactcctgacctcaattgatccgcccaccttggcatcccaaagtgctgggattacaggcatgagccactgtgcttggtctcgtttgtcaatacttttaattagctgagtgatttgggggccaagtgtgtaagctttctggaacataatttccttttaggtaaaatgagagatctgaggtgaacattctcttatagctatactattctgtgcattaaattaatagtacaggctgggtgcagtggctcaggcctgtaatcccagcactttgggaggctgaggcaggaggatcacttgagcccaggagttcaacactagcctgggcaacatggggaaacctcgtctctacaaaaaaatacaaaaagctagccaagtgtggtggcacatgcctgtagtcccagctactcaggaggctgaggtgggaggatcgcttgagcccaggaggttgaggctgcagtgagcaagatcctgccactacactccaccctgggtgacagagggagaccctgtcacacacacacacacacacacacacacacacacacacacacacaaaagtacaaaattagtaatacatctcagagggacaacagggcatattacaagaattacactgtatgtatgaatgatgaatatataaatgatctgtaattcaagcctgccttcccgaaaattattttaagaactatgaggcttacttcattagtacaattaggtacagctaaatagtggttgcggaaaaggagaatttgggaaacttggctataggaagacatagatgtattgaaaaggcattatgttcactgcgctattttttgtttgaaatgagtcaatgatggtcctgtatcacaagcagtacaaacatttaaactggaggcttgtttgtatagtcaaggaaaatccagggatggtggatctgtgattaactgtttcagcccaggcagaaacaaagaaaatggagagggtaaagggccctatagttggcgatgtgtggttaatgtatggctagatagatatagatatctaaattcaggtgaaactcactgtaatttttacagaaaaactctttatgtaaataattgtgtttataagataaatctttaagcttaaaaaatgagagctatctagagactaggtacacttattaaaaaagatgtcttgagcatataggtgttccatagatattttatatcttccttaccaatatagtactctgcccaatatttagaagatatatctcttcctgaattcaaaatagtaaacagaagatacatgaatataaaagctgaaacacaacttgcaactgaactgaattttgaaaactacttccccttcgtttttaaagaaagctggcaagacaatgtcttcaaataaatgagttgaaataattagtacactgtaaggttttttctaaagtcttattgctcccaagtccattttctagtgacgttttgcaggaccttcaagctgattaatcttccctaaaatggggctaagaatctgaattcttctagccctgactcctggggctgacatgagtcctcctaaagggaagatgaataattgagctttttcatatattttccagtttgaagaagaaatatacacagagtatgtgtgttttaaatctaaacagtgaaatatacatttttgtgtgtgttttagaaagctggtgtattacatctgttctaaaagtagaaaaatttgacaacacaatagaacacttgtcagtgtgctttctgacatctcattttgttgttgttcggtgctaccctcataaatattctagggaatgtgtaatataagggaggttttgggaaatcccaggtgtaggtttcaagcgattgatccgcctccttttgtttttgtccttaacctgctatgggtgatcatgatgcttgaccagcctaggcgcttttcctgccgttggggttctctggctggtttagtgcaggacatactaaggatctggttggcactgctgtttgagaaggcgcgtgagctgtgctgtctggtgactactgagcacttgaaatgtgactagtgcaactgaggaagtgaatttttaattttgtttgtgattaatttaaattcatattcaaataggtacatggcactagtggctactgtactggacaatgaagatagagaacatttccatcatcacagaaagttctcttggacagcactgctctagcaatctcattccaagactcccattggcctggcagaaatctctgaacaagtcaactgtttccccagcattctaatttatcagatggaggtggagtgcacatgccctgtggttgccaagaatattaatatgtgaacaaaaacatagtgcagagctttgtctcgtaaggaaaaaacagtttttaaaaataccatagaaaacaaatgatggtatttcttatagtaataactattaaaagacgtctagtaactgctagcatggtggtttgagagaacttatgctaattcatctttgaaggatctataatccatatcactttttctatttaggtacttaaagctttcaccaaaacacccagaatcaaatactgctggaatggacatctttgccaaattctctgcatatatcaagaattcaaggccagaggctaatgaaggtaaaaaacaaaaacttgaattaacattgcaacaaaaaaccccaaacaacaacaggctgttattatgacagtgattataaatgagtactttagagtccagccattcccataagtaataaaaactgtctttcagagttggtcagaaattggacaataaactggaataagtccctatgttgctatttttccatgtttctagctagtagcacagtatatagtaagtgtgtgataaaatgcttcttgaatgaagtttatttcatcttattttgagaagttactgtgaagggagctaggcaaagaattaatggtgcatcagaaacagtggattgtgtggttgtggtggtttagcatagattggttgagcttaatttaaactgtaactaaatgtttattgttgagtgcctgcagcctagagtcagtctgaggtttttttttttttttttttgctttgttttgtttttgttgttgttgtttttgctaattacccttgagcaatgtttggagttgctttaagagggtaattagacatactatccttccaaatttctctgcatcttcaagctggaatttcattttcaagtcatgttttcgcggtaagagttgtttaggtagtacagatgcaattttcttttatttattaaaggacactatttttattattttattcaccaaatgaatgtatagtgtagggaggtctctttggaagaggttccattcagtgaaccttgtcttaactacagcatttagtaatttccttttctcttcgggatgttaagcagagttctctctggggaaaactgtgtagcacacattagtgtttatttgaaagtaacccaataaccaaaaatgctagcttctaaaaatatttatcatagttccagatagtttcctagcttgagtgggattcttttgagaagaagtttatgtcagcaaatgaacaagaataccaaaggggaaaatatcagtgctggttaaacaagaatgaatatctttttaaaaagtgaaatacttgctaatttccttatgttatttcagtactattattataaaatgctgcaattttaaaatttagtattggattccaatgtcttttgctcttgatttttggaataatacttaactacatgaaatgtttttctacagtgaagggaaaaaagggaaaaatgttagtgctcaggtctggcttgtatctgttaataatgtattccagtagctgccatggtttggaagcaattttctttagtaattggcttttttttttcctgactaatgtttctgtctaagcaatttatacattaagcaagtggttatgttggagcccctcctttccacagacagtgtcttttctgttctgcgcttcatgcgagctaactgttcttttcataaaactacccttttatacttagatgcccctgctgcatacttctttgaacaatcttagttacagttatgtttttatttttccatgtggttttttgggagttggagggtggttaaatttcttctgacacttagtggggaggagaaaggaataaaatgtgtttgcttcccctttgagggatgaggatggggcggggtgggggtggggcgggaataaaaaggttagaaagtgactcatttaagtataactttgtattctattttttccctatcaatttgttattatcttaagtagccacctactcttcctgtcctcagaatgctgtaaccaataagaacaaacaacataatataatacatggtacataatctagaaggctttatattaaattacctgctggtaaataaaagttccagttgccaagcaacttctctccacagggacctgttgaggccatgacactttagaaaacaatatttcaaatcactttggagcttaatgggccctccttatgtatgtttgccgcaggcctcagatccatttagtgcaatcaaatgcctttagtagtcctaggaaattagtgattctcctttttatttcccccaacccccacccagatgctgacaatttacacagagatgaatttgtcgttttacatggtaaatcagagtagacaagtctgattagttttaccacctattaaatattttcaaaatccaatatgtttggacaattttaagaccttttaggacttaattctaagtaagggattcaatgcctgaatgctacagttttgggctaatgaaactgaaatagaagggctagtggttaggttggggtacaaagtaaacaagtaaaatgtgaagaataaagggagagacactgatgatagatagataacacatatataattcttttgataacacgttcaagttgattgggagtaaaagtttatgtaaccatttaggcagtcaaagagaagctcatgggtaatttcttttgtggggatgtattaagtatgacctgtccccagatctcctactttttttaagttctgtgatggcattaatttatgtaatttgctaaggtcccaactgtgactagtcattgatatttataatactcagtcattgatatttataatactcataaaagagatgtgaacttagcattgttgaatgtactctgaggcatatttcatgatgtccaaattcctatatttagatggaggcaaggaatctagaggttctgattagttcctttttattcaggatcctctcctttctcctctccccactactcctgcctttctctctggaaaagtgttggaagtcagaggatggttgtgcattattgtagcagtaagcctgcattgtatattgaattatctttaaatacccattacctctttctattttccactgatgtgtaacttagccttaaaacttgtttgtataaggttaccctttattaagactgcggtaggtagcttgaaaatatggttttatccatgtcagtgcttacaatttttagtctttgttttagtcattgtaaattatcttgtttttcaataaccgaagtgctcttattacatttaatgttttctgccttgaattttactcattcaaatcatacaaataacagagaatacatgattgttgaaaaagttaaaatagtatagaaataaatttaataaaacttaattgcccctctttaatcacattacatgacctcttcaacaatttagtgttcttttttctatgtaattttgcaaacatttctgtaagtacgtattatgtgcatacattatgcagttatacttttcacttatatggtagaaatgcttctatatcaaaatatagatctacctcaatttttagaaattctgctttgtattttataatatggattttcatttaaccatttccatgttgatagacatctagattgtctcaagttttttttttttcttcactataataaacaatgctgctggtgaatgtccttgagctagattccaaatagttcaaaaagtttgtgcattttaaattttgctctattttgctaaattgttctccaaaagtctataccagtttatattcccacaaacatgaaagtattcattaccctacacttaggaccctggtgtgtgttaatctttgtaattttgctgtgttctcttagacaagaaagggtgttttgactttcataattacttttaaactgattttgttgctctgttgcacttaaaaattttttgagagctttatgaaatagcttcttagggataccagcattactacatcggggtattggagaataatagtgctacttattagctataagacagggagctactttgtgatggcttgctactgccttctagtggttaattttgacattttctttatatttacatactcctttgtgatgattggtcttgaaaactgtattgtgtttattgaatgatgctgtttagtactttttgatatttctgtttgtgtttgttttattggccataccttatgttgatacatataattgtatcaaactaattcatcattctttgttttcattaatatacccttgttatgacattcttaactatgaaaaattactaacaccgtagtcaggtatagcaattcgacttcatcagaagtgctttgctaagtacaaaattatagagaaaacagtcattgtaatgttatgctagactcttaattttcttttgaaaaaaatttatttaaatgagacaaggtctcaccacattgcccaggctggtcttgacctcctggactcaagcaatccacccagcttggcctcccaaagtgctgagattacaggcgtgaaccactgtgtcttgcactgacgaatactatgttataaaccttgtaaatttaggatatttgatttttatatatataattcaggaaaaacattaatttagagcaggtctaaggttaaacatttgctcaaaaacttgtcaaaacactcaaatagcatttgagacaataattcaatgtttgaattcaggcaacattatcttccccacagactgattccattcattgtaatctgatcaaagaacaagtccttgtactctaatatgttcttgttctgcattcactacttttatttttttggttttttgtttgttttgtttaagagtcttgctctgtcacccaggctggagtgcagtggcacgatctcggctcactgcaacctccacctcccgggttcaagtgattctcctacctcagcctcctgcgtagctgggactacaggcgtgcaccaccatgcctggctaagttttgtatttttagtagatacgaggtctcatcatgttggccaggctggtcttgaactgctgacctcaggtgatctacctgccttggcttgccaaagtactgagatgacaggtgtgaagcaccatgcccggccatgcattcactgcctttaataagaagcatattaactcttgttttacaaccttgagattctgctctctccttttctcttttttcctcttaaatatacccatagaaagtgtttcatcgtttcctggaattcttactgacctagctgtttctcacattgtattctcctgttaatttataaactttacatttcagctaactatatgcattattgctggcctgaatataattaataaaaatttatgtttattattttatgtttttgattttttattttttttattttttattttttttttcttttgagcagtaacgttttattttttatttttttattttttattttttttattttttatttttattgatcattcttgggtgtttctcgcagagggggatttggcagggtcataggacaatagtggagggaaggtcagcagataaacaagtgaacaaaggtctctggttttcctaggcagaggaccctgctgccttccgcagtgtttgtgtccctgggtacttaagattagggagtggtgatgactcttaacgagcatgctgccttcaagcatctgtttaacaaagcacatcttgcaccgcccttaatccatttaaccctgagtggacacagcacatgtctcagagagcacagggttggggataaggtcacagatcaacaggatcccaaggcagaagaatttttcttagtacagaacaaaatgaaaagtctcccatgtctacttctatccacacagacccagcaaccatccgatttctcaattttttccccacccttcccgcctttctattccacaaaaccgccattgtcatcatggcccatccccaatgagccgctgggcacacctcccagacggggtcgtggccgggcagaggggctcctcacttcccagtaggggcggcccggcagaagtgcccctcacctcccagatggggcggctggccgggcggggggctgacccccccaccgccctcccggacggggcggctggccaggcagaggggctcctcacttcccagtaggggcggccgggcagaggcgcccctcacctcctggatagggcggctggccgggcggggggctgttccccccacctccctcccggacggggcggctggccgggcagaggggtcctcacttcccagtaggggcggccgggcagaggcgcccctcacctcccggacggggcggctggccaggcagggggctgatccccccacctccctcccggacggggcggctggccgggcggggggctgaccccccccacctccctcccggacggggcggctggctgggcagaggggtcctcacttcccagtaggggcggccgggcagaggcgcccctcacctcccggacggggcggctggccaggcagggggctgatccccccacctccctcccggacggggcggctggccgggcagggggctgacccccccacctccctcccggacggggcggctggccgggcagggggctgaccccccctcccccctcccggacggggcggctggccgggcggggggctgacccccccacctccctcccggatggggcggctggccaggcggggggctgacccccccacctccctcctgggcggggcggctggccgggcagaggggctcctcacttcccagtaggggcggccgggcagaggcgcccctcacctcccggacggggcggctggccaggcggggggctgaccccccacctccctcccggactgggcggctggccgggcggggggttgacccccccacctccctcctggacggggcgactggccgggcagaggggctcctcacttcccagtaggggcggccgggcagaggagcccctcacctcccggccggggcggctggccgaccccccccccccccccccgcctccctcccggacggggcggctggccgggcagaggggctcctcacttcccagtaggggcggccgggcagaggagcccctcacctcccggacggggcggctggccgggcagggggctgaccccccccacctccctcccggacggggtggctgccgggcggagacgctcctcacttcccagacggggtggttgccagacggaggggctcctcacttctcagacggggcggttgccaggcagagggtttcctcacttctcagacggagcggccgggcagagacactcctcacctcccagacagggttgcggcccagcagaggcgctcctcacatcccagacagggcggtggggcagaggtgctccccacatctcagacgatgggcggccgggcagagacgctcctcacttcctagatgggatggcggcggggaagaggcgcttctcgcttcctagatgggatggcggccgggcagagacgctcctcactttccacactgggcagccaggcagaggggctcctcacatcccagacgatgggtggccaagcagagacgctcctcacttcccagacggggtggcggccgggcagaggctgcaatctcggctctttgggaggccaaggcaggcggctgggaggtggttgtagcgagccgagatcacgccactgcactccagcctgggcaccattgagcactgagtgaacgagactccatctgcaatcccggcacctcgggaggccgaggctggcggatcactcgcggttaggagctggagaccagcccggccaacacagcgaaaccccatctccaccaaaaaaaaacgaaaaccagtcaggcgtggcggcgcgcgcctgcaatcgcaggcactcggcaggctgaggcaggagaatcaggcagggaggttgcagtgagccgagatggcagcagtaccgtccagctttggctcggcatgagagggagagggagacgggagagggagagggagacgggagagggagagggagacgggagagggagagggagacgggagagggagacgggagagggagagggagacgggagagggagacgggagagggagagggagagggagacgggagagggagagggagacgggagagggagacgggagagggagagggagacgggagagggcgagcagtaacgttttatattgattttttatttttaagtggcttgtttctcttgtcacttctgtagttgagctctgctaatgtctcaactttattttactgggttccagtgccctctgctggttatgtttcatctaagaaataagctaacttgatcattggctatggctagcatgatcctttaataataaaatgggtagatctttgaccttgccacttatcacttaggtaggtaacacattctaatttgtttgatattttcctaagtaaaaaatattaccgggtcaggtgcggtggctcacgcctgtaatcccagcacttggggaggccaaggcaggtggatcgcttgaagccaggagttcgagaccagcctgaccaacatggcataaccccatctctactaaaaatacaaaaatcagccaggcgtggttgctcacgcctataatcccagctactcgggaggctgaggcaggagagtcacttgaaactgggaggcggaggttgcagcgagctgagattgcaccactgcactccagcctgggcgacagagtgtgagaatctgtctataaataaataaataaataaattttaaaaatgtagaattaaatacataacaataatagcatataggacagaaaggaggttaatggggttctaaggtctttgcattatcctggaagtggcaacagttataattaaactttaatgagtcaaggaaacaaagactagaaaaggatgtatattaagctaatagaggtggaaatagaggaataatttttaaaaatgtaatccataggaaggtaggagagaagaaaagaacacagaacaggtggacaaataagaagtatatagcagatttgaaccagagtttttagtaatgacattgaatatacattatttaaatattccaaatgaaaaaacaaagtttaccaactggattaaaaacaatgttgcttatgtacaagactgtatctatctgtctatctatgaaacacacaaatacatacatgaaatgtggatccaggagagctaaaaatgaaatagtataaatactaacctaaagaaagttgacaaagccacactgacattggatgaagtagactttaaggaaagaagcattatgagataatgaagcgtgttccagactgatttaaaaaggttaatcaggaagataaaataattctaaacttatcttaccaaataactaacctgaaaatataagccaaactgacagaactaaaagagacagatcaatccacagtcatagtgggggatcttaacttacccccttagtaactgttagaatcaaccgcaaaaggaaaaaaatgagaagataaaattgaacaatacagtgaacaaatttaatctcatatatgtatatacatatctcactgtacttcagaatatacttttgtttttcaaatgcacatggaacaaaattgatggtaaagctgggccataaaacaaagctaaaaatttttccaaaaaaattgaaaacgaggaatgtttctcaatcaaagaaaatatgatagatatcaataacaaaagtacagctagaacggggcacagtggctcatgcctgtaatcccagcacttagggaggctgaggtgggcagatcacttgagctcagtagttcaagaccaactttggcaacatagctaaaccctctgtctacaaaaaatacaaaaatttgacaggtgcagtggcatgtgcctatagtcccagctactcaggaggctgaggtgggaggatcgcatgagcccaggagttcgaggttgcagtgagccgagatcgtgccattgcaccccagcctgggtgataggagtgaaaccttgtctcaaaaatgaaaaaaacaaaagctacagctagaaagtttctacatgtttgaaaattaattagtatatttctaaataatccacagattgaaaaagaataaagtgatgaaaatacagaatgtctacatttgtgagatatggctaaaactgtgcttagagggaattttttagttccaaaagcctatattagaaaagaagagagctaaatattggtgaagtaaaagtttagaaatactaaagagcagaatataaggaagtagaaaacaaacatgacattgaacaaggaagctaaaagctggttctttgcaaagtctaacaaataaaaaaaatggataaatccttgaaaagaaaaatcaagaaaagtgagagaagacagcaaaaaccaatattggaaataaaaaggaggattgctacagatcttacattaaaatgatttttggaggatattatgaaaaaatttatgcttataattttgaaactattggagaaatttacagaaagtacagtgtaacaaaattgacacaaggaggaattaaaaatgtgaatattcttatatcatttaaatttcttataattaaaaagaaaactccagatccagatggcttcactgttgaactcttccaagcatttgaggaagaagtaaggttatactttcatatacctttccagggaacagaaaagagggaatgctttctaccttgctttttgagggcagggagccttgataccagaaccatacaagaacatcaaaagaaaggacaatttcaagccaatctttctttaatatagatgcaaaagtctgaaataaaatataccaaatccagcaacataacaaaaggtagtacaaccaagttgggtttctcaggaatggaagattgtttaaaaattcagaaatctggccggttgcagtgactcacacctgcaatcccagcactttgggaggaccaggcaggcggatcacttgaggtcaggagttcgagattagcctggctaacatggtgaaacccggtcttctccgcagactattcctcctacctatcctttaaatgatgttccttagggctttctctaggccctctgcttctcctttactccatggtttcggtgttcatttatgttctcataacttctaaacacgttgctccagctcagtgcgtgacacttgaaaccatatttgtctgtctattggacatctctactcacatgtcttacaggcacctcaaactcagcatgaactcatctccgtagcccctaaatcggtttctccttgggaaggtaaatggctcagtaaatgacaccagcattcaccctgggagtctttagtttgttgaccagcttctctatactaccctctgtccccaagatctaaactctctgaggataggaatgtattaggttttattcaacagtgaatttaacaatccttagaataagacttggcatgtaggaggggctcaattatattttgttgaatacatcttcccccctttctccatattcactttggtttctgaactctgttagtttttatttcctaaaatccgttcattcctttttatgcctatagccccttacctaactaagactaccatctattacctggactaccatgaagggaccaagggctgagtgggtggctgcaatttggaagaagaggtttggggttaggacatatgtacattgctggtaaaatatctaagatgcaggcctttacctttttccttaaaggacacaactgaattcagacttaaaactacatggtttgccacctcatgatatttaactttcttttatggccagttaccacaatcatctgtgtaagttcatctattctgagagtgagggggaaggtggctttggaaggaaaggataagaaaggataatagaagatctgtctgttgttattccatatttttaatgacattcctaccccctttctgctgagggccactaaccttgactttccagatatacagtggtgctctgtcccactttaatgaatgccatcaaaatatggaataacaacagacagatcttctattatcctttcttctgaatcatgacaatcagaatcatgacaatctgaatcatgacaatcagagcatcttaatctatttggttaaagaggctcccagttcagtattgtaaattgaactccttaatctgacctttgtgttttttgtataagatagtgctattcttggcttcctgtgaattataagacagttttgaaaatctcaggttttctgtttggattgtttgaattggtatttcttaacacatttcttactgataaatcaaaatattcctgggggagcaggaattaaaaatgagggcaaaaatctgcctctaagatttttttaatccctagatttgaattaatatgcttgccttttctcatccatttttccagtttaaatgtcaaatgtgttggaccatttgtgttcatgtgtgggacatttagttgttagcaagttttttttgagacagagtctcgctctttcgcccaggctggagtgcagtggtgctatctcggctcactgcaagctcggcctcccgggttcacgccattctcctgcctcagcctcccgagtagctgggactacaggcgcccgccaccacgcccggctaattttttgtatttttagtagagacgaggtttcaccgtgttagccaggatggtctcgatctcctgacctcgtgatctgcctgcctcggcctcccaaagtgctgggattacaggcgtgagccaccgcgcccggccatttgttagcaagtttttacaaataccactgcctgacattattatgcttatttatacttttacctgaacaaacttgtttcatcccctgccccacctaattgagctctaggagagcaggagccttgtctgttttgttctacagtaccttgtttcagagtaaacatttttaaacagttattgactcaaagagtctgcttctccttggggacttgagtggttttccttcttacagtattctcatctctttttttcccccccaagcactggagaggggtctcctgaaaaccctgcagaaactggatgaatatctgaattctcctctccctgatgaaattgatgaaaatagtatggaggacataaagttttctacacgtaaatttctggatggcaatgaaatgacattagctgattgcaacctgctgcccaaactgcatattgtcaaggtaggtctgtaggggttgatgtcgcattgccattaccttgtattgtatttactaaagtggcatttcctttgtgctcaaaacatttctgattttatatgactagttgtttaactcaatgctgtttaggcaatagttgaagcaccctagagttagttaaatggaaaattatgtcttaaaattgaggaatataagaaagatgaatatttttttttctgtgactgcatacaaattcaaagatataatgcgtgactttgaattggagtttgccacactgacttatgttatcaaattctgttctgtgatcacaccttgctttctctattgaaggcaaaaagtattgagcatttattatatgagacactgggctgggcacattgttaaatagaataataataagcgctagttgtaaataaagacctaagataacaaaaacagatctaaaatagcatatgtgtgttgtgaagtattttccagtgattatacttggctgtctttctggatgtccaaggcagttatttgcagtcactgtcacacttctaaatccctggtgtagcttgcagtcttggtcattatttaaaactctggttagaatgatggtgatggactttttttcatatagaagcagttctcaaagatttagagcattaattatttgctccaaaatcagagatatgtctagtttacaagacgtggaaataagtctgttaacttttgatctctttgtatttcaggtggtggccaaaaaatatcgcaactttgatattccaaaagaaatgactggcatctggagatacctaactaatgcatacagtagggacgagttcaccaatacctgtcccagtgataaggaggttgaaatagcatatagtgatgtagccaaaagactcaccaagtaaaatcgcgtttgtaaaagagatgtcttcatgtcttcccctaagaatacgcttttcctaacaggctactccttcctgtagagcagaaattgtattttgcacgaacatgcagttattgaagattaggatcaaggatagacaaggtatagtagttatcttaaaatatacactcctaagcagtattattttaaaatcctttaccctggctacctcccctacccgggttcccctctctttaatttggagacactccaccacaaacttttcactttagaggtagcttgccatctctcaggagccctcaccattgtgtccattcactgtgtatagatggcagaacttttgaggtgcaatgtttaattgttaaaaatagtagccacgactttatcaggcagccccaaactggtgcataatgcatggtacaagaaatatttatgtattttttggaattttgtaatatttagtaagagtatatgaaaggattgctactgtatcagaaatattgtttcaatttagtctatcctggatatgtactaacgaatattaccaccagagaagagagctttctacaaaagtcactacagattttgctatattgctttgtagatagatttttacttttgcctaaaagcatttatccttcataccaattgtaacatctgacaccatgtagaagctaaaagtttagagggagtgagggttttctcaagaccttcctcaagcattttatctttagaagagaaactgatgggcacctgatactctgtctaaatacgtttgttatatgtgttttgccctgtgccattcatttggaactttattgcattctttattttaaaaagcttgtttttacgtaatcatagagcttgctatttgtacatctgttgagcaacactacataactgatttttagttgacttagctatagcagtacaatgattagtaatgtaaaaattaacacagaaattaacctaaggaatgaagggtgggtttgtcaaaatatcaagtaaatttttgtttctaaagtacatttaatgtagatgacctaaagaatgcgttatccatcctatataaaagaaagataaaacacaggtcaccaattttctcatttcaccccatttaccttgtatagaggattgttcattcctttgggactaagttatagttatggtgagtgtgtatttactgtagttttgcctgatctcactcattgcacttcctggagttaaattttccaacagccatgttgaggaatagcactctgcatgtttttgttttgtttttcggggttttttttaattgaagccctaaaccaggaattatttgtgttctaacaggaggatgaacttgctgaaaataaaactttgctatgtatttactcttttttaaaagacaaaagcaaaaccagactttctacgtactactccaaagactgtgattgtgactataatacatttttggtaatttttttatacctaatttgtataggaagtgctatttctcataggctgtttcttgaaattttaagtttattgctttaaaatggcagtgtttctcccactttgatatgctaacatttagtaagcactggctttatgaaagcggctttttataagtatactgcattttttgagcctatcattaattagcttagtatgaaagataagaaaatctccatgttgtatccatttggctcaggaagattctttgccttacctttcttagaactctttattgcttatcaaaagtttgagtacccgcttggtttttttttggtaattaaatattgtatgatttatctggttcaaggaagatgcactattcagttatctattgagaaattattttgcagtggttttagtgggtgaaaatgtcccatctgcaccagtacacaggcaggcattatcattcttcacctactttttaaatagtggcaacttgggattcattctggtgattctgaaccttgcctcatagcttaaagtataaaaaagattcaagagcagtgaggtttgttctttccagtgaatggtggactgagtggtgcgaggtggagggctaacaagaggaaagaactacattcttcagaatacagtgatgaaaattcattttgaaactcaaatattttcattttggatattctcctgtttttattaaaccagtgattacacctggccatccctctaaatgttctaggaaggcatgtctattgtgattttgatgaagacagaattatttttctctgtagaaacacagataccactttatcagggaagttagtcaaatgaaatggaaattggtaaatggacaaaagctagctagtaaaaaggacgacccagcaacatgctttaaccccattgtatgtttgtggaaagagcatagtttaacatcttgagaaatttgggacataaagttttcatggtagacagttcatgcagtatatgaattgccataatggaaataatctgattttatttttacaactaacatccattccccttcatttaaacaccttttgtgttttacttcagtgaggagattggagtctgaatggatctgttttccaagagattctgagaaatttttgtattcagcagttggaaagctctctattctagttgataaaacttcccttttttgatgtagatgcagatattctatacagttctgttgtcttttactaggactgtaaacttttgtgataaaattcaaataagattttatttcttggtaattttggctttcacaatttatctttaaatccttgagcaatctgtatacaattaagagatttctgacatttattcttacactaaatggatcaactctaggatttaggcatgttaacttctgttgtgttttgaatctctccagagttgcatgtagatagcatttatttctgtgcccttaaacccatttagaaaataactacaaagtaaaaatgtagaggaaatagaaatgtattttttcatgaacattttgatacaaatttcatcatttaatgattcaccaatttcttgcattaatttgaatttaagcatttaattcaaagagaggggagcatccattattgatacatgtgggcttttaaaaactccatcctttataaatagtcaaggtttgggccacacaaagtatatttttatcatggaaaaatttcaactcctcaagccgtaatgttgaacagaattggagtattttctttataatttcttgaacaggcaaatgaaagcttattatagaatgcatgtattttcttttatctttggaacatcagcaccagtatattgctggcagctattgtattaaaaaataaagtatattttcactatcataaaggattcttttttcccccctcatgaaaataaacaacaacttggggtaaaagtgtttgagactactatttttttttctatgagtgattcagcacatttaataggttaaaggagaaaaaccataggatcatttcaataggtacagaaaataacttgattaaaatattcatgctactcattcttagcaaaataggtaactttttttttaacctgataaagacttttattgagaacctatagcaaatgaaacagaagcgatctcgttaaagtcaagaataagacaaggttgccctctatcacagctactatccagctactttaacagctactttatttagagatatcctagccaatgcagtaacatcagtgaaaggaataaagaatggaaaagaagcaacaaaatgactgccctttgcaggtaatgatgttgatggtgtgtatgtgtataaaatccaaaataacttacaaatactaaaaataattcagctggatttctagttgcaagatcgaggaacaaaatttaatataactactatatacaaatagtaagcacattgaaagccaatagagaaattggtaacattggtttttttctggaggagaattgggtgcctgaggtaaaggggtgggaaattatcaatgtatacttttaagtttttagaaattggtaaatatattacctattctaataaacaaaaagtgctttaaaaaacgaataaagatcctaagtgattgaggatcaaatcaaacaatgtgcaattcctagccaagcatggtggctcatacctgtaatcccagcacttagggaggccaaggtgggaggattacatgaggccaggagttcaaaaccagtctgggcaatacagcaagaccctgtctctacaggaaaaaaaaaaacaaaaaacaaacaaaaaaaaaagccaagtgtggtagcatgagtctgtagtcctagctactcgggaggctggggaaggaggatctcttgagcccaggagtttgaggctatagtgaactatggttgtgccactgtactccagcctgggtgacagagcaagaccctgtatcttttttttttttaagtgcaattctttatggagaaaagtacaagacattattgaaaggcctgatagaaatttgttcaatggataggcataccatatttatggatggagagctcaaaagcatgaaaatttaaattctgactacttataaatatatttgccaacaagatcctaacaggtgtttttggaaactagataaatggattcaaaaattcatgtggaagagttatgcccccaaatagccaacatatatttgaagatggggaaagagaacttgtttgacaagataccaagacttaataaaaacttacagtaatcgatgggtaggatataggtcacagcaacacaatactactgctgcaacaaccataaaaaactattaaaacaccaaaataggccaggtgcggtggctcaaatcccagcactttgggaggccaaggcaggtggaatcacctgaggtcaggagtttgagagcagcctggtaaacatgatgaaaccctgactctactaaaaatacaaaaaatatataacaatagtgatagaaggaaggtaagtggagttaagtacttgcaagattcttaggttatttgggaagtgatgaaagtaccaatttaagaaaatgataataaatcatggataaatatcacaatttctagggtaactactaaaagaactacaagaataaataacttaaaaatctaagacttaaggaggaaatggaagttgaaaaaaattcaattcaaaagaaaggacaaggggatcaaatgaacaaaacataggacaaattggaaaaatagcaaaaggttaactgtaaatccaacactgttagtaaatttatgaaatgtaaatgggctgaacaatgttaagtgtcaaactggataaaaaatcaaaacccaatatatgctatttacaagagacaaatatatgggcccagaagggtgaaattaaagaatggaatagttaattcattgacacagtaaataaaaagaaagaagatgtgcctatcatacaaagtaggttttgaggcaagaagtgttactggagatgaaaaaggatgttttacaatataggacattgataatcatgaacattcactatgaaaatgttaacagtcctgcatttctgtgtatctaataacacctttaaataaaaattgactcaaagagaaatgtctgcaattatgaggtcaaattcatcctcataattggagattcttaacatagctctcagtaactgatagaacaaggaggaaaacacgtgcgtgtgcacatacgtacacacataggaatagcagaagagagaataacacaaccacttgacctaatggatgcatatggcatgctatatccaacaactgcagaatgtacattcttttcaggtatatgtggaacttttagtgaaacagaccctatgccgagccataaaacaagcctcaacaaatttcaaaggaatgaaatacaaaatacgttttctgaccacagtggaattaaactagaagtcaatagttgaaagataccaagaaaatccccagaataaggaactacttacagtagcctacaacccatgatgaatttttttttttttttgacagagtctcactctactgcccaagctggagtgcagtggcatgatcttggctcactgcagcctctgcctcccaggtccaagtgattttcctgcctcagcctccttagttgctgggattacaggcgccctccaccatgcccggctaatttttgtatttttacaaatacaaaaattgtaacctgttggccaggttggtctcgaactcctgacctcaagtgatccacctgccttggcctcccacagtgctgggattacaggcgtgagccaccacatcctgcctgaaaatctaaagttttaaatttaacacacatatttattatacaccaggaactgttctaaacactttacgtatattaacttagtctctttaacaatcctatgagatagagactattattcccattttatgggtgaggaaactgaggcatgtggaggttaagaaacttgctcaagagcctgggaaacatagcaggaccctgtctctacaaaaaaaaaaaaattaaggttgtgagagcctctggtcctagctacatgggtggctggggcaggaggatcgcttgagcccaggagttcgaggttgcagtgaactatgattgtgccattgcactccagcctgggcaacagagcaagatcctgtctctaaataagaaaagaaacttgctcaaaatcccacagctagtaaatgacagtcaaagctaggcaatatagcaatatgcagatagtgctcagcaatctttaaaagtgtgtctgttttcctccttaaaagagtggacttggctccctggcccctgacaactaaggtagttggttgccaggtaagcagaggtccagctggaacatatagattctttaaaaaaataaataaataaaaatagagacaggattctagctctgttgcccaggctggtgtcaagcccctggcctcaagcaatcctcctgtcgtagcctccgaaactgttgggatttcaggcgtgagccaccgcgcccggccaagagcacgtttggttggtttgtcctgaggggcaggtctctcgcaccaagcaggaggtagaggtctcgggcccagaggggccctgcatcccccacctcctgctgcgagaggcatcagccggccttgtccctaaagcccctgctcgctttcctgtcaccactcgggtgcggttccgaagtggccagcaggggccgcggttcccctcctttcggcgccacttctgcaagcagggctgggacagctgcaggacctcgtcagtttggggagctgccagacccgatcagcagcgttgtcggcttccttcctctttatcagatctgtcagggctgctgcgcgctgcgaaggcgcctccggcctccttccctccttcctgtgtcgaacggacgctccccggcgccgctgcgaaccgacacctccgcgcctcccccggcggggcagggcagggacccgctcacaccctaggtggggtggggtgggaagtgccagcggtctgggtgtgacggagccagccaatgtccacgcgaggtcaggtcgcacgtgggcctcgacgctggcacttctgcatgtccctggttctcggccggccaccggcagctagaggaagcgcttcgcccgcgaaccacagggctgggcggcggttgggtcgcggcagggcgagggctccgctgcggttggccccgagcggcgtccttcccccgggggcccccgatcactgcctggggactcgagagcgtccccgccgccgcgccaggcgccagttccctgcttctgagagcgcgcacgggagcccgagcgagccctcctggacgcccggcacaggccggagcgccgaccgcgggaggggccacctgggcactaggaaaaggggccacggttccaggcggggcggtccccgctctgctgactcggacgggcctcacttccccgccagaagaagcggcacccatccacggggagggacggcctcgggacatcctttggggaagccagtgacacatttctgatccaatttcttataagaaatagataaacctcagtttcttcctgtgcttcctttctctaatttcctcagtcagataataattgtcattaaactcgatgtaccagttattgtgctaaagtttttaaaatgtttcaagtctcttcatattctcaagtctattagaggagggactattcttgtccccattgttttatataaagaaacttaaacctagagaggttaaataatttgcccaagatcacaccaggaactgatagaggtcatctggctccagagcttaacatcgcactgggttggttgctgtcacctcccctgtgcagggtttaaggagactcgaggaggctgattttttttcctcttctcctcttctctcttctcttctcccctcttcccccctcttttcccctcccccctccctccctccttccctcctttctctctctctttctcttttattttttattttcttttcataggctttcactcccattgcccagactggactgcagtggtgcaatcttggctcactgtgaccttcagggaagctgatttcttagcccagctgtggaactgtccagagctccccagctacccaagtgtattcctcctctccgcctcctcctcttctcctcctcctcctcctcctcctcctcctccttctctctctctctctttaattttttaagaaacagtgtcaagcaatcctcctgcctcagcctcctgagtagctggcactacaggcacgtgccaccccaagtggccttttccagcaggaagtttaggagcctaatgagcgcaatgcaagcagaaccaaatggttccaataccacgcaccaagtgcattggcaccacatttctgggtaaaagggtcctgcttggcaggggggactttgaggggtcagggagggcaaaaggggcctctccccttccttggctcagagatgttcacgcaactccctgccgtctgcagaggtcactgtaagccagcagactcattctcacgtggctgaatggaggttttccaatcaaggaaggggcaagagaagaaaagcccagggccctctccattcccttccttcgtagacatgcttttaaaaaatgatttaaaggctggacacggaggctcatgactgtagtctcagctgcttgggaggctgaagtgggaggatcgcttgagctcaagaggtcaaggctggagtgaactaggttcactgtgcttcagcctggaccacagagtgagactctgtctccaaaaaaaaaaagaaagaaagaaaaaagatttaatctcatctcttaaataatttactgcggaattgctgctaatctttacagatcctccaagaattctatggtttatgccagcatcatgagtttgccccttactatttattgatttttggtcagaaaatgtaaataaatttaaaaaatgtacataaagtgaagcccaaatcactggtgcacagtattgatttgattatcaatagagattttttgttgttcaatctgcagtgttctaaagttacctttcaacttgaaattctaagccagcttgcattatcagattttttagaaaccttgatgacatcaagctggaaatattccaggaccctcgtctcattgaagaaagagctaaggatgagtgactcacccaaggctctgttggttgcagaatgggggctccttggaccagacagtgtgtttagcaaaaacatatgatggcaaccaggctgggacagagttgctactagaatgacatctttatcccctcgtcggctttcagggagttctctgacttcctaaggaatgggcttaacaaataatccttggcaaccagaatgttgatctcatgtttaaaaatatatttatctaatgttaaaacacacgcacttaactatatggcatgctctattcattaaaaaataatactgttgaatgcctcccgggtgcaaggccctggctggatgtgaattaatgaagacacgtgatttctgcctttaagaggcttccaggatcacaagggagaaaagacatgaacacaaataactgggccataaaagcagaaggtgagaaacgattctcaagagactaaaagtactatttattcatccattcacaaaaacgtattgaacctactttatgaagattcataaagggaacttttcactaggaaaatcaaaagggtatcagggaggaattttttttttttttttgtacaggttttgaattgtttaagtgattatcaaagcaattctgctcatcgtacaagttttggaaagtacagaaaacggtaaagaaacacatacgcaaatttcccccaaatttaccacccagagacgactatttatagtgtgttttccagcccatttggcgaggatttttttttcctttatgaattttagagcttaatttctattacaaatctgttataccataagcattttcccatatcatctggaactcttgatttttttttttttttttttttttgagacagggtcttgctctattgcccaggctggagtgcagtagtgaaatcttggctcactgcagcctcaacctcctgggctccgtcagtcctccccccttcaccctcccgagtagctgggactgcaagcatgcaccaccatgcccagataatttttgtatttttttgtagaaacaaggtttctctatgttgcccaggctggcctcaaacccctgagctcaaacgatatgcccaccttggcctcccaaaatactgggattacaggtgtaagccaccgtacctggcctctcttgattattttaaggctattttaaggctatttgcctgatgttttcaaccacaaggacccatcataatcacctcactcattcctgactgtaggacgtcgaggttgtttccagcttttaatcgccacacatttatgttgcagtggacatctctgtatataccgctttgactgtacttcaacttctaagtttcagaggaaaaaattggaaatatgaacatttttaaggagaatgataaatatcaccaaagtattagccagagtttctaaggaaatgttaacaaaaaaaaagtggatgaaaggtaggaacatgttcaggcttttgataaatctcaccaagtggcttgcagaaatacttcattagtttacacacccccagtgcctgtacaaatgccatcttcttacacttcggctaacagagagcagtatctttgctgacttaatgttatttcattgttattttgcatttttttggcccttagagagattaaacattctcccccacgctaccccctgccagtatttattggccatttgtatttgtgttttattgtttatgtcctttacccttttattcatggacacttttgtcttttttaatccatttatgtaagcgctgtataaattaaggattctaaccatctgtttgtggcatttctgcaagctttttcccggttgtttgtgttttaattttgcttgtattttttcatcatactggaagtttttatttttatgtgacacggatctgtcaaacatttcccttgtggtttcttccacagctttgaagcttagaaaacccttcaccctgtaaagaccagttggtgaagggagttcccagatgaagggtacagtgggggcttggcctggaagctgaaggagacactgtcttgggtgcatggtgagttgaacctgcactttcaggcccagtcagagacaccttttaagactgtgctggccgggcgcgttggctcacacctgtaatctcagcactttgggaggctgaagcaggcagatcatgaggtcaggagtttgagaccagcctggccaaaataatgaaacctcatctctactaaatatgcaaaaattagccaagcatggtagcgcacacctctagtcccagctacttgggaggctgaggaaggagaattgtttgaaagagggaggcggaggttgcagtgagccgagatcatgctgctgcactccagcctgggcaacagagtgagactccatctcaaaaaaaaagaaaaaaaaaaaagactgtgctgtgcggtcacaagctgggggagccattgaagattttcaagcaagatgatgacatattggaggggctgtgaaacacagattctacatcttcacaatgatacatgaatattggaatgttttatttctcatgagaactacaagagacttcttccggatagctattatgggaaatccatagttcgttgctcagtgaaactgaagaattctcccatatttcttgagtctgcagctgtttggggatttcattttatttttttaatagagactgggtcttgctatgttgactaggttgatcctgaactcctgggctcaagtgattctcctcccaaagtgctggaattactggcatgagccaccacgcctggcctgtttggggatttgagcgtggtgtttctgctttgattctattagcaccaggaaggatcctccaggcccacacatttccttcttactttgcagcaaattgatacttgctgcttatttgcgcagcatgtcgccgacaccttctctccctgcttggcgtggcttccctccaagcctggctgacccgcgagcgtggcgagcagacctccacttttctgccttaaggaaaatggtagtttcaataactgattctgctagagaaaccacacttgaacgatttgtaaaatctctgggaaggagttattctgggtggccaattttttggtgaataaaaagcatattccttcgaggactgttttactttttagttagacactatgtggaaatgtaggatacctctaggcccttttttcattctctttgacaagaatacattcttcagtgaaatacttaaaagctacccagaatccttgcctcccaacacaaacattccatttgtttccgtcctgcctttcatgtgcgtgtacatttcacggggccacaaatcattgtacggactctcctgtggttctgccggtttcactgaccaaggcctgattatgtgtgtctagattttatacagtgagcataaaatgataatttaagaacatttttattgaaatacacaatatgtaaatatttaaaacttttttattgggatacacaatagtctatacacagcacacacagaatagtgcacaaatcctaaatgtacagctctgttagaatttttttttttttttgagaccgagtctcactctgtcacctaggctggagtgcattggcacgatcttacctcacctcaacctccacctcctgggttcaagcaattctcctgcctcagcctcccgagtagctgggattacaggcgcccaccactacgcccagctaatttttgtatttttagtagagacggggtttcaccatgttggccaggctggtctcaaactcctggcttcaggtgatcctcccaactcggccgtccaaaatcctgggggcctctgcgcccagccttagtttgaatttttgaaaactaagcacacacatgtaaccagtccccagatcaagaaagaggacattaccagcacctggaggtcctctccttacctgttccagtcaccaacctcccccttccaaaggtaacaactaccctgatttctaacagcataaattaatttggactgtttttgacctttgattaataaaatcataaagtatgttgctatggtttgaatgtgtcccccaaatttcctgcattagaaacaatccccaaattcatatgttgatggcatttggaggggaggaaggggttttgggaggtaattaggattagataaggtcatcagagtgggcccccccatggttgggactggtggcccataagaagtggaagagagacctgaactgccatgctcttgccctctcaccatgtgatgccctctgccatgttataacgtagcaagaaggtcctcatcagatgcagctcctcagccttggacttctctaactataagatataaaatttttttctttttctttctttcctttttttttttttttctttgagacagagtctggttctgtcacccaggctggagtgtgtgcagtgctgcaatctcagctcactgcaactctgcctcctgggctcaaaccatcctcccaactcagccttctgagtagctgggactacaggcatgcaccatcacacctggctaatttttaaatttttggtagagatggggtttcaccatgttgcccaggttggtctcaaattcctgagctcaagcaatccacccatcttggcctcccaaatttctgggattacaggtgtgagccaccatgcccagcacatttctttttataattacccaatctgtggtattctgttacagcaacagaaaatgaaccaagacgtatgttctctttggtatctgctgcttttattcaacattaggtttataaaattcatcaacattgatgtgcatagcaatagttcattcactctcattgccttatgggaccccgctgtatgagccatctatctattgtatctatggctgtggaacaaactaccccaaaacctagtgacttaaaacaataacatttatcttgcatagtttctatgcattaggaatttcaagagcagcctagctgggcagttctggctcagggcctctcatgtggttgcagctgagatgtccttcagggctgcagacatctgactggggcttgaccgttgctcgagggtctccatctccaacttcatcactcacatggcggttggcaggaggccttccttcctctctgcaggggactctccacagtgtggcttgagttttttcatgatttgacatgacactggctttccccagagtgaatgatcaagagaccaaggcagaagctgcaacatcttccgtgagctctcattggaagtcactcatggttgcttccatcatatcctgttggtcgccatgtcagccctattcagtgtgagaggggacttcacaaggatgtgattaccaggaggcaaggattttggggggcctttagaggctggtgaccaccatctattgtaaaagatcacgttttatagcatctcccctcacagtgttgcattgtaaattttttgcaaatttaatgagttgattttgtagtagatgagtaaattttgtagttaatactgatacgaacatacttgtgcacacagcttcttgtttctgaagtagttcttagaaatctgtccctgggaatggaactcgtgagtcaaaagatctcaacccatttgtggctatttcttcggattgtaccaattttcagtgctactagcaagccaatggtagaccaagtccacttcagctccatctacattagaccttaatgccgccagacagagcagggtgccagaacatgaaaatgacgctctgtcatcaaaataatggcaaataataagcaccaggcactgttctgggcttcaataccatgctgcctggaggagaccttccatagtgaagactggaggctcttttctgggaggccctggataacaggtcctctgctggatggttttaaaccaaactgtttttttgtttgattgtttgtttgctttctgagatggagtcttgctctgtcacccaggctagagtgcagtggtgtgatcttagctcactgcaacctctgcctcccatgttcaagcgattctcctgcctcagtctcctgagtagctgggattacaggcacctgccaccacgcctggctaatttttatattttcagtagagatggggtttcaccatgttggccaggctggtctcaaactcctgacctcaagtgatcctcccgcctcggcctcccagagggctgggattataggcatgagccaccgtgcccggcccaaactggttttgaaattgcgttttctaccacctcttggaaaggcagcatggggaggtggagaggacagcggccttgtaagaagacagtctggttcaaattttagctctaccatgtgctggctgggtgaacttgggcaagctgctttccttcttgtgcctcagtatccccattggtaaacagagatcacagcaccaacctcccagggtagctgggaggattgaagaggccgcgatgccgccttcccggcaccacagttcctgcagtgcaggcgcccagcaaatgctggttttccacctctctgcctctcccatttccccttcttggttcgcacatttgacacttactggctgaaatacttcctgtgatatgtccttggtttctcctgaagaaaaaaaagtccaatctgttttttttttttctaattataatagcgatgcacgttcaccgctgaaaaatttggaaagtacaaagaaggaaataaaaatcacccgcaatttcacaccccagatctgtgactgtgaacatttgggtgtgtctcctcctgggtgtcggaccacttcttattctcagaattctatggggtggctccggggcagtgtgacacctctgtccaggccccagcgaggggtagagtgagtgctggacaggggtccccaaacgggccacttttgctgcatgtgtggagacagataggacttcaagactcagtcctcgccacctgcagaaggtaagaccaggagccttgagggggacagttctgccctgcatttgccccctttccccggcaagtccctggccttagggagtggccatcccaaactcatccggactttggccatttcttgtttctgggcttcagtgtccttatctgttaagtgagcagctgggccccttgacttccaggtctaacactgtgtgtcatgagaggcgtccgtggaagagaaggtgctttgctgctggtgggacctcatgcatgtgtaggtgtttatttctctggggtcctctccttctgctaagaagagaagaggacaaacctcacgccagccttcaattgccttcgcccctgaactgtgtcttgtcagcctcctcagctgctctttgagtacttgagtgaggcaaggacctgctgggggagctgttgtgaggatccaatgaaacaaggcctctgaggcaacagaatagagttgtaatggcactatcagtagagagggactgtccaggtttaaatccctggctgtgtgaccttgagcaagttactcaactactctgtgcctcagttttttctttttttttttttcctttcctttccttttattttttctttctttctttcttttttttttttttttttttttgagacaaggtcttgctctattgcccaggctggagtacagtggccccatcatggctcacagcagccttgacctcctgggctcaatcgatcctcccacctcagcctcccaagtagctgggactacaggtgagtgctaccacaactggctaattttcaaatattttgtagatacgggatctcaatatgttgtccaagttggtctccaactcctggtctcaaatgatcctcccaaagcaatgggattacaggagtgagccagcatgcccggccatcccttatctttaacctgggaaagatgatcataacatcaaataaattgtgtgcagattcaatgagttaatatgtgtgaagcccttagaacagtgcttggcacatagtaggtgctatgtgagtactagatatcattacagtgcctgaaatgtaataagtgctctgagatgtgtgctattagaattgtaaagagattccaaaaatggaggcatgtttgacatgaaaagtgaaagtttctcctgccccacttaatctcactctccagaagaaaccactgtgaacagttccttccctaggccaccttccagatcattctttagaaatacatcatgattatgcatatagtgttttctttttacttttctttaggtttttgtttgtttgtttgtttgttttttgagacaggatcttgctctgtcacccaggttggagcacagtggtgcgatcatggctcactgcaacctccacctcctaggctcaggtgatcctcccaccttggcctcccaaagtgctgggattacaggcacgagccaccacacctggcccatgttttctttttaaaccatcacatcatacagagtgtttgcaagttgctattttcttcacagtatcacggacatacctgcatgtcgggatgtactaacacatagctgtgaaattttgccaccaatttcctattgatggacagacagttggacttgtctactttttctcctttttttaattatacaaaataagcaaggaacatctttctgtagagcttcacactccaaaaggagtatccctgaggttgaggagatgagggggacatgagcagg

SEQ ID NO: 75 - DNA, 14944 bp, Homo sapiens
gtctatcagcgatttcatcttcaggcctggactacaccactcaccctcccagtgtgcttgagaaacaaactgcacccactgaactccgcagctagcatccaaatcagcccttgagatttgaggccttggagactcaggtaaggaatcaatttgctttctttaaatgacttaaaggaggtgatggataaggtatagaatggttttgaagactggaggttcttgatcttaattctagagtttccctagtcagacttcctaatagttctatgacttaaggaggggtgacgatatcaaggcttgctgcccactcactcctctaatcagtctccctctcaacaattaccctatgcagtcaactgtgaatcattccacaaaagtagtagattgcagcatatatattaaatcatggtttctaaaccattgggttcaaactggagctctaccactaacaaacaatataaccttgggcaaattactaaacctctaaagcctcagcttcctcatctataaaatgggggcaatggtacccattacattaggaaaattggaactaaaatcctgaatcccttaggacttcccaataccaaatgagaaaataatcagtcataggcataatgaaaaaaactccatttgtcttcctgtaaatgcttttgtctacattaaatgtaaatatacctagaagtataggtggctttacaggctaacattttctggaggggatttgtggacaccaagttgagcatgaaatcctgcctcaaatctatcacatgggaaaccaagagtaagagggggcgctgcagatgtgggggagctctaatgaaggaaaacaaggattaattttaatcatgccattactgttttctgaatccagtatataagtgattccctttccctgtttcccataaaatggcttaatctcactgagaatccggtggaaagaaatgtttaatccagcattgtgagcatttttgtgtgtgtgttttgtttgtttgttcattttttagtggagacaaggtttctccatgttggccaggctggtctcgagctcccgacctcaggggatccacctgcctcggcttcccaaagtgctgggattacaggtgtgagccactgcacctggccattgtgagcacttgttaagcttccctgaggaagtagctgagtttgatgttcagcttaatgtaactgagctcatagtacatagaaaacaggttccctatgcaagtctagtaggatacaggattctccgaagaaagtagttgatgtctagtaaggaaagcaaagagctaggagctctgaagaattccttgcaatcaggcaaggagagcaggaacgccctcaggtgatgtgcatatctaatgcagagtttgattgaaagtaaagagggagggagaaggaacacttcaaagttgagaagattcaggaaagaaggtagaggacatgtatagaccagtggctctggtggcggtagtgggatatgagcttgggaagtcatacagggctgaattccaaaggccttgaggggttagatgaagggtttctccagcaggtaatgacaggccagcaaaggagttcaggctcaggaagagcatcactcaaaacagtgatcgggagcttgatgtagcagccttgtggacaatggattagaaaagagaaagactgaaggcagaaaagcatgaatggaaatgagaaactcacaggtgactctggatatagaaaaaagacccacatgcaaaatgtattgcagaggtagaaatggcatgacttggccactgactgaccaacagccaagatgaagatggactgagagatgatggagctaaagtgaaatgtggtcccaactatctaagcctgggtggcaggagaaacaaataaaacaatctgagacacgaggcctgagaaaagaccactgacttcacagcacagtcctcaaagaccagtttcagtccactgactggcggaaactagttgccaagcattgagaagtgagtgggtggagaggaggtgggggaagagagtgggtagcaaagctttgaagcagctgcggtgaagaaaaagtgagcctgggcagtgggcaaggacattgctagattaaaagaagaggactttgggattcagggacactgaagtacattttagtcataaaaggagtatttagcaccttaacaaatgcaacttatctcatattctcaaaatgatactttgaaatggggaaggtaactattaccttaaacttacagagagaccacaagaggagcaagcaagagagctgggactaactctgtctgctacatattgccagaaattgggagactgaaggtgcaaagaagaaataatttcttggaagggctaacagcttggttggactgagatgggctgaaaagcacagagggaagggaagtaagagcactcttcctcggagataggtgcacaggaggccagaagggataaaaatgcaaaactattttgagtggaagagaatgaagatgaggtaacaacagtgaggcagtttttaaacttctcagtacatgatggtacgagtggacttaaaagtctattcaaaccaaaacccataaaggctgtgagatcttattcagtggatggacatgaaaacaggggtgcctttaaaaataaaaaaatatttgcaggagttagtgtgagtaattaaatgcggtactgagtgatcacctgagtctctattttaacattcatgctgatttggacaccagcaaatgtaaaatcttattgttatcatattgcggctaatgtggtccataacccctactaatctaccaactagtctttgagcataactgtgcattgggcactaagtcattgtgaacaatttattttaatgataaggcaaaattgcgagaatctccaatctccgtaggcgagttttatgtatttatgaattctcatggaacgaaagcttttcattacagtcagcccacaatgccataaatcgattaatatatttacctctcatatatgagacagatatatatataatcagatatatatatgaaagatagtttccataagaaataaaaaaacagagaaagcactcatgtgtttctttataaactactattttatacaaatatttgtttaaggtttgtagaagtatagttgccaccatgagataccattttaacagagaaatatcacacacacacacacacagccctcatggtcattattgccattagttacaacaggcatagcccaagtagaattggcttacaaaaaagtttatctcgccaataatacagacacagctttaatcaagcagttgatgaataaaatgaaattaaaacaatggcagtccaatcatctccttcagttcaaacaattgatgacctttgcattttaagttatcttcactaaagttacccctctggggcggagtgtagtgactcccagctcattccatacttgccataggaccttgggaaaaataacctctctcaacctccatttcttcatctgcagaaagtagtcaaaatgcctacttacgaaggtgttgagtgagttggcaataccatatacaatatctctagtatatagtaggtgctcagtaaacaactataattatctggactcacctatggtacagcagaaaaagcatcaacatcagagccatggtgagtgccttctagcttggctctgttgctaactgtgaggtctttactaaggcaaattctatacccagactgcagcttcctcatttgtgaaatgaacagaatggtttctgaggtttggactagctctagaaatcctacctagtgaccagaatcagtccgcaaactctttagtgggctatattaaaatatctgtttttgttagaggtcttgtagagtggcttgttgtacaaagcagatccccaggaccatgtggcatctggctatctagggcaggggcaaaatcaagtgagaaacaaccaaagtttcttctctctttcctctagcccatgcgccagacagataatacttttcaactgatttatagtcattcacatagtgcatatattggaaggagaaaagaggggtcataagggaaaggctgaattcctatttctcacaggagacaaagcagcctggtaccctggatgcctaatttgagagatccaagtcttcattttaaatctttacaggctgggcatggtggctcacagctgttatcctagcactttgggaggtggaggggggcagattgcttgagtccaggagttcaagaccagcctgggcaacatggcaagaccccatctctaaaaaaaatataaaaattagctgagtatggtggtggttgcccgtggtcccagctactccagtggctgaggcagaaggatcacctgagcccaggaggtagaggctgcagtgagctgtgatcatgacactgcactgcagcctgggcgacagagcgaggccctgtcatgaaaacaaacaaacaaacaaaaaatatttactaattatgtaacttggcacaagtaacctagcttctccgtgcccttgtttcctcttctataaaacacaggtgatgattcaccccttgcctgttctataaggctcagatgagatgccatgtgtcaaatttacttccagccctaaagtaggtataaatgtgacagtagtcagctgcctgttttacagcacacctgcagctactcagctctgattgacttcagtaagatatacttcaggctgtggtctaatggctgggatgtggcaccggcttcagtaagatatgtgacctggatagacagtcttgatttccaagacatcttacatgacttacaagcaataaagacaagagcaaagatgtgtccccaaaagagggattttcagattccaggaaagacccagtggagtccgcataagtggttaacatgaacaagtgaatgctaaggaaacccaagatgaagattgaacagaatcttaaaatgtctgagctggaaagggccgtattaattgccttctcacttcagaaatgaataaatcatgaaaactgataaatagcatttactacactctccctttgtcctaggcacaattacatatgttaacttatttatgtcttacatctcagagaggggtactgttctaactttacagaaggataaaatcgaaactaatgctcagcaaagtacaaagaacaagaatagcaacaaaaataactatttattccaacatgggttctttgcatacatttatttcttcaataatatttattaagaagtaactaaatccaaaaattattttagatcctgaacaagagagaacaaaatctctactttgatggaacttccattctgtggggaagagactgacaataagcaattaaataaataaggtaatttcctacagtgatcaatgccgtaaagcaattaagataggattttgtaaaagacagcaaataggagtacatgttatagattgagggttcaaggtaggctcctctaggagctgacatttgagctacacctgaacaaaaagacactagccatgcacagaccatgagcccagttaagtgttatagcagcccacgagataagaattattattatttcaattttacagttgaacctgaggcccagagaatttaaagaacttgcccaacatctcagaacaaatggaggaatcactattgaaacctaggcaatctgactcaggaggccacagtcttatatactgcattagaaagccttagagagccttttctttttctttgagaccgagtctcactctgttacccaggctggaatgcagtggcatgatctcagctcactgcaacctctgcctcctgggttcaagcaattctcctgccttagcctcccgagtagctgggattacaggtgcacaccaacatgcctggctaatttttgtatttgtagtagagatggggttttgccacgttagccagcccggtctcaaactcctgacctcaggtgatctgcccatcttggcctcccaaagtgcttggattacaggcatgagccaccgtgcccgacctagagagccttcttgatgtgacttgcacaaggtggcagagttagagacagagagaggcctggaatcgacccctcctgcttctacagatagtccttaccatactctgcaatgttgcctctggcccatcataatgcacaaaggcagataagcaaaaggacaaggacaagtccattgaaaatacatttttcaatattaaagcaaaagaaaagcatccaggaataagaaacaaagaggacatgcagtcatatatgcaaggtgtcctctacaaagataaagaatgccccaaacccagttgtcaagatcactggcagggactcctgggcccacatgctcttcctaaacaacccctccatctcctttctcagaactcagcagtaggccttgcctcagatccaaggtcactcggaagaggccatgtctaccctcaatgacactcatggaggaaatgctgagagaagcattcagatgcatgacacaaggtaagactgccaaaaatcttgttcttgctctcctcattttgttatttgttttatttttaggagttttgagagcaaaatgacaacacccagaaattcagtaaatgggactttcccggcagagccaatgaaaggccctattgctatgcaatctggtccaaaaccactcttcaggaggatgtcttcactggtgggccccacgcaaagcttcttcatgagggaatctaagactttgggggtaagtcagttgccttccatcccatgtcgtagggattctctggctgacagaagctgatgcggtataggccacatacagaattcaatccaatttgaagaattgggatccaacctgatgtcttctttatgtctaacacagtgggccaaatcaggggtgcatcagagaagttatcacttagatcacctctgggtgatcttatgtcaccttttggttttggggcttgtatatgcaggggtcccccatcccagtccattgccagaatcccaggcatacctgctccctggaaatgccccatgtggttgaggaaacagattcgaacaagaaaaagacaaaattcttggcacctccactgcttcctttaggcattcctcacagctccaagtcaggagccagagcttccaaccttgtctttgcctgctagcagtgatgatttcagctcatccactgctgcctctgttctctccccaggctgtccagattatgaatgggctcttccacattgccctggggggtcttctgatgatcccagcagggatctatgcacccatctgtgtgactgtgtggtaccctctctggggaggcattatggtgagtaaaagaatagcagccatttgggaaatggtgcagacaaaaatgttaaaaggctccacagggatatgccagattatttctgtgttgagggaaatatatgagtaggaaatattattgggttaaagtaattaagaagacaggttgaccaaattgagtataaatcccatggttgagagtcagtggtcctgtttcatgtgaattcagagaaaggggccctgcatggatctcacagggactgtccaaagcaagaactctccaaagtcagttctggtggggagggtggccctagacatttagactagatagcaagatgttttggaaagcaagaggcagcaggaacatccacttccatctaccccttcttgcttacaattctgtttggttactatggtacctggtgaaacctgtcccatcacaagtcagtctcattttgcttatcgacagagcagcactcttttggctgttttacgtacatgttttccaaatctgtaaccctgtctgggtgtggcacataggacagtgatgtttatttccccgtgatacttttcatagttgccactataaaagataagtccaggattaaaattttccaaacaagtagagatgggttagaacaagagtttcctccattctacagcctgaatgtgagaaaaggaagatgagcaatagtcatcatcacttcctgtaacagccaatgttttcatggagtgcctgtgccattcaggtcaagtatttccttctgcatcagttcactcttcagagggcatcagagtcatttatgtcactgtgaaccccaaagggcagttccacaagttaaaaacaaagaaaaactagaaataaaacttttaaatttatggtatgagtattaattgatgaggaaatttgagttctgtctctttggtcttactatattcctagtcacagatccccagatgattgagtaaaaggcatgaatttagtgtcactgagcctgaataaaggaggaatatgacagctgaaaaatgaatacaactgataaaaatgggtggatggttgtgtgaaagttgctgaaagtgtaggcttctttctgaccagttatcaatgttaaaaagtgatctccctctctcctctatctcctgtcttgcccaccccctctccatctcccccacctctcttttttacagtatattatttccggatcactcctggcagcaacggagaaaaactccaggaagtgtttggcaagtaaccatatgtccttctttcccacatgtcagagaagtacctatttttttcggttaaaaactgagacccttaaaaagccaaggtatcacagcctctcagccctaaaaagcaaagaccctccacaatgttattgtgattttatttatgaaaaacttagaagcgaggtctatctgaagtatgttcatgggaacagaactaaaagcagatccatgaaaaccatacctacagtcttaagaacgttaaatgctgtgtgaaaataatagacctttctgaaagccctatcatttctcccagatcaccatttaggaaaattatctgatcaatgtcatgattgattcaaattctagctaagccattttttggccgtaacattgaacaagtcagtttacctctatgttcctgagttttcacctagaaaggaagggtaacagtccttgctaccatgtgacgtccaatggagatgaaaggcagtagagtgtgtgatggtgcttcacaggctataaagtactacactgtggtcttgcccataaaacccctagggactcatctagatccagaggaaactggcctgcagagctgctgatgctgtatggatgaaaagagtttagcagcaagttcgctcccaaaaaattcctcccccaacactgttactaaactgtgtcactttcataatcaatgagggaatgggtggattgagatggttcctgtcttaaagtggcctgacacactcagtttggggggaaaactttttatgaacatcaaattattctctagatacagccagatttactgacttgccatgtgtaggtcatagagccaggaatgaaatatgcgcagcataaaataataatcaataatcccatatcattatggtacttgttatttatattttcctgtttcaaccttttatcatccctgcaaggtagaacattcacactgatattttcttacctatgctacccaaagacatcagccctaattgtattttggaagatagctgactggggctgattgcaacctatgtcagcaggaatagatgttgttactgttgttgcttctgctttttttatttccatttatttgatagtacagatctagagggttctatctgaaccttcccaacctatacttcataataccatcccactaaagtgtgatacaagaaacttcttcactctcttccctctacctatttatgaaggcagataataaactggataatatttatcttcacttattcaacaaacatttattgagtgcctactaggatggtggcagtggcagtgaaggaaatgcaaggatacaagatatagaatcaagggttactcttagaatttttgctttataaaacagatggatggtgaatgagatagggaagactgagaaaagaacaggatagagacatgattttattttatagtgacaaagaggctaaaaacaactgagagaacttcagtatatttagttgtagttgctttgtgagtcagggcagttgcatttggaattccctcccagattatgttttccaaagggaaatcaaacccaattaataaatctgtgtctccatttcaggtcaaaggaaaaatgataatgaattcattgagcctctttgctgccatttctggaatgattctttcaatcatggacatacttaatattaaaatttcccattttttaaaaatggagagtctgaattttattagagctcacacaccatatattaacatatacaactgtgaaccagctaatccctctgagaaaaactccccatctacccaatactgttacagcatacaatctctgttcttggtaagtgttcttggtaagtgtgagattggatttctctccagggaggaaggatgacttgtttattatgagcatgaactctggatccagaccacctgagtttgctagttactgtctgtgtggctttgggaaagaattttaaccacactgtgcctcaatttcttcaactgtaaaatggggatggtaacactatttatctaatagggttgttctgaggaataaataagttaatatatacaaagcatttagaacagtgtttggtacacagaagtgctatataagcattggctttaacattaattattctcaacatcattaatggcattaatatttaccattatattaactaagatgagcatagaagaaattcctaagatgttatgaatatcttttgcccaaggacttttaaatgtagagtttgaaagagataaaaaaaaatgcatctcccaaggatgaagaggtctcctaggcatgatgccacaccaactaaggctgaatacaatttaatttgagactcattacttattctttcctatacagaattgattcttcaactgattattcataccttactttctatcagcaatacacattaaccatctgttgtgtgccaaaagttgtgttaagagttagggttataaagatgctgtctcctgtactagcagttctcacagctattcattacttgtctaaagaattgatctcttaatcgttcaattatagtcaacaataacttactgaacaccaacaatgttctttgtgccattattacattttcaccttcattcttctgttgtttttcagggcattttgtcagtgatgctgatctttgccttcttccaggaacttgtaatagctggcatcgttgagaatgaatggaaaagaacgtgctccagacccaaatctgtaagtagtagcccctctggccaaaacctccctctagaaaatccacatccacaaaggatcatttatggagaatgtaatctgatgagttgttgaaactaggagcttgatttaaaaaaaaaaattggtcttggcatatttctagaaagcaaataatatgatgtcttgaaatttgaaataagtctgtagttagagcctacagttctatattctgtgcgtcttttttttttttttttttgagacagagtctcactttgttgcccaggctagagtgcaatggcgcgatcttggcccagtgcaacctctgcctccgggttcaggcgattctcctgcctcaccctcccgagtagctgggattacaggcacccgccatcatgcctggccaatttttgtatttttgtagagacgggggttcaccatgttggccaggccagtcttgaactcccgacctcaggtgatcctcccacctcagcctccgaaagtgctgggattgcaggcgtgagccaccatgccccacctctgtgcatcttcttattaaccttccctgctgcttgacttcaggcttccatcctgatttcatgattccatatacagtgtgtaaaagcaagatggttgaaggttgaaggctaagtcactagttctttggtttcatttttcagtattcccctcttccctccttttcacctaattcctcttccaaaacaacaggttaaagggctccacaaatgggaaataaaaacagaccaataatagatatattactaactgcttcagaaccagactgttagatttagaatttagaaatcatcgctaattacttcattttgcatttaaagaaaaatagtatcaaagagagaaaattattctcccagagttatattcactaaaggcaaatcagaacgaaaatctaaactcctctattactgcaatgttcttttcccaataccacgtggtcattccaggcactgtggtcaatgtctgctgcccttgaagatttattcagacttgagttttaataaatgacttgataaggatataagcacctgcaaaaaaattttggcatttaaaggcatataataaatgacataagtagcataaaaaccaggaggtatttgataaatgtttgtggagattgttgacaaaggtgtcagtggtaaaagtaaagaatggtttgtttaattttctgttttagaacatagttctcctgtcagcagaagaaaaaaaagaacagactattgaaataaaagaagaagtggttgggctaactgaaacatcttcccaaccaaagaatgaagaagacattgaaattattccaatccaagaagaggaagaagaagaaacagagacgaactttccagaacctccccaagatcaggaatcctcaccaatagaaaatgacagctctccttaagtgatttcttctgttttctgtttccttttttaaacattagtgttcatagcttccaagagacatgctgactttcatttcttgaggtactctgcacatacgcaccacatctctatctggcctttgcatggagtgaccatagctccttctctcttacattgaatgtagagaatgtagccattgtagcagcttgtgttgtcacgcttcttcttttgagcaactttcttacactgaagaaaggcagaatgagtgcttcagaatgtgatttcctactaacctgttccttggataggctttttagtatagtatttttttttgtcattttctccatcaacaaccagggagactgcacctgatggaaaagatatatgactgcttcatgacattcctaaactatcttttttttattccacatctacgtttttggtggagtcccttttgcatcattgttttaaggatgataaaaaaaaataacaactagggacaatacagaacccattccatttatctttctacagggctgacattgtggcacattcttagagttaccacaccccatgagggaagctctaaatagccaacacccatctgttttttgtaaaaacagcatagcttatacatggacatgtctctgccttaacttttcctaactcccactctaggctattgtttgcatgtctacctacttttagccattatgcgagaaaagaaaaaaatgaccatagaaaatgccaccatgaggtgcccaaatttcaaataataattaacatttagttatatttataatttccagatgacaaagtatttcatcaaataacttcatttgatgttccatgatcaagaaagaatccctatctctattttacaagtaattcaaagaggccaaataacttgtaaacaagaaaaggtaacttgtcaacagtcataactagtaattatgagagccttgtttcataaccaggtcttcttactcaaatcctgtgatgtttgaaataaccaaattgtctctccaatgtctgcataaactgtgagagccaagtcaacagcttttatcaagaatttactctctgaccagcaataaacaagcactgagagacacagagagccagattcagattttacccatggggataaaaagactcagactttcaccacatttggaaaactacttgcatcataaatatataataactggtagtttatatgaagcagacactaagtgctatagacactctcagaatatcatacttggaaacaatgtaattaaaatgccgaatctgagtcaacagctgccctacttttcaattcagatatactagtaccttacctagaaataatgttaacctagggtgaagtcactataatctgtagtctattatttgggcatttgctacatgatgagtgctgccagattgtggcaggtaaagagacaatgtaatttgcactccctatgatatttctacatttttagcgaccactagtggaagacattccccaaaattagaaaaaaaggagatagaagatttctgtctatgtaaagttctcaaaatttgttctaaattaataaaactatctttgtgttcttttctgcaacagatgattccaacatgggtgtttgtctattcttctttactcttgaaacattagaccatgggaggctcttacagccttgagttgatatttatacaacccaaatctaggtttgaacggtgaggtgtcaggtcatcaaatattcatgtctatatagtcttacacaggttctcaaaaaaaatgttcatgggataggtcattgataatggattccttattctgagaactccagacgactgaaatatatgagagaaggaaaaggacatagtaggagcaggcctgagaaaaaaatgaaagtcagaaatctttaaaaaaatacaagatcttatttctatcttattttttctcctcttctgaaatatatatgaggattcctctccaaacccatggtttctctaagaattttgagtcatttgtatgacctcaaataattagttttagctgacctcacataactccttataataggagacatctttaatgtctgctattaaagaaggatgaaaattcctatgaccttctccccgattatccctttggcaatatagagtcaaataataacattgaccaatagtaaacatgctttgccaagaagtagaagatatattctctagccttagtttttcctcccaatttgcatttttgtaaaaataatgttgtatccacaaaggaaataaactttaaaaacccaagtgca

SEQ ID NO: 76 - DNA, 2040 bp, Homo sapiens
atgggcagcccctggaacggcagcgacggccccgagggggcgcgggagccgccgtggcccgcgctgccgccttgcgacgagcgccgctgctcgccctttcccctgggggcgctggtgccggtgaccgctgtgtgcctgtgcctgttcgtcgtcggggtgagcggcaacgtggtgaccgtgatgctgatcgggcgctaccgggacatgcggaccaccaccaacttgtacctgggcagcatggccgtgtccgacctactcatcctgctcgggctgccgttcgacctgtaccgcctctggcgctcgcggccctgggtgttcgggccgctgctctgccgcctgtccctctacgtgggcgagggctgcacctacgccacgctgctgcacatgaccgcgctcagcgtcgagcgctacctggccatctgccgcccgctccgcgcccgcgtcttggtcacccggcgccgcgtccgcgcgctcatcgctgtgctctgggccgtggcgctgctctctgccggtcccttcttgttcctggtgggcgtcgagcaggaccccggcatctccgtagtcccgggcctcaatggcaccgcgcggatcgcctcctcgcctctcgcctcgtcgccgcctctctggctctcgcgggcgccaccgccgtccccgccgtcggggcccgagaccgcggaggccgcggcgctgttcagccgcgaatgccggccgagccccgcgcagctgggcgcgctgcgtgtcatgctgtgggtcaccaccgcctacttcttcctgccctttctgtgcctcagcatcctctacgggctcatcgggcgggagctgtggagcagccggcggccgctgcgaggcccggccgcctcggggcgggagagaggccaccggcagaccgtccgcgtcctgcgtaagtggagccgccgtggttccaaagacgcctgcctgcagtccgccccgccggggaccgcgcaaacgctgggtccccttcccctgctcgcccagctctgggcgccgcttccagctccctttcctatttcgattccagcctccacccgccggtacttcccatcccccgagaaaaccatgtcctgtcccccaggagctctgggggaccccagggcgctttgagggtgggatccccggatccgattcagtaaccagcagtgcttttccagagcctctgagaccagaaaggagagttggtaattcttaatccaaccacctgttagatgccacagatgaggagtcctcacagtgctcttgagaagacgagggagatttcattaagctaaaattttttatttaatgttaagtgatgctgaaggctaaagtaaaccttgctcgtatcaaaaagtaaagattgtgcagacctgttgtagaattcttttcaacagagaacagaaaacttgtctccgaagtgggtttgtggaaggaagcctgccaaggcggcttgttcagagaaattgctccttctggtttatgtccagccttgataacacatatgggagcctactatgcagttttaaagcaagtatccatgcagcctgcagcctggtcattttttctggggtgaggatctgcctaggtagaagttttctctaatttattttgctgttacttgttattgcagatggttccttgtcggggtggggggtttatttgcttcccaatgcttttgttaatcccggtgctgtgtcttatgttgcagtggtggtggttctggcatttataatttgctggttgcccttccacgttggcagaatcatttacataaacacggaagattcgcggatgatgtacttctctcagtactttaacatcgtcgctctgcaacttttctatctgagcgcatctatcaacccaatcctctacaacctcatttcaaagaagtacagagcggcggcctttaaactgctgctcgcaaggaagtccaggccgagaggcttccacagaagcagggacactgcgggggaagttgcaggggacactggaggagacacggtgggctacaccgagacaagcgctaacgtgaagacgatgggataa

SEQ ID NO: 77 - DNA, 38646 bp, Homo sapiens
atgttgcccttgattctaggcagagacaggaggcatcagacagctgtgacagccatggagctcccctaccacttctgagccagagggaagactttggagaagcagaagcccaaagacactgctgggagattggtctgtgctctgggagaaccctaggttgtgtttcccgtgtacaagccaccgatcttgtggaaggtaccaccactcccagccccgcttggctgagggctgcgggccacaggttttcaggaccgtgcttgtggttggaggctgtggactcaagtgcggctggcccgggactttcacagggcgcagggcgggctaggggaaggcccagctgtgaactgataagggggttttacagtctaggccagcacttcttcccctttcacgggcaaacgtgacattctttttcagcacctgtactcacccagctgcatcaaggcggaccagacttgtccaactcacagccccaaaagtcagggcagaataaagcacagtggctgattttagcatttttaaaatagaaatgtgagtcagcacctgatggacctcacagatccctgctatgccacgagggctgctgactggccttaaaagctcagggtggcccggggagctctcagagcaggcctgcttctcacagctgagccgctcagtgctgggggctggtgttgagtgggtgggaaccagccaggttccccgtggagtctgtgcaggaggctctggagggtctggggtagattccctggggagagacttctgtcatttgctttcctccaaggcagcctcagggtctagctggcaagtggtcactttcctgcagaaacatgctatcctcctgttctatcagataaggagggcagaatgaagaggttgggtggaaccctggccttggagtctggagactaggattttactcttgacaaagcacattatatagatagggatattgtcctccaattttcctttcacttccttaattaatattgttatcaatactactgttgatgtattgaactcctgccatcttccaggcactgtgctgaacacttcaccaaacactagagaattaaatcctcacaaccctatgaaagaggtactcttattcctatatgcacatggggaaactgagccttcaggaggttgagaaagttttccaaggtcaccaaacaggatgactttggacccagtctgttaatcatccccctctagagcaccattgatcaaaatggacttgaccatattcctctttggactggttacttagcaaaaaacagaaaaattatttaacaattgtttaaaaccacctctaagtttctctggatatctcattatataagagaggtctcacctctttggctcccacccagctcaactatggaaacacaggctgtaaatttttatagcccaaatcctagtgtccaccactttctgtgctctagtcccactagctgctcttggccctgccactcctggctccccggccttagtgagtttgggaaacatccctccagttcaaccttggcaccttcccttggacacacattaggtattatttctccttcagctgaaggctttgtagctattgaaaggcaaggcatctcttgatgtgagccttgaaggacaggttgctttgggtaggcagagagaagctggtaaggcgtatattgtctaagggtctggaggtggggtataaggggtatacaagtcatagagttggggataggcagaacccagagaggggagaaaactggcctgagatagaagaccttgcaagggagaaggagggtaggagcctggatggtgtgaaatgctagaggtgcatggctggaatggagggggtggggcaccaggcttcagatgcttctgggtgcagatgcagattttcaggatgtacaacatggagcatccccaaggcaactgtgttgagagcctgcgaggcaggtgaatgtggatcttctaccccctctcctgactgagttcaccaaggaacaagctttgtaaactatttgagggtaggggctgtgattatttactctcatatcctcagagcctggtgttgaggttggtgctttgtaggcacccagggactttcaaatgaatgaagggagggagggaggaaagaaggatgggtccatagtaggacctggtgatgggctgggagctccaggcaaatgtcaaccaatccctctcctgggtcagctcccaggggctcacccttctttgcatttccagctctcatgaggtcattgtgcacaggaaagctctctcctctaatctcctctgatcctactgcaccagagaaatcaagccagaattcaataaagtctcagtccagataaacaagacaaaagaaataagattcgagtagaagatctccttcaagggaaagttgctgtgtttgtccaagacctttgtcccatccatgtatcatcccccaagtaaacacttcttgttcacctgttcattagatttcaagtgcagtccctggcctgtaagtccctacaatgataagcttctcttatcattgcacattcttcatcaggaggatgccagaggagctcagccaacagttcctcatcagtagcagattcttcagaatcttgggcactacacagatgcccttgagctctttgaataaaggctgatttttagaaaaaacattaagacagaacttaaaaacaatagattgactataatccaaagacgagtgtacctctaaccacaattttcatttatttttaaatgtttccttcatggcctttcttgtggctcaccctatgcagtttgtgtatttgttgacaactttatgtgtttttaatatggtttttgccaaacttggtttttccgagaccgtcttttctcagaggctcagttttaccgtcctatctgcagtcggctactttcagtggcagaagaggccacatctgcttcctgtaggccctctgggcagaagcatgcgctggtgtctcctcctgatctgggcccaggggctgaggcaggctcccctcgcctcaggtaaggcctgaaacccagcagagcagcagggaggaaaaacaaggctaagcttggttggagacttgggtgcttgtgtagggaagactccaagagcatgccacagctgcttgagagaaagaaattgcaacttttagagtcctgtgtactcttatttaagaaaggacaatctctgagaatgaggtggggttctgtttttggtggcagatgaaggactttgcagacttccggggttggaggagcctgactggccagcacaagaaggagcaggagaagaagaagggctgggcaggaggcattgccagtttgcttttagaagctcattcctgctccagcttcttttctgttgcctttcaggaactttccaggaaaacattataagttctctgtgaattgaaaatgtctttttcacagattccagaggttctaccactagagactgattttttgttaaatttatttcttctatattaaaaatcagagtcaaatatttctgagggaggggaacacaaatatttaaaaactgtggtataaattagtttttatgttgccttctgaactatctgaggatggagatgtgcccagggttgctggggagaggttaagtgctgagagggtggttatgcctgggagaagcagggtttcctgctaagcttcctttgctattggatttcttggctttcctgaaggttttttcaggcactgcaaatgacaatcaaccaaacagcaaggttttatttcaaaggataatgcatccagcatagaactaggccgcaggaagaaacataaaaacaaaacaaaataaaaacagaagaggtggtatcagctgacaagggcttatattctaagtgggtagacaaaataggcctacgaaaataacaagctggccatgaagctacatagcagaatatgcgagggggcaacgtgctaagttgtgtagtcataagccaggcatttagtaaggtgctaattatacaatacaggcagtgaatgtgaaaggaaaagggaggttgagatgggctgaggtcttctaggaggcggggagggagtgcagccttgacaagcctccctgtgggcgaggtgtaaagaggggcagaagtcagctctggaagcatagggcagtgggtggggaggagatgggctgggctgggctggagtagagatgtgtggagaagggtgagaagactggaaagacaacctgaatgggggactgggagccttgaataacaggcatggagaggagcgtctcttgaaatggaagaaacaggaaataattacagcctctatggaggagcaacaggatggactggagaaactatcattccaaaatccagttggggcctcaaaggcccttagaatttttctaggaaggttgaaggccagctgctgacccaggactcacatgtgcttcgtcctcttccctaggaatgatgacaggcacaatagaaacaacggggaacatttctgcagagaaaggtggctctatcatcttacaatgtcacctctcctccaccacggcacaagtgacccaggtcaactgggagcagcaggaccagcttctggccatttgtaatgctgacttggggtggcacatctccccatccttcaaggatcgagtggccccaggtcccggcctgggcctcaccctccagtcgctgaccgtgaacgatacaggggagtacttctgcatctatcacacctaccctgatgggacgtacactgggagaatcttcctggaggtcctagaaagctcaggtattcctgctggagcaagttggtggataaacctctccctctagcatagaaaatgcaatcctgaaacactgcacagcagggcttctcaattcgggatcacatttgaatcacctgaggagattttaaatcatactgatgccgaggcctcacccagaccaattcaatcagaatccctaatagcagagctaaacaagggtaaggtctaaaagcatttccaggtgattctaatgggcagccaatactgagaaccactgttcttatgtaagaagcacatcttacctatatttcctaggaagaccagttgatgaggtcatatgcaaaagttcccatttattggtttagtataattgtgcaaattagaattaacccctaagtgtataaagagtagagctggttaaaaacatagcctgtgctaagtttaattgtacagtaatttacatttgtgtggtacttccaagtttcccaaatgccctcatatttgttatccacctgtacatttaaaccaattcccagaggttagaaaaggattcttatcttatctgagagacagtatagcaccatggttaaaagctcagactctgacaccagacagtctgggtgcaaatcctggctctgctgttgccctcagacaggatttcttagcttctctgtgtatcagttttctcatctgtgaaaggaggatgaatataagaccttatgcgatgctaatgtaggattaaattccctactacaagaaaatggtcttagaacaatgcctggaacatggtaagtgctgtataagtgttaactattagtatgattcccatttgtttgatgcaggcagaagctggagcttggagttgctcagagtggtagagctgattttaacacagatgtttttgttctactaaactgcatcctcagaactcctatttactgctgtcagttatgttgaagattaagttatatggttgcaaaatatgtgtaaactgagaagataaaaggttaccttaaagtttcctttcaaatgttacttctttttttttttttttttttttgagacggagtttcgctcttgttgcccaggctggagtgcaatggcgcaatctcagctcactgcaacttccgcctcctgagttcaagcgattctctcctgcctcagcctcctgagtatctgggattacaggcacccaccaccatgcccggctaattttgtatttttagtagagacagggtttcttcacgttggtcaggctggtctcaaactcccgacctccagtgatctgcccgcctcagcctcccaaagtgttacttcttaactgatttcacataggccaaacaaagactggttaagagttgaggctctggaattgcactgtctggggttgactattgcagttgaccccacgaagtctgggtaaattatgtactttttttctcagttttcttgtcgataaaatgtggcaaataatttcatgagctgatacaagtaaggtcttacaacagtgctagataggtaataagcttaacttcataagggctagtttttatgctatttattggttcatggttagaggaggcctgggacaataagcagggcaggggacctagattctggcaaagtaaccaagtgatggccttgaccattctgggctctttaccccagtgtcatatgccagaggacccatcaccagacggcaggaccgggaacagggagggagttcatcaggcagaaggcccctgtggagtggtagtaccagcaactgaagaccaaatgggagctatgtctggttgctaatctccaggccaggccattcatggagatcggtggtcctgacatgcacactcctccccaagaccacagtggcacggctatttcccagcctgaacctggggaaatgaaggtgcaaatttcttctctgtggctcatggacccctggggagagagatcagaagatgttctattggacccctgtgcagcctccccacaaagcctgtatgtttccacccttttgccattgcagactccagggaacaccattggtcactcggctcttccctcttgtttcccaagtggtcagttgcttatgtggaatgcaaactctccttaattacttgcattagcacaaaccctggcttctttttgaacctaatctcaaaccttagtccaagtccctatcctaatactatctgtaatatttaagctattcctaaccttaatgctaaaattgtacttaaccccaaagtcaacctggttaataggcagaagttttaagtaacccttatacagagtctgccccttccccaccctgcatgtagtgatgtcatgcttactcagggctgcttctgtttcaaagaccttgatatctttgttctatgaccataactgtgaatggagacattggtgcttttatttcaaaccaaaaattccaaatgaaattgatacatctaatatcccaagttccactctggtcccaattgtatctcgaacttatccttaaacctaaccaaactcattatcataatcttccctaaacctcaacatgcttttcactccatctatcttcatctgtccccaaggtgtaagagaacccaggcctaaccctgcctccaatctggctctgtccccaaactgatcatatatcctttcctggttttatggatagccctctgcagcccctcttacctgctgcagtgtgttctctatgacccctgtgctttccatctgtcctctttactccagagctaactgtatggctatggctaaccagaagccgtcctggccaactgtgactgagtccctcaaggcaggaggaacatgttctggggaatttgaattgtgcaggcaccacccttgtcttatggattggattcctaagccaccttttagcaacccagacccttaggtagagggatgagatgtgaggcttctgctgcatcctttgaagactcccctggatacctgagccctacctgagctgctggggcagactggaaacctacctacagcgcagcatgcatgggggtgatggtgttctttttctcacattcttcttgggtcagatcttactcatctcttcaaaactcccctcctgcatcttcttgcttccacttacatgttatctcttaatgaaatgcactagttcatgatttcacttatgccacaaatatttatatttactgagcattcgctatgtgtcagatgctgagaaaacagcaaaggataagagtccagagcctcatgccctccagggtttcacagcctagctggaaataagtgttataggcttaagggaaaaggttacatactttttttcatttttgtaatttaatgttaactttattttaattttgaattaaatatttttattgatatgatttcatatttgaagttcaataaaagaaaatattcactttctgagtttttttctggaactactatttgtttcatttcatgattaccaaaaatgattttgtcaaatagaagaaacgaatgttaaaatgacctgctctggtatcaaatatacaaggtacaccactgctgaaaatatcagtcattgatttcatgatgggccagatggatactctgctgttcaaagtgttgggcttaaaggctccagtcccatggttacacaaagggcttggccaatcctcccctctctgccgtgaagctcaggctgccctggggaaatcagcttcacttctggcttctgccactcatctctgttttgtcctccctctagtggctgagcacggtgccaggttccagattccattgcttggagccatggccgcgacgctggtggtcatctgcacagcagtcatcgtggtggtcgcgttgactagaaaggtaatggctccggctgcacaccgcagtcatgggcacccccacgtctggcacccgggtcctttcaggttctctttccacccagagagagacccagatgtgatcttcccgagtgctctttgtgcctttttcctggcatttgttctgcctattagtgcagttatttatgctcttccgttgtccctctcatagggagggaccccctggacagctggacctgtttcctacccatcttgctgtcatttgtaactcctggtttctgcttatcccttaagccactgctctgagagtttaatttatctactatgattttgatgcatcgtgggcatctatatatgctagagctttctgcacattagctcttttgattattacaactctctggtagtgctaggttacccagcatgtctgtagaatgagaaataaacactccaaaaatgtagggttaggccaggagctgtggctcacacctcagaagccacagatatggctggtgctattgggaaagtcaatgatctgtaatattttcatttatgtgttggctatcacaatagacataattccacccactcgggagactgtggcgggaggatcacttgactctaggagttcaaggctgcagtgagctatgactgcactccagcgtgggcaacagagcaagactctatctctaaaaaaaaaaaaaaattggtggtaaagtgggcatggcaagatcagcaggttgtaaatcctctgtttagcttaagagcttatgtggctgaaagagtaatgaatggggaattgaaagatctagtttctagttttggcactgagtgtatgcttttaggaaagttacttaatctttcaaggtcttcatttccttatatataaaatggggatttgtcttagtctattttctgccgctgtaacagaatacaattattgggaaatttataaagaaaagaagtttatttggctcatggttctggaggctgggaagtccaggagcatggtgtatttggcgaggttcatcccacggcagaaggcatcatgtgatgagtgcatgcatgtgagagagagagagaaatgaggccaaattcatccttttaattaggaacttactcccatgatacctaacccactcctgagataatggcattaatcccttcatgagggcagatcttcatggcctaatcacctcttaaaagcattaccacttaatactattacaatggtaattaagtttccaacacatggccttttgggggacacattaaaaccatagctgtattataattcggcttactctatatcatagagttgtgatgaacaagtggcatatttcatgtaaaatctttataaataacaaagaattatatcagtgaaatttatgtcatcagctactggtattgattgggaggagtgaaagaatttccactccttgttttgtctgatctcttgggccctttaagtcagctcagcccaggtcaccttaattcaagtcaccacataaatattttgggaaacacaagtttgtaatttctacctttaccccagaccctccacctgagatcctaacccacttttcctccaactctaattccattcaattaacaactcagttctgcagcctggttgaactgcagtggctgagacatggctggtgctattgggaaagtcaatgatctataatattttcatttatgtgttggctatcacaatagacataatgaggaaatgaaccctctatgggaaggtgaggacaagagaaatgattgaatagaggggggaggtgaagaagatgaaagttgatctcttagctgggaagggagctgctatggtggttggtgaacaggttctctgctgttagcagtgtcctgatggtctggaataaaagaatcaaaggctctttagaaggagctgaacaacttttcctgttaaggattcaagactggttaattttcattctgggcacctggactaactttggtcatctggagggtagagaaagagaaaaaggtgaagagacctattgagtcctgttgctccctttctacagtgtttgattccccagccctctctgacatttccactgcttcctgtgtagtgtgggtcctctctgcatctttcctgtgctttggatatagttgtcagtcttctgtctctctctccttgctcaaagcattttatagttgcattattcagggttccagcagggaacatgtagtactcaaactgggttgtttgaagacagtttaataataggatttccagaagtctagtaggatgtaaggacaccacaaggaggagtagcaaggtgctgtaaccattcctagttcttcaaagggtaggggaggggctaattattggagcctggaaggagagagttatgtggaggggtctccttcagaagtgctgtagtctttgctggagggtcacaaccagtccaaggccaccctgcagaaagaacaaagggaactacataccctcatctcattcctctctccattcccctactgttgctttgcattggctgacctcaaacttaggatggaggataaggggactcattgatgtagtacatttagtacagtcttcatagggcacagaatagggtggagaaggttagagagcagagccaagaggcaaatggctggtatccattcaagtagtgctcatagacatgaacactggacaaaggatcttgactttccacagggttggctggcttcagccttctctcttgtagtcttgacctcttttgattatgtatgtaagcaatacccttcttggctgcccagctgtatctctcctgggcacactgtgctctattaaccattttaatattcccatggatcaggctttcttggctcccattgaagtaattacatccattttgtttctttaagtgctgctatctgttctgtactattttgggatctcctcatcctcattgctactaggaatccagttctgtaaaagcatctcctattttagccctagcctatagaggagagatgccaccaaacttctcaatgatgctggagctcccctagcacattcttttccagcttagtaaaagggatattctttttctttttcctttttcccctttattgttgctattatcttaagggatgttctctggatcttccctagaaaagtcaatataatcagctattggattttggaaattattcagtacagggattggcaaaatttctctgtaaagaggcagatagtatatctttttgggtttgtaggtcatatggtctctgttgcaacaattcaactctgccattgtagtgtgaaagtgctatagattatatacaaatgaatgactatgactctgttccaacaaacctttatttataaacactaaaatgttaatttcatataatttttatgtgtaataaaatattcgtttttctttctataaatttttatgttttaattttttatatattttttatttcaataggtttttggggaataagtcctttagtggtgatttctgagattttggtgcacccatcacccgaacagtgtacactgtacccagtgtgtagtcctttatccctcagccctctcccactcttttccctgagtccccaaagtccattagtcccttgtatcattcttaacgcctttgcgtcctcatagcttagctcccacttctgagtgagaacatacaatgtttggtttttcattcctgagttacttcacttatagtagtggtttccaattccatccaggctgctgcaaatgccattattttgttcctttttatggctgagtagtattccatggtgtgtatatatatatgtatatatatatacacatatatatgtatatatatacacatatatatgtatatatatatacatatatatgtatatatatatatacatatatatgtatatatatatatacatatatatgtatatatatacacacacacacacacacacacacacagacacattacaatttctttatccactcattgattgatgggcatttgggctggttccatatttttgcaattgcaaattgtgctgctttttgtataatgacttcttttcctctggatagatacccagtagtgggattactggattaaatcatagttctacttttagttccttaaggaatctccacactgttttccatagtcatactagtttacattcccacaagcagtgtaaaagtgttcccctttcaccacatccatgccaacatgggttatttttttattttttgattaaggccattcttacaagagtaaggtggtattgtgttttgatttgcgtttccctgataattagtgatgttgagcattttttcatatgtttgttggccatttgtatatccttttctgagaattgtctttttatgtccttagcccactttttgatgggatttttttttcagctgatttgtttgagttccttgtagattctggatattagtcctttgttggatatataatttacaaatattttctcccaatctgtgggctgtttactctgctgattatttcttttgctgtgcagaagatattactttttaaaactatttttgttttaaaaaaacacttaaaatataaaagccatctttagttcaagggctgtaaaaaaccagcagtgggccatatttgacccacaaaactcagtttgccatttctgatttagtaggtttattctctgagcattttgttccccttttccatagtttgccaaagcagtgttgtcatctctattgacagcagtatatcagaatcatctcctggggcccttgtgagggtgttaaatattgagcgttccaatattgacgcattatccctcatccaggcttatgttctaccccctaccacaatccatcaccttcagaattcatgcctaggcatcttctcccagtccctgccagtagatgttagccaggtcctgtagtatataacctttctattctcttagcagacccagcacttcctccattagcatgggctgagattttatcctaattacgggcctgatggacagtaggggaggcagaggcagggcccagcagggattcttttccatcaaggggaagtgggccacttctgcagctccagatggtataagagaagcaggtggttcctggctctcaaatgcatctttccagagatcctcattccaagtttcaggagactcctcctctactatcaagatgctagctttggcatagaaaatttacctaggcttagaatcagccttctttaaagtcctgtccctcttacaattagcttatgtacctggtcttcagctgtggatagacgagtgtcttttaaatgctgccaaggaggagctttaactctcacactttgagttgctgatagatctgaggctgtcattttctcacttcagtccatcggtgcaatttagcaaaagtcaattttgagtcctaatattaactattaccctatactgttgacccaattccagagttctaacactaactatttaccctatacacctcaaatgttagagtcagtgcaccagctcatagtttccatccatctgtgtcccatctcatttcaccaccagtcatggggtttgtgttgccatctagcaggtgaatgatcccattccacaatcctgttcttacaggctgccttctaggactattcccagcagcaactgttttagatcaggtccccggaaatagagcctgacatgcaaattttggtgagagtgacttattgggacagctctcagatgaaaagtagtgaaggaagcagtatagggagggctaagggaagaaagctcagcatggatatggtctcagctggagacttggctgaagcaagaattgtacagagtcggttgaacctttaggcagggagctggcattttggaaatccacctaggtcagtcattacttctggctgctcaccagcgagggcccaagagcaattctccagagaaggggctgctgtgagctcacagcgtacactcccagcatctggaaaatgggagtgctggtcaggtagagagatctgagcaggaactgtacattagttatgggtctccggagggacagaaccaataggagatatagatggatggatggatggatggatggatggatggatggatggatggatggttggatggatggatgggtgggtggatggatggatggatagatagatagatagatagatagatagatagatagatagatgaggagggatttgttaggggaatttgttcaggtgattgtaaaggctgagaagtctcaccacaggctgtctgcaagctggagaccttgggatgctggtagcatggctcagttcaagtccaacagcctcagaaccactgaggctgttggtgtaattctcagtccaaggctaagggcctgaaaacccagggtcaggagcactggtttaagtcctggagtccgaaagccagggagcctggtgtcctgatgtccaaggacaggatgagaagagtgtgtcccaactccaaagagagaaagtacaattttgcctctcttctgttttgggaaaggcaggcctccaggtgagtggatggtgcttggctacatttagagtgtatcttacctactcacttcactcagactgacatgccaatctcctttggaaacaccctcacagacacacccaaaatgggctttactagctctctcagctcccttaatccagttaagatgatacctaaaattagctatgacaggcacaacagcattcactacagaccttgagagcccatagactgtgttatttaggagcatgttctttggaatcagacagtcctaggtttgggtcccaactcaaccacttgagtagctgtaccacctaactttgatgaacctcagttttctcatctgtaaaatgccgataattatggcattgccttcataaggtcatgagaaaacttcagtcaaataataattaatgtaaggcacttagcatttttcctagcatgtaagctggaaaggtgagtgggaccatcacaagggatgtttttgggatcatcacaagggatgttttggggatcatcacagtttcttatgaggaatgtagtgaaattatggattttcttcttgggcaaaattttctatacaatttacaaatcccctgaaatccagctgtgcatctcaggttaagcaccctcctatatacagtggagccattgaagagttttaggcagaaatatggactgacacaacttttgtttttgaaaatcactctgctggcgaccatgtggagttggactagaagtaagagggagtccagagacagtgaggatgaagcccaggtgtgagagaagacatggatatagagatggaaaagagggagtagatttcagaactgcctaggattaaaattggatgaagttttacagataaattgagttgaacattagcctccagatttctgctcagctggtgccataaaccagggcagtgaatataggggcaggagtggtttgttggggcaggaatgtgatggtgtcgtttgagacaatttgagtctgagcttgccgtgggtcatcaggtgatgatgcccagtggacaggtggacacctgcatctggagctcagggcagaagcctgggctagtttagatagagatttgggcatcttcagaggacagatggtggttgtagatgtaagaaagtagatgctcatgaaatcactcagagagcatgtttagcgtgagagaaagcagagagcagaaccctggggaaccccacggtttggggagctgatgtgcaaagagaaaaggggcaggcctggctgaagacgaaggtgggggttcaaaggaggagaagaaaatcaggagagagtgatgccaaaggatccagagaaagagaacatttcagaaagtaagaggtcgacagagtcaagtgcagtaaacagtacaagaaaatagagaatggaaagctgcctcactaagcttagtgaacaggaagtaacaaggtgtgtggcacgtggtatatgtagtaagtgcagtttccatggactagttagcatttaaatctagctgtaacgcggttgagaaattaagggctaaggaattggtgttggtaagaacataagtttgctggtgtgcatgtgtgtaagaaaggaagagagagatgtcatattggggattaactgttgaataacatccccacatactcactttgtagtttgtttgtttttagaagaaagccctcagaatccattctgtggaaggtgacctcaggagaaaatcagctggacaggaggaatggagccccagtgctccctcacccccaggaagctgtgtccaggcagaagctgcacctgctgggctctgtggagagcagcggggagaggactgtgccgagctgcatgactacttcaatgtcctgagttacagaagcctgggtaactgcagcttcttcacagagactggttagcaaccagaggcatcttctggaagatacacttttgtctttgctattatagatgaatatataagcagctgtactctccatcagtgctgcgtgtgtgtgtgtgtgtgtatgtgtgtgtgtgttcagttgagtgaataaatgtcatcctcttctccatcttcatttccttggccttttcgttctattccattttgcattatggcaggcctagggtgagtaacgtggatcttgatcataaatgcaaaattaaaaaatatcttgacctggttttaaatctggcagtttgagcagatcctatgtctctgagagacacattcctcataatggccagcattttgggctacaaggttttgtggttgatgatgaggatggcatgactgcagagccatcctcatctcattttttcacgtcattttcagtaactttcactcattcaaaggcaggttataagtaagtcctggtagcagcctctatggggagatttgagagtgactaaatcttggtatctgccctcaagaacttacagttaaatggggagacaatgttgtcatgaaaaggtattatagtaaggagagaaggagacatacacaggccttcaggaagagacgacagtttggggtgaggtagttggcataggcttatctgtgatgaagtggcctgggagcaccaaggggatgttgaggctagtctgggaggagcaggagttttgtctagggaacttgtaggaaattcttggagctgaaagtcccacaaagaaggccctggcaccaagggagtcagcaaacttcagattttattctctgggcaggcatttcaagtttccttttgctgtgacatactcatccattagacagcctgatacaggcctgtagcctcttccggccgtgtgtgctggggaagccccaggaaacgcacatgcccacacagggagccaagtcgtagcatttgggccttgatctaccttttctgcatcaatacactcttgagcctttgaaaaaagaacgtttcccactaaaaagaaaatgtggatttttaaaatagggactcttcctaggggaaaaaggggggctgggagtgatagagggtttaaaaaataaacaccttcaaactaacttcttcgaacccttttattcactccctgacgactttgtgctggggttggggtaactgaaccgcttatttctgtttaattgcattcaggctggatcttagaagacttttatccttccaccatctctctcagaggaatgagcggggaggttggatttactggtgactgattttctttcatgggccaaggaactgaaagagaatgtgaagcaaggttgtgtcttgcgcatggttaaaaataaagcattgtcctgcttcctaagacttagactggggttgacaattgttttagcaacaagacaattcaactatttctcctaggatttttattattattattttttcacttttctaccaaatgggttacataggaagaatgaactgaaatctgtccagagctccaagtcctttggaagaaagattagatgaacgtaaaaatgttgttgtttgctgtggcagtttacagcatttttcttgcaaaattagtgcaaatctgttggaaatagaacacaattcacaaattggaagtgaactaaaatgtaatgacgaaaagggagtagtgttttgatttggaggaggtgtatattcggcagaggttggactgagagttgggtgttatttaacataattatggtaattgggaaacatttataaacactattgggatggtgataaaatacaaaagggcctatagatgttagaaatgggtcaggttactgaaatgggattcaatttgaaaaaaatttttttaaatagaactcactgaactagattctcctctgagaaccagagaagaccatttcatagttggattcctggagacatgcgctatccaccacgtagccactttccacatgtggccatcaaccacttaagatggggttagtttaaatcaagatgtgctgttataattggtataagcataaaatcacactagattctggagatttaatatgaataataagaatactatttcagtagttttggtatattgtgtgtcaaaaatgataatattttggatgtattgggtgaaataaaatattaacattagtttcatgcttctttttatctttttaacgtggctactggaaagtctaaaattgcatatgtggctctcatatttctatgtgactgtgctgctctagtagctaaacccaagccaaactgatacccagggagggtgtctatctatgtctattggtctccatttctttttctttcaaaatagtgtttgaggaagattttcctgcttatgatgtcttttgggaaatatgtagggaagcatcacagagaagattgaggaaggggaacactcagtgctgacaggaagcgatgccaggcttttctgggtcccctcgtggattccctaacaggaggagcgaatagacaaatctatgaatgagcattcaaggaggaatacattactgattccctgaccacattctaagcctgggcgtacaagtctgatctataatcctgagaattatactaaagaaacgtgagaaactttgagtcatggagctttgagatagatggtcttcatgagtgaacaggacctcactatgcaattttatttcctgccttttccccttttcatttctcaccactgtgagccccagaaatgagtcgtcatacactcaggttcattcagattccatcagtgctgagctggacaggcagggaggctgggtgtgaggtccaccaatgacagcattctggtgggcacacctcaccccacagagagggggcaatgggcagtgtggctgtcatttgtggggtgtgagttttgtttagtctcctgattctttcaggtgctgcttcatagctgtaactggtagtttcccacacttactccaagtcacacctgtcaagaggtacaggggagctttttgtgtggcaagagcctgagctttctggaagtcacaacgatatactcaatgtttgaggtaatttatttgcataaggtagtgtaggacaatgctatccaaagaactttctgcaattatggaaatgctctatgtctgtcccatccagtatggtagccattagctgcatgtggctgttgagcacttgaaatttggctaatgtgacaaagaaactgaattttaaattttatttcattgtaattaacaaatttaaatgtaaatagcaacatgtgactggtggctagtatattggacattccaattctagtaattgccttgcatatagagaaaacacagacagctgtgtttataggacattggatggctcgccagttgttatgcatttgaaatggctatcaccaggaagaaacttgaaggttctcctctactctcctatatccatcctctgatcgagacaaaccatgaggtcaaagcaggctgtacatttatttatttcaggttttttcaaaaaaaaaaatctgaggcagctaagtggtccagttcatgtaaatagggccaaaattgtcaagaaatttgcaactcataggggttatgcagaaatagactgtcatcacaggacttaccatagactatattcattctgacttcatgtaggctgtgaagagcaccttctctgggactaaaactctgatggacttcacagagatcaaaaaagaagtaatcatggagtgtagtggacagggaatttagaaacttggtccaagtgctgagctctgcaattagtttcacgactttggataagccacttaacctatcaaagactcataaatatttcctcatttataaaatggtaatattactatctttctaagattcttaagaagatgaggcaggaacgtggctgactgctttgtgagctgcaagatgctgggttaatattattgtgttctgccccaggaacacgtgcaccaggtaatgctaatgatgccacagaagttttcatggaggcaacaaaactggcttggagcaactgaggtatctgaaattatctatcaatcaatgttcttaaaaactgagatataaggaaagctaagagttgcagatacagccttggggtccacaagttctctgcaagcgtttaaacattgtgtgttttaagtgaaatgataatcttcaaagaagtcatctatatctggatgttgatagccttcttaaaacagagtgttgtcattggttttagcctctatgtttgtgtttatacatataaacttgattataatcaagtttatttaaaggcacagaagcttaatttataaatgattcatttactcccagatgggtggagaagtggaagactttgcagtattgaactaacaggaaagtgaagcgataattgctttactttgcacactgtagtgtagggatgttgtattcagaagggtgtgtgcagtacacttaactttgtgagccatgacttagattcaggaaagcatcattctatgcactcattgttattgtagacattactaattttatagttttacttgtacttaattagtaacttgtagttttataattctacaagggatataagcatagtaagttcacttgtcgttgtgtttgagcctatttaagaatgtctataataaaataattatgcatattatgaatttattactagatattataataagaataattattttattattatcgcctcccattgaggaggtctgtgaaactattttttttccttcatatgggcatacacacattactcaagtttgagaataatggtatggtataaatattattggatttcagaaaacctgacctcaggcactagtttattgttttttattggaaaaacacatatttctgaacctgtgtttttataaattagtgcaatcatagctacatcacaatatttacagtataactgtgaagatgaaggatattaaggagaaactttgtaaactgtgaagtaccatatgagtagcgtatgtgtcatttacaattattacagcctgtatataaatcgcaccacaatgtttttaacaggtacagaagaaaacttaagagtgtgtggatagtgcaaagagagatccaagactttgggtgaagctggctggcattgttaagaagatgttggttcacagaaatgatatagagacaaattatgcatcatgaaaatattttcttcctctttatacttctagactatcaatcaggttgacttagaagttcagcaattgagttgcaagaagtaaatatttaaattcacagtggtaatgttgaaatctcaggaatttattgacatcctttcagtctagaggtctcttgatgactctccccatcccaagctcatgcctggatatttttgtgctcctcacactggtggaaatgtctgtccacactcagcttctccaactcaaagcttagtgttcttgcgagtccccaaactagaccgcttattctttggaccctttcttgactcactctagccattatcaacttcctgttagtttagaaactcccttggcattgagagtctgaatggcacaatctagctcttgattttatacaaacctctcttcatgtctagttgttagattttaagccttctcatggctgaaataatttcctctcttttattcatacattgcacagtgctgactgaaatacagaagacattgtgaatttaatttgtgttgacttcaccaaggacaaacaagatataagttttcttcaccatattagcactttctgtaagaatgatgagatcagagagctctttatggccagggtcactataacaaagaatctatgggccaaataggagtcccttatgagtctccaaagtcattaaagaggggcatgttttgtgccatgaactttccttttttgcatatggagctgagaaacccaaaagttaaaaaggagactcagtgatagattcatggataacagagatgggtggaaacaagaataggtgggcatagtgttataatatgggattgattatttccacagcaggcagactgtgatttgcatgtggaaaaggaaaaaatgtgaatcaatttgtagagcaataagtgatccttgtcatttttgaggtttgaatatgtataagacaatacaccaatttgctttatatttcctcaaagtgacttcgacatcaccaatcctgtctgtagttcctacttcttgtattgagaagactaatatactcagagtttttctggccttgtaggtagagtcctcagtttggataaataatctcagattagacatagaatacaatgtgtgaaagaatgtggagaactgcctaaaacagaaactacagtataaagaagacacaataggaaaccaagagaagagtttttttttttttaattattccttcatattcaaacttcacaaacagtgtgaacttgtacaatacctcggaaagtgaaacttacaaaaaaagtgctggtaacatttaaaaaaaaaacaacaaaaaccccaaaaaaacaaacatcattcttagcaacatcaattactcttccacacaaaacagaaaccttgtaaaatttattttcgtatttttaaggcgtaatacttccgtataaagtatatgcaagagataaaacttcacagtattccaaaatgtcacaataataataataatataatagtataatgaagcgctacagttaatttttctttttttgaatgttttttttcctgtttaaataacaaatacaagtcacaggtaaatatacgtgagaaaaatacgaggctaatattaaatggcaggtaaggatactgtcactgtaagaaaaaactggcaggatgtgtgtatttagtctatattttaaagcacttgatagaaaaggcgtatgcaaggtttttccaaacaatttttctgtttgtttgtttgataactgacaacaatttaagagtataatgagaaaaaaaaaggaacaaactccctctcaaaactattgacctgctcatcccaaaccatgtatatgttgatggatggatgtgtgtttttgtggatatatggatttataccgtgcacagagtgatacaagcagtgttccatgcccacctgcaaagattggagggtataacactgcagtcattcagcccaggttcctcttaggaaattaacctttcaatttaaagctctctttccttgcctctccctctttccaaactcttcctcaattcccaggtctttgttctgaaaagacaatctggttagaaaagttgccctccactcataattcactgggaaatggaaactgcataaacagtgacacacagacactggaaacaccacttgaatgaatgaatgaatggatatgtatgtgtgtgtgcatgtgtgtatgttttaggtcacataaacatacagtgtgtgcgtgggtgtgtgtattttaggtctaaacatacagtgtgtgtgtgtgtgtgtgtgtgtgtgtgtgtgtgtgtacacagtagcaattgcaaaaaagggaccatattcctttccatactaagatacaatgtgataagaaacatttctgtgcagggaaaaaggtttcttcgaatcttatcacaacactgcggcgggaaaatcaggaaatgggttcacctttcagcagtcaccacagtaaacttcattgagaacatacatgcccagatatctcttctgtgcacatgtatatgttaacagctagccattcagccaacaggtaacagaaagacagcagatagcaaacacatcaataaggtgctcaaagaaaaaagtggcacccacttctcaaatggatggccacgttaaggtgcttcaaaaaaggttttttgtttttttgttttttttttcagtttttatttcaaacattaagagagtactgattttcacatggtagttctgagtcaggccaaaggttttgaggtttctgacatctttcactgaaaagggctttcactgtagtagttttgttcagtttgttgtgggtgacgagtttaaaaatgtttttcatagccagaaactgaaatcaaatcaacatgactaaaagaaataactgatgaaatggtatatagaacattactgcattcgcatcggatcaagatggtttcgcccatttttcctttttcactaacactgttcctttttttccttgttacaatccattctttatgaacatacagaaatgaccaaagtcactgcaagtagctgtttttattttttgtgatctgttgcaagagtccaaccttgtttcctctgctgctgtttgtgtagcatctggttttgtaatgagcatctggatttgtaatgagcatctgattttgttatgtgcatgtgtgtatatatgcacatatacacacctatacatgtataatatatacactatatatatgtggatacatataggaagtgtgtatacatttatacataatatagtgtatatcgtttcaactggagataaactgaactgggttcagacactagcacatgcttaactttcccctgctccctctgtatattttaaacagtctggagctttaatttattttttaaagtgcattttcaatgcagaaaaactgtaatccactgattccttggaaaacatttttgatgagaaaaatctgacagttctcagccccaagcaagagaaacctgggtttggtcatgctgggggctgacgtggcagtgccaggctcgtgcctgagtgattaatggacattctggactccgggcaccttagcagcagcagcagcacctttatgagaaggtagagatagaaaaggaagaaggaaggaaagctcagatgaggaagaatgaagtattgtgtttacgtatcaaaattgctaactttgactataatggacttgtgcagttcctgttggcctcggctaagagatgccatctagtcccttctccaccaactgacaccaaactccccatggcccctgcatgctcaaacatcacccatatgtccccacgcctaaggctgacttctgtgtcagcttcttgtgggtatgtgagtgccagcatcaagtaggaataaggcaccagagaaatcaaaatgttacaaaaagatgcaaaccccatttcaaagagcctctcccattgctccattaaaatattgcatgtgataccattcgtttgtgtgtacctaaagtgtgtcaaatacagtctctgaaaggaactcgaggcccttcagcaccagagatcttcaggaatgcatcttttttctaaacacacccacaccacccccaaccccccatgcccaccccacaccaaaagcaaaagcaccaaattgggagaacaaggctgcttgccattgctcacctcatttttgaaaaaatcagagaagtctatgaaatacaatgttcaggaaatgctctgaaatcaaacggatttaggctgtcatgtacatggttactcaatgctttaaatgtccaaagagtgtcatgaaggggttgaaatgtttgtgttcaatgtttagggggaatgtgttaaacaaaagttacttctcaaacgatgcccaaatcttccactaacacatcaacctcccctatcactttttaaaaaaattgtaaagaggaagaggttcatctaactataaaaggaaaagatgaaggcacgtgatattattcggtcccacaatccttaagaaaaacggtattttgcaagtttgtgtgtgtgtgtgctcgcatacatgaaacgcgagtccaaggggccattggggcagtagtccaagggaagctggaaaaggggaacaagagagagtttttagacagaagaaaggaaaaaggaagaaatagaggcctctcttcagctttctgtcattgacagtctcaagattcggctgctttagagtccagaaaggaatttgtttgtcttggtctggaaagtgccccagttaaatatctccagttcatcatggtacagcttttggtgtttcccttttcccttccctccagccaaatgattttttaaaaaaatcacagtttttaaaaattattttttcaatgttgaaaaaatatggaaaagctattgaacagccttagggcactgcctctccatcttcacagtgagcagatggatggataatccacagagtcaaagaggaggtgggcaagatcccttgtgctcagtggtctcttgccccaccttcctgagggctggggggccttcacaccacccacagccatttccctcctttgggtccctgcccccctgctcccatccatggaatgtgggctgctgagaaaggcagagccaggctagggaacgatgataacagtaacaggagggtctcagaagcagagggtgaaggagacaggaggcgtgctctcctcaggcagtgttagcagtgtgctctcttggcagcctcatctcaggatgggaaagtgtggttgcccactgagagggtgaagtcccactcacattttacttcgtgagacctcaactctcaggctcaccacctttatgcctctctttgcatcaggttggcccccagtccctaagaaggcaatgatttgagatagagaggcagagcccggctgtgtcatacaaaaaagggcaacgcacagcaggatttcagaaacaaatttaactttggttttccaactttttcaaaccataaaaattaaagcagggcttcggtggctttgataatctgacagctgttatatttttctcatttggcaaggctaaggcagggggtagggggaagagaaaaggggtttcccataattggttgaagacacagggtggtaaaatgcttccacacttaaactcacagtccagtgtttttgacatttcataaatagctttttttctctaaaaaaagaataaaacaagaacaatccctttacttactcatctgaaacaaaataaacagcagtgggtacaaacttcttcttgtaacaattacaaaaaacaacaatataatcccaacttttaacacgcatcttgaatcagtaatttttttttaacctcaaaactgcagcatatccttaagggcaaacttttcgattagtttttttctttttttttttttaaataatgtcttcaccaaaaaaacagtcttgtaccaataaaatgcattcaaaaatagaaaatattacacaacaaaaatatgtatccttcctttccaaaaaagattcttcacaaaaaaatgtagaaaaaattccaacaatttttttcctctcctaaacattaaccttcagtctagggcacaattatttattgatttaaatgtctgtttttgcataaaacatggaagatgcaaaacatttactgtattaggattgtgaagttacagccactcccacccctgctctaaaacaaaacaaaaccagaaaaaaaccagcaaacattaaacaaatgatagagtcagttggctaggaaaaataccgctgttcttccctttactgtgcatttgtatgggtaaacgggccagtttggtattggggaatgttgacgaagggagatcaggtttcaagattggattcaagagcttctttagcatatgctgataccaatgagtcactgacagtccccaggttgtacaactatccattgcaaatcctcatgagaagagaaacacatgaggtagcacatgggaagtcagaggactgaagcgtgtccatgtgtgtactgtacacatacatcttgaaaaaccactttctcaagcatatacatatatatatatatataagcatatacatatatatatacacacacacacacaaatttgttacatagccaatttgtttttaaatattttttctcaaaagggagctcaagcataagttaaaaggtgatgtggaaatccagtggtatgaggaaggctggggttatttcctccatactttcttccacatttaacctgtttgggcattaattgcaataatgacaagatctctgctctcagaggaatgctctgttttctccatccccattgaactaccaggttccttttatattttcagcattgtagtttaaactatgtatttttcttacttgatgatattaatctttcatgtgggatgtagtttgtatgtgtattcagtacaaatatatttttttcatagctgttttcccctgttgcttatttgctgtttttttccctcatggttttgctttgttttgtttctgattttttaaacagtgaaatatgtccaattttatttccagtgcattaaacaaattttaaattaaaagaagaaataaacgtttccccccatctttctaaaggaaatgactaacaaaagtacaatacaatagaatcaggcattgccaagaatagcatgatgtgcaacctcaattatatcaaagaaaacaaatagacaaacaagaattatagaacataagtatgaaggagccaagattacataattccaactatggtatgattggcaagcactggttaaaaaacaggtaaggctactcttagatttctaactcaacatagttaaccactgctcttctgtcttttccttcaacttttaatcttttactccctagttctttatatctttaaaatgaacaaatttgtttttatatttttggtctacagtagaattacatattaataatataataaaaagatatttcattaacaggttggtactgcatccatgtggggacaatagaaaaaaagtactcaaatagacatagcaaatggactctattcttataaaaataaccacaaatataaagaaattataatcagggcaacagattaaaatgaaaaggggtatagaaagatatattttagataatataaactcctgacaagctatgccctagaattgcagcctccaaaccttgcccatgatttccacctttccatagcctcacttcaagttcaaatggaaatgaaaacaaaataaagtgaacaggtggttgagccagccaaagcctccaagttatgttaggtggacagtaagaccaggtggacagcatttgagaaactggctggacacaggggagctgctactggtatttatatttaatttggaggaatttccagcccactgataaagagagaaaccaaggaaccaaatgacttttctagtaacatataatatatgagatgaaatataattctgttagagaggacatggtggtgagatgggaaagaaaagagaagagaaacaggcagacttcgggcaccatctccctttgttttctacaatgcattggtttccttctgttgcggagcattctttaggattagctacagaccccaatgtcctctgagtaaatatatgtcagctcagctcctgacatgatatccatgcttattggcctcctggagggctgggtggttctggagggtccctcccctgctatcactgcccactggcccttgccttcaataaagcagagaaggtgtgcaaagtttcaatggcaggggctctttacgttaactatacctaactgatgactaattcacacagatggttccatatggaaacaaaaaataaagagaaagaactggtaagagttgagctcggtagccaactagtgtgaagttttcttccaggaaaaaaagaaggagaaaaagaaatggtatctgtcagaaaatactgcttttggtttcttttaactttgagctgtccttggtttttctctcagtcagttgctccagtttaaaggagagtttagaatctagtgcaaatatcatcaaatcacagcattccagagcaatatcctgtcccttcatcctaagtggatactgtcccttcaaacctcctcagaagactggaggcaatggtacagaaaagcgtaactgaataaattattaatctagtactcactacgacaagaaaggcactatcacaacagatcagcctccaagcattttccttgccatgggcatgggcgtttcaaccactccagaaatcacaacaaaatccagactgtggctttttcaacacttgaattcattggccagttgtctgactctcccaccggtcactgctgttggctctggccatacagaaccctgatctgcactgtgtacatgctgccctatgtttcaccagtgacctttgtttggttctaaatgatttagctcactctcttccatggaagtttctttctctccatcagtctccaggtcatgactctattaaagatcatttacagtgtcaagtagtgttgtttatttttttctattttttaaacctctgatcaaatccaaagtcataaagatagttcagtacgtcctctgatgacaaggtctcctgtaaataccattgtgaacagaaggaaaaccatagtgtaatcccttgaccaccaaagcatatcccttgagcctgttgtagtacttttttctgggagagaggaaattgcgatctgaagattaaaatctttggtgacagaactggagtggatatgcaaatttcaaggaagaagttttccaaagcctcaagagaagtatcctaggacagttaatgtgaatatattttaaaaagtcaatcatttctttctatagctttggtttggtgcagtcaatgtcctcttagtgattacccaatacttatttctaagtacctgttaaaagctctggatttagtttcttacttaaaacagagataatgctttgagtgcttaaggaatttcttatgctagtttggatggctctaaatggagtttttctgactaacaaggctgacaactttctgaacaatatttaaacttggaatagtagacttggacggatagtaaagaagagagagaaaaagacaggttatcaatgttgtaatcttagggaaggggcctcaattgagaattttccaaattgatgccccatatgtgacagtgttcagagaaattcaacattagccatttatatgggttgtgatcctttcctactgtgccagaaccttcaaaactgtcactttgagttccagaagagtccttcagcatctttactcttgtgttattatttcccacacaatctattgcttatcctgtgatgaaagattcttttattaacagttactaaagagctgtcaaactctgattacttctaagattaaaaaagataataaaaataaatttaacaaagaaaagttaggaaaaaaccaatttcaaaactaaacttttaggcactattaaggtcttctgcttagtaaggatagtctatgatggagcagctagtatgttctaatccatcctccaatgtccaagttggcctagcttgtttcaaaataaacctttcacttcactggttttcagtgtttattgcactgttccctatctgtcatcttaaaggactttaccacatgcatagccttcctctttggttagcctgatctaggtttcacccagggatggagaagcataatcaggctgaaaagtaattccaatatggacaaggctatgtgtttttgaaaggagcacatcctactgccctctgccacactaaaatgtgcacaagcaaggggctttgtggaggaggccaaggcaaagacttctacatcatatcaattggcttcttcactgttaaaactcttactgagagctcagtcagaaacaagattgggtaaactttttcttaaatgttcttaattgctgtactaactcagcttctttacagtaagaaaacagatcctatcagcatggtggttcctaggcctgatcaagagttgacagagattccacagattctcgccaaccctgctaagatcaagcatgatgaaaataactctgcattttagtgatgctcctacttccataatttgcctttttctttcccatacgtaacacactctctcccagcacaagtaagtacatttcagtagtgcaatgcagtgcagtcatatttagtgcaaaaaaaagccctattataacccaaagctcaactctaaacagctcttacaaaggttaccagtgctacgaaggtgggaaattcagtctatctcacacttatgtgagtcatctcttttgttgctcctgtttgtttcagctcaaagtagagaaactagcatgcacctatgtattttctgtaaaacattaagccaataggcagaaaataaaaggaagtagtctagttaaaatcaagggtattatttagaagaggaaaacagctatttaatgtaaaggtcagtagtggtttttacttaatagttttcatcatgtcagatggctctaatgctaaggggaatgggttcagaaaaagataaagctttcctgtttcttgaaacacggtcctaaatttaacagtgctgggcttttatttttgaatagtgcaatcagctattcctcaagggctacaggcagcagccacctaacataacataaataggtacactaggagcactcacttttctacattgatcactttttccctcacctcattagtctcctattcttttttttttctgactacacataaatacagatatacatacacatacacagaaattctcaaggcccctctcagaatgatcaattgaaaattggtacaaatagctcagtgacacactcacacagaagtacaattattaaatacaaaagtgaattattacagcaaaattaagagtctgcattgtacctcttcttgtgttattccataagaagaaaaaacattcatagtaggatttcttaaggagcttacttctttctaaagattagtctagaattagtttgggatgtggcaatattgagtgattctggaaaaatgatttgtatttgatcatcctcaggaatccgtttcttcagtttgtctgggtcttcaccctccaaaggtaagtctgcttgtctgctcatacccacacatgcatgctgtaagtctcaagagaatcaaagtgtagtttaaaatagattgtgggaaaggaattaagcatagtggggtcagcacactcaaattaccttaaaatatcaagttaccatagattttctctatcatatcagcttctcacctttgtttgccatgatgaagattactaagacaccctgctttcatctactctgaaaaccataattctttcaacaatagtgtaggaacaattttaattagatatatgcaaattacccttaatttatatctcaataggctcctcaggaaaactgaggttcaaatcaacgggcctaaagaagaagtttagcagctgaaaatacctttgagaattttctcctgtaaatctacagctggttccaaattaaagtttgtcccaaggagagcaagagcagagtaactagcctttgttttcaaagattcccctagttgtgaacatgcataaagcactttgaactacaggaaaatcttatctcaaatttgaactattattttattttcagtgatctctctgtacactcctctcgggcccggatagcacattaggtatagaagtcaggagtttctacaatttctctagaagtgtttggcagcatgaagagaaatctttaatcacaaagaagtatagttaacttactaattctttgaattgtaataatgagagataggcaagaacaacaaggggtgagtagtgctaactttctccggtaaccttgacaactggctttaggaatccagacctgtatcaaatttggtcccatcacattgtcctgttccctctctttgtttttctctgttcacttaattgaaattgcaattattttaaagattgagccaagaatgtcaattatagcacaaaagaaaggttacaaaaacgttgtcaggctatctgttaatcgagttgagttgaaaacagtatgctttcaaatgaagtactacaatttccttttttaaaaaaatagtttctaatttgttttttccttcttttgtggtggaggggtatagatgggtgaagtactggcaatgcagtgccaatctccctctgttactgttccctctagtgcctggggttggggcaggtgcaggggtgtggggaaggagagagaagcaatggggaaacaggtgtttctctacttaagacttcatgaacacatacagtcttgaaatggctagaaaagcaacaactacaatgataaaaatcaacagatcaattgattttggcatttcggcagcaccccttccttttctttcctgggtatcttgcagtagatattaattagaaatacccaaagaatttaattaaactaatttattcccagccttattccaaaaaggatttgaggaggcaataaggatttgtagtacaaaatgcatggtcttcatctgcaatcaataaaaaaatctattctttggccccagacctgttagtttaggtaaatacggtttctttctcaaggaacaggtttttgttttaactgttctatcctcaaagtaaagagagaatttctctcttaaaagctcatgagtgctatttgaaatggaagataagattttttggaggaaaaattccttcatggtaggatggaaggcttttctttctaaggggaaaataatacagtaagggtgagcagttatttgactgtccatggacagtaacaaattaagaaataaaaatcctttactatcttgagaagaaagaaagggaaacaaataaatcaacaaaaaaaccttactaaaatacacattcctccagtttcagatttctaaaaagtaataattatgcttaaatcaaggtttatagatagcaaacaactgtttgaatgtgtgaaagtattatccctttgctctaccatgtttcactttctttgaaggaattgcatctatgcacacttatcctgaagtccagtgcagaaaataaacttgtttgctaccagcctcaatctcagaacatttcctaagctatatttgtaaattctagagctacatatctgtaaaataagatgcagactttctgaaatgcattgtatgtgtgtgtgttgcagagggagaggggagcaaagcaagcttttcctggagaaaagaagaaaaaaaaatcttcctatcctcacgaatatatactatagtgtttctgtctattattttgatgcattagttactgttagggctattgatgctcctgacaggtgtcagcttggaaagacaggaggctcataagcaataataaattcacaccctggagtctctagaatatcaaacaggatttagacattaatctgagactaacacagaggttgtggtgagaaattctgggtcttggggttggaatacttcttggggaactagaaagaacagcatcaagaaggcatcccagattgaggaccaagtaagatctatcagaaccagagcctctcctcctccatattatactttaaatgacagcattttaggatttaaaagagtctttcttcctttggaagccagtgcctaaggagaggattactttagataaagagtactttaagaaaaaaaaaataccaggagttagaatggacaaagaaaaagaaggatataggattgattgggagaacattccaagtgaagatcatagtcctaagcaatgtaaatattgcctttaagagatgttgttttcctactagatgcatgcctcataaaggctttcaaaactgctatttatttcattgttctctatggtgtgagttgatgttataaactggtttgattaagataaaagctgggtcaaatctcaagtcaaataaaaatacatttctgatattaaatgttgattctttttgtcaaagggtaaagcaagaactgaaagcataccgcctatgcactcaaaaccacatagtactctaaatgtcacaggacttgtcttcattaaagctgagaggcgatgtggtatcatggcaagaatattggaccagaagtcaggaaagactgtgttacgaagttgttgtgaatgtgatattataagcatcctgaaaaggatacacccagaatggtatcagtcagtcttttgggcaatgctctggtgaccagacagttgtaatccactgcagggagatctagcatgacaaccaaattatatggggcgtatttaggtgctggggagtgcactgcatggctctttaggtatccatttagctctgttattattttatttaagtatatattaagtttatgtttaggcaatctctggttgcaaaaacagacactttcaaaactttatggatcttttcatccattagtaagttactgctcaaagttctaaacaaatcaatgatttttttttcaaaaaggcaataaataaaaaaactcttcctaatttttcctacaatgtgttcaagtggatgtggcttttcttgtttgagaagagctcactaaggcttgaacagttatcaaaattattttgaaatgttactcttttctttagattcctataatctaaagtctgataaacaagtaatttgactagtggaaacagtcaacattaatgattctttttttctccgtcaaaagtgatttactcatatgaagaacctgaacactgtggtatttaaaaaaaaaacagaaaatatttttctcttcatttttggccaaacgtgaaggtaaggggaattaatgacctcagctagtacagttgacatttaaaactgtgactcaggtcctcccactctcaaaagaatattgataacttttaaactctgaagctaaaatgaagacatgcttcactctgcctacgagtctcaagtttatgaactcactcactttagtgttctttcattaaataaaacttaaagaaggatgttcagaatggggtggagaaaggaagagaaatgaacagttaggggtcacaattattagagttttgggggcagtaatgaagacaaataggtaatttgaagtagtcttcaagagaaacaagaaataaagggaaagggttaggaaaaggaaagagggaaataatgaagttgatataatttggatattatgtgatcattagagaagaaacagcctcactaacagtcaattcacaattatgtttgtctagtagaaatatatctgctggaacactttggagaacagattggtaattttgccattacactagacattagccctttcaaagcagactaagagtacgtagttccttagtgaatacaaggcttcacaactgaagagcattgcagggagcttggctaaggtgaaaagggacttgctggagaggtacagcagaatgggatgggattagaaaacaacaatctattaggaaagatgaaaggaaggaattccccagtgttcacgctgagaagtcttcatattggaccagtgtgagggggtcttttatactgaggttttaaaaacctgacttcattttgtcctgaatgtagaagtgaagaaggacactagtttcaggcacctgggatggtggaaaagtttattcaactgaggctttccatgcattgggttgaatagctgagggaagctgaagactcttatctgaaaatatgatctgaaaatatttattgtataggaagacagaatgcctgatttctgaagttttcttgatggcccaactaaagaagaaaggcaccaaatcctcactttaacaggtaaatggagatcctgagggctggatacccaagagccaccattttacggattcctcagatttaaaaatgtctcagatagatatttccaaattctatttctattagcctctgtggataaagagttcctgaaactctggttttactttttttggaaaaaaaaaaaaaaaaaaaaaaaaaaaacaactcccag
